United States Patent Application Publication US 2007/0161031 A1 - sequence listing, part 22

SEQ ID NO: 27441 - DNA, 2300 bp, Homo sapien
ttgtttttatttttgagacagaatctaactcttattgcccaggctggagtgcaatggcgtgatctcggctcactgcaacctccgcctcccgggttcaagcgattttcctgcctcagcctcatgagtagctgggattacaggcatgcaccactgtgcccagctaattttgtatttttagtagagacagggtttctccatgttggccaggctggtctcgaactcccaacctcaggtgatctgtcccccagcctcccaaagtgctgggattacaggcatgagccaccgcacccggcccttaatttttaaaatatactttttcccactagaaatcccaggccagcttcccaagttctcacttccacatgtcatattggcatcacttttgaggacttcaatggaaaaaaaaatagagataaataaatgttgaaatcctcaattttcttggcaaacaaattatccatatctacaggtagatatagatacctgtatatcttctataaatatcttcagaattttatatctatctgattgattgatcgatatagatacatatcctttttattgaggggccaatgtctaacacctatgaatggcaataacaccaataataatggaccatattaataatactagattttttttttctggagccatttatgcccccggacctctttggcagtctgtgaaacctgtgggccaattttcagaatcagatttttgaatgcacaaaataaaacacacaggttataaaggaaaccacttacattaagattaagataccattataaaacaatgaatgaggtagcaacacatgtgctattaatataccataaccagatctataacaagcctcggaggtggtactaataacctgggaattttgaagcagtgatgggcataagtggtggacaggcataacatggaatgagatgatccagtgatttttactggtgtcaaagtcacaaggatgctaacacgccactgtgcttgttgcctaggtacctattgaaaggaaatgatacatttcagttaaaggctagcgaaaataaaaatgtaatttttaccctttaagttcctggatccaggtttagaggcccctgcctgcgtcattccttcccccttcccttcattccttctccttcctgcctgcttctagggtgaaaaccaggaaggcaggtctgtcaccccagcaccagagcccctttatctaaaagatccacagtcgattctccctggccatgcctaataatgcattgatttttgcaatgatctgaatatctgtgtccccataaaattcatatgctgaaatccacacccccagggtgatgatattaggaggtggagcctttcggagatgactaggtggtgaggggagaaccctcatgaccgggattagtgatcccatgaaagagaccccagagagacccctcaccccttcccatgtgaagttagggtgagcagaggccatcggagaggaagcctccctcaccagaactgactccgccagcgccttaatctcagacttccagcctctagaactgcagaaaatacatttctgttgttcataagtcacctatggtattttgtgatagcagcctgaacagactaagacattttcgtctcaaagacattataatttacatgaagttaatgtgtctcggcagacgaaggaagctcacgccttgtgaaggaggtggcttgtggctattaccttagaatctcatcaagtgctacttggatataaatttcctatagcccaaattgtgagaagtggccagtgtgggttcacagactgcctcggagaggggcacatgtagccccgagggtttacaaacgcttgttcccagcagcgatgatgaagaccccacaccaaatccgagttaattaaagtgctttatttaatcatctgtggtgttgctgagggagatgaaggtgatgctgaatgcgggagcccgggtaaggcaggaagtggagagtcatgttaccatggcaacagtgtccctggcctgcagtgtgaatgaagctctggctctgaagacctctgtggttttaaaatgccatctatgtgaatatgacatcaatttgtcacaacaaatctaaatagaacctactggggagggacagagacccagagacccagagggagacactgacacagagagagtgatagagagagagaggcaaagtcacagagacagaaagaggaggggagagggatggagagagacaaagtcacagagatagatggagggggaagaagggaggaggcagagagagagaggagaaaaacagagagacgg

SEQ ID NO: 27442 - DNA, 2300 bp, Homo sapien
accatagtgctgcttacattcatttcaagaacttgtaaacctgctcactcactgactgcgtggtcagggtgtcactgcagacataaataacagggcttttttattttgcaagaaactttgttattagtcacatatatggtcttgcctacttctcttcctggtttactttggttttgctgcctctgcacttgttggtagctgggatggtttcaccactgaaggaggtcaaagggtggtcctgggggaggtggctgtgtgctgtgtgcaccacatcccccagaaggagctgtcacaggtgataggcatgctgcttgaagaagtcagtgctagctcacaagtgttagtatttactcgattcatctgaggaactttcagacatgcagattccctgtgaatcaaaatcacaatgagatactatctcacaccaggcagcatggctaaaacaacaggtgctggcgaggctggggagaaaggggaaggcttatacaccgttggtggcagtgtaaattagttcagccactgaggaaagcagcttggagattactcaaataacttgacatgaatgctaggcttaatacctgggtgatgaaatcatctgtacaacaaacccccaggacacaagtttacctgtgtagcaaacctgctcatgtacccctgaacttaaaagttaaataaaaaactaaacaaaaaccatgttttccaatatatttcaaattttttaaaaagagaagagagtctaatgggattgtaacacaaaggataaatgcttgaggagatggataccccatttttcatgatgtgattattgctcattgtgtgctggtaccaaaatatctcatgtaccccataaatatatacacctactatgtacccacaaaaattaaaaataaaaaaaatttttaaaaagaacgtaagacagagttaccatttgacctagcaatcccatgactgggtatgtacccaaaataaaattattctaccaaaaagacacacacccatatgttcatcacagcactattcacaatagcaaaggcagggactcaacctaggtgcctgcccatggtggactggataaagaaaatgtggtacatgcacatcatggaatatgacacagcaattaaaaaagaacaaagtcatgtcctttgcagcaacatggatgtagctggaggccattatcctaagggaatgaaatgcaggaacagaaaaccaaatgcctcatgttctcacttataagtgggagctaaacagtgggtgttcatggacctaaaaatggcagcaatagaaactggggactccaaagggagagaggaagggagggggacaacggttgaaaaactaactgttggatgctatgcccactatctgggtgacaggatcattcctatcctaaatctcagtgtcatgcaatatatctgtgtagcaaacctgaatgtgtaccccctgcatctaaaatagaagttgaaattattttttaaaatgcagatttttggccctgtcccagggaatctggtttggtaggcctaggaacctgcattctaatgagcacctccaagtgaactccaggttggggaaccctgctgacggtcaggtaagcaaaattcctccatgtgaaactgtcccagagggcacggtagctctcctgtgctttttttttttaaatctcatttacgaatatagatatacattattctaaataaaatataaaaatagaaccaacccaaatgtccatcaatgatagattggattaagaaaatgtggcacatatataccatggaatactgtgcagcgataaaaaaggttgagttcatgtcctttgtagggacatggatgaagctggaagccattattctgagcaaactatcgcaagtacagaaaaccaaacaccgcatgttctcgctcctgtgcttttgatacaaagtgccaatatttcaatttttctcaaaacagggcctgtcctgataaatgttctacctagagaatgttcttttaagggctaaagggaatgcagaagcctaaatacaaagcaagtgcccctgccactcataactgccacatccccatagaaacattcactttcattagctggagaggagtttctcttacttcattccttgaaccactgtttatggagcacttccaattaccagacacaggtgacaaaaaggtaaatgagactggaccccatgcctgcctcctggagcccacattccatggagtgggatcgttatcttgaaacgctgattgctttgctttctttttctgcacttcttatctgtcttttcaactgaggcatccatttt

SEQ ID NO: 27443 - DNA, 2300 bp, Homo sapien
agaatattctaacctactaagtctgtgtcctttgctccttttgtagtatactttcatctaaattactgatccccaatatgttgatacacaggtgagaaagggaagaattcctaataaactgctattacttttaggtgcatggggtttgatttttgagctctaatgaaatgcttaaacttctttccagttcaaattttacacttaatttataatatttattgagtatattatgtcctcaacaagtaactataaaatgaaatacttaactcggtgaagactattttatgcaaagtttttttttttttttttttttttttttagcaatttcagtgtaatgaaagaatttaagctttgaatttataatttgctgtggtggggttaatttctgtcagtatttgagattgtattatcagtcttgcataatgaaatccttttttggctaagtatttaattcgaacatatttgcctttttaaaaagtgcttggcctaaacttattgtaactgcatgaaataagcatttgcttaaaacttaacattgtaaaattgttctctctgaaatgtgtgcagaatttaaatcatggccaaatgtattactattaccctatttacagtaatttgctttgcagaaaatatttcttcatcatggaactgtgaaatcaaattgaagatcttactggtaaaaatgacaaattaacaaaaggactaagacaagtggtgcccaaacaacctttttattctgcagttccatcatcataatagaccagttaacccaggagtcctaatgttttaaaacatcattgtggtgatcttgtttattctatctcactaaggatatccagtttcctaagctcttactggctagcaatttcgtcttaattttattgctaaatgttcaaattttgcttccaaactcactttatttttgcagatgtgtacatctgctaagtactaattttatgtaaatgattttgttgattatctttccacatcttaaaatgtttctaacagctttgagattttatctcaacaggctctctctgaccccaaagtagtacttaccttcgtgactactgacaaagtcacaaaatgcaggcgatgtcatgtatttcggtacaactaaatctaggaaacggttttttcattgcattactgcatattttcattttcatttaaattatgtcccctttttctcttgcttgaaacagtgctcctcgaactttgtcttccagcacattttaaagagaaccaattaaagaacaatcacacattctgcttattaaaggctatttaaaaagaaacattttgtattagaaaatggccaactttaaaacactattttttacactcataaaaatgttttttaaatcgccttgacaatcatcagcttttgaaatgtgaattcctattgccagagtaaaggtctcgtttttataccaccacgaagcgctgtatttcttgctgcccttgcgtccgcccgtgcccgctgtctgagggcgcgcctggctacgggggccctcagtaccaccgcgccgccacctacctgggcagtcgaaatttggagcgggtgctcagtacactaatgctaccccagtctctcctaacgcagaaggaaaatggaaacggacgatgaggggacggccccacagctcccggacgccacggccagcggcgctggctccgcccctgcacccctggttccgctaccgccacgaacggaggccccgccctcctctcgccccctgcccctctagcccgcagtcctcccacctcctggcgcccgcagggctcaagctgcgaatgaaagcctttgggggccggacgcggtggctgaggcctgtaatccaagcactttgggaggtctaaggaggacgatcgctagagtcctggagttcgagaccagtctgggcaacatagcgagaccccctcccccaatctgtaatttaaaaacaaaaaagctgcggggactgctggcccagggcatgacagcgcgggcgggcggtgtagagggcgtggccgcgagctcagggtgtgcctgggagcgagccctgtgcggggcgggacgtagcgcccgcgcggtgggggtgtggccgcgagcttgggctgtgcgcggagggcgtggcctgtgcggggcgggacttattgcccgcgcggtgagggagcgtggtctcgcgcaagccggcgtgcggtcccgcggcgctgcagttgtgtccagccggtcacggggcggctatggcggccacgttcttcggagaggtggtgaaggcgccgtgccgagctgggactgaggacgaagaggagga

SEQ ID NO: 27444 - DNA, 2300 bp, Homo sapien
tacagcctagtagcaactatgagaaaatgcactgaaggaaagaaggatgcattttgtgcaaatgaaaagaccgttttggggaatgttacaaacaatgggatcaaacagatagagtacagtcaaagtttagcaactttcgagccttgcagaagagtttggattactgaactgggttccttattgagtgacagagtcacattatgtttcaggaagattaagtttggcagtgatgtgcagagggaggggaagagcctggaaaaacagggagtcaaggtgatggatggtagagttgacaggagtagctgaggtgggcaaacagtagaacaagttcaaaggatgaaccacaatttggtgtctagtattttggtatcacagccagttttcttttcttccctctcacactctttctctcgtgtagctgttatgtaagaaatgaccttactgtgctgttaggaatgggtaaaaggatggtgagacatgcaaactatgtcttctgaaatgctggaattgaaatgatggtgtcttttttatatgaaatacctatctgatatcacagaagggagtagacatggatccaattaatttaactaatttatttttgagacagagtctctttctgtcgcccaggctggagtgcagtggcacgatcttggctcactgctaccttcccctcctgggttcaagtgattcttctgcctcagcctccccagtagctgggatttcagggtcctgccaccacgcctggctaattttgtattttcagtagagatggggtttcactatttggccaggctagttttgaactcctggcctcaagtgatccacccacctcagcctcccaaaatgctaggattactggagtgagtcaccgtgcccggcctgcagctaattaaatttttaattggaagtctgtttataaaatacataaactatattttgtaaatctacactaggattaatctgttatttttagaaatataattaaaaactatttggaatgctgattatgtaccttttaatactccaaatttcatcagctttttttgggaatggtttttaaaaaatatattctaagcattttaggaatctgcttttgtagtaatgttatgtaatgttcagagtaatgttatgaactgcttgcttatgtgtgtaaagacaggagaatatatgtaactatttacactttatttttcctagaaagtgaagtggaagattctttagctacctctttgtcatcgtcagcttccagtagttctgaggaaagcaaagagagttccagagctcgtgaatcctcctcacgcagtgggctatccagaagcagcaatctcagggtaaccagaactagagctgctcaaagaaaaactggtaagagactcagtagtacttttatggaatgtatatcaaaagaatccaaaagttataaattgaatagattctcgatttaatgcatctacgtaagattaagttaatgtcctttaggttccttagatttaggaaggaaatgaattttggcattaaaaagtgaagaaaaggctgggtgcggtggctcacgcctataatcccagcactttgggaggctgaggtgggcggatcacctgaggtcaggagtttcgagaccagcctggccaccatggcgaagccttgtctctactaaaaatacaaaaaattagccaggcatggtgactggtgcttgtaatcccagctactcaggaggctgaggtaggagaatcgcttgcacccaggaggcagaggttgcagtgagccaaaattgcaccattgcactccagcctgggcaacaagagcgaaactccgtctcctccccgccccccaaaaaagtgaagaaaatcattaaaataatagtcatttaaaaatgttgaaataaggaaaatctttttaatcttattgttaaccttatttctaggtcccgtttcattagcaaatggatgtggcagaaaagccactcgaaagagagtctatttaagtgattctgataacaattcattggagactggtgaaattctaaaagccagagctggaaataaccgaaaagtcttaaggaagtgtgctgctgtggctgccaataaaataaagctaatgagtgatgtagaagagaattctagctctgaaagtgtctgttctggtcggaagctgcctcaccgcaatgcttctgctgtagctagaaaaaagttattacataattctgaagatgaacagagcttaaagtcagaaattgaagaagaggagctaaaagatgaaaatcaactattaccagtgtccagttctcacactgcccagagcaa

SEQ ID NO: 27445 - DNA, 2300 bp, Homo sapien
attaccttaactatcctttcatactcagtaataatattacatcctgaatttaactcctcaaaacaaaaaactacattaatttaggctttaagcagaatataagcggaaaaactctatgccaaagaataatctgaaaaaacatttcacgtgggcaacaatgatcttatttccagttgcatagccaaaattggccttgtttactgacatttccttactgctcagctaagaggctcataattcctaattctagatagactaaatagggttgtcagttattaatagcaacaatatttcatgaatacgtaataaactttaatgtgacatttttctccagacacagttgcaggttgcgttttgtcaggaatcattgtataggacgcttccagttacaagtgaaaccccaagtcctccttgctctgcttagataggtctgcccacttgagaaaactttcatctcagcaagtatttatagaaaagcttttggtgctgttaagtccacatgtatgatgggcagagttgctgccaccatcttcagctttccagctttgagattttgccactccctccccactggcatctgctttaaccatgactgaaggtcccaggccagggatgcaaaatggtacatatatgcaggttgtgctgtggcacaggtggctcctagaaggaccatgtgggtgaaaccatgttcttatgttttaatgatcagttggaggaaaaaaaatatataatatatatacacacacaatttttttcctttttatgttaagagaatatgaattaatatgcacatcttattcagcaatcctctgaatatccgagtaactttattttttccacgtttgctaattgtcatccttttcatgtgcaacaatagtgaagtatcactattcaagcagtgacttacttgggcgtggacgtgagtttgttctggcagttactgagtagatgtctcatttctccaacaccgaacgcgtaacatttagttactggaaagttaaaggtgcagacaacaaatatgcatagctctacactgtagagttaaccaaataactaacttaactataaattgatgatattaaactaatatagtttacagtttaaaaggaagaataaaacagtataaaagtaatctatttaaggttacactcatgatagacttagagcatcctttctgaaatctctgttagggtagttgtggctgcagactttttcatatatatgcttgagacccggcagcattgccaaattttgcatggtgcttagtcatcttagtaatgagctgaagtagagcccaccttaaaatctagaaaagtgttcgttttagttcatgaataccaaatttggttaatctttaatcatttatcttgtagcttattatccttttattatatactaagacaaaaatttatgaaattgtttataagaagtaaaagaagccttcactttggattgggttgttagccttcattggagcacttggagaactaatgcttagaagaactttgaagacttttttctaggctagttgtatccaaaatcaattttatttttttggaatagtgattgatgtatatgcttaatgaaacatttgtttttatttttattttacagagtctcactctgtcacccaggcttgagtgcagtggagtacagtggtgcagtcttggctcactgcaacccctgcctccccggttcaaacgattctcgtgtctcagcttcctgagtagctgggactacagacgcacactgccacgcccggctaattttttgtatttttagtagagacagggtttcaccatgttgcccagggtggtcttgaactcctgtgctcaggcagtccacctgcttccacctcataaagtgctaggattacaggtatgagccaccatgcctggctgaaactttttttttttttttcagaagggatatattgtcacaggttatccacattaaaaaagtttacatagcaaatcacttgcatagaattggtcctaacttttttccttttgtgtttcctagattgaaggacaaggacatggagctgtgtttgactgtaagttttcacaggatggacagcattttgcctgtacagattctcatgggcaccttctgatatttggttttggatgcagcaaaccatatgaaaaggtcatttttaatactttgttgtagcatgcaagtaatagttatcagctgtgttttggaaataagtagttatgagctatgttttggaaacagtttagctgagtgatttgatttccttgtttttctagttttaattaactgtttaatatttg

SEQ ID NO: 27446 - DNA, 2300 bp, Homo sapien
agtgcttgctgaattaacagatgtaaggagttaacttactgttgcactagctcaaacatatttagattgttacctcacaaatagctttttttttttggagacggagtctcgccttgtcgcccaggctggagtgcagtggcgcgatctcggttcactgcagcctccgcctccggggttcaagcgattctcctgcctcagcctctcaagtagctgggactagaggcgcgcactgccacacctggctaatttttttatttttagtagagacgggggtttcactatgttggccaggatggtcttgatttcctgacctcgtgatccgcctgcctcggcctcccaaagtgcttgggactacaggcgtgagccaccatacccgacagcctcacagatatctatgtccatttataaatatatataaaagcttttggccaggcgcagtggctcatgcatgtaatccccagcacttcgggaggccaaggcgggtggatcacctgaggccaggagttcgagaccagcctggccaacatggtgaaacccgtccctactaaaaatataaaaatataaaaattagccggacgtggtggcgcttgcctgcaattccagctactcgggaggctgaggcacaagaatcgctggaacccgggaggcagaggttgcagtgaggtgagatcgcgccactgcactccagcctgagagcaagaccctgtctcaaaataaataaaagcttttgctatttggtgtaaataaaagccaacttgtacacggtgcttactgtataccaggaacacaaattcattaaatcctcacaactttgagacaggcacaaatattatctgtttactagtgaggaattacctacggtttactagtaaggaacactgagacccacaggttgtgacttgctcaaggtcaagctggtggagccaagacaaggtgcaggcagtgagtcctgccctagagtctgacccgaaccacatttaacgtctatgtggtgtgtaggttattgccatgagtaagaatcagaattgttaacgcgcattccaggaaggcagggacaccactgagtgttactgctgtactttaggggccagagcagggcaggctggatgcgcggaggaaactcatagttaggtcagaagcctggcaagacaagggaattttctggtcgtcgtccacctctccaacctcacatcctactagtcttccaagaggattctaactgcacatgactccctagtttccggcttctcttcctaaggagggtctgcggcccgtctgcaccaccctctccccacagtcccgttttcctgtccatgcttggatggatccagccgagccgtcagccgcagctgcgcgctgctcccccgactcgcaccccctcggcgaagcgctgcattttatgtaattttctgccgggctgctggcttgtgggggatgtggctgggtctcggcagccttcagcgccgcagacgctccggcaacgccagcatacgaggcccccgccccaggagcgcgggtccgggcggcgttcccctctgcgggaggcgcggcgagccaatcctcactttaaaagctttcctgtcctcgaagcgaggggtcttccgtgcggggcaagacgcactggccccagacgaccggtccgtgaaatgacccttccgagcgacccggagcgggcgaccttgcccaacccgcgactcggggcccctgcggtcccgcgtagaggacccaggtcccacggggggcggcggtgaatcgccccctcttgtggccgcgcttccgcccccggcacccgcccgctgctgggccacccggcgtcgcgctgccgcctcacaaagcccgggcagccgcctcattgcgcgcagggattcggaccacgcgccctcccctcccccactcgctgctgcggcgcccaggtctttgcctccgcgtcactttctcctcatcgagtccccggaggcagagagctgagcgaggttcgcctccccgggcgggacacgagctccggtcctctcttggcgcaaacccccgccccccgcggagggactacttttcgtctcccgcggaggaactacttcctcccccgcggaggcgtcggtccaggcggcgcgcacggtatggcggcggcggcggcggcggcggcgcgcgcctgagaagaggggacgccagcccggtcaggcctcggcgcggcctacacgctccgctcgctcgctcgctcccgcctcccgccccgcgcccggccatggcggagccgtcgtccgcccgacgcccggtgcctctcatcgagtcgggtaagacgcgag

SEQ ID NO: 27447 - DNA, 2300 bp, Homo sapien
acagggtctctctcagtcgcccaggctggagtgcaacggcacaagctcggttcactgcaacctccagctcctgggctcaagctgtcctccccacctcagcctcctgagtgggtgggactataggcacgcaccaccatgcctggctaatttttgtattttttgtagaggtggggtttttgtatgtgttcccaggctggtctcgaacttctggactcaagtgatcctcccaccctggcttcccagagtgttgagattacagatgtgagccactgttccttgccctaattttttaatgataaggtggttttgtgttgtaatcacagcactttgggaggctgaagtgggaggactgcttgaggccaggcgtttgagaccagtgtaggcaacacagtaagaccctgtctctacaattaaaaaaataaaaataaaaaatgtggttttgtgttagactatgggtttcttcaccctgctcttggccagacttacccacaagtgaaaaagaggggccaggaagctttctccaggtggaaaagaggggttattgctgcaattaggtgttaaatgtcatggccagaataagggcaatccttgccttaggtacccagattgcatctgcccattgcataagtctcaaggccacaaggggactatctcctggtggggtgacccagtgacctgaagctcttccttcttccccagcctcctgcttagaatttctctccacgcttctgtcctttcttctgtagccttcctcttgggtctgctggaatttttccctccctcaccacagatccgaagtctcaccttgggggcaagcaaggccggttttgtctcttcatctttgggatcagcgagaccctgaggaaaccagagggtactgagccagtctgagagagaggctgggggaagccaggggtgactgctgtgttctgcgggggctcagggagatggagcctgtgaaacaggctgctgacagtgggttgaagcaggctggccacggagggcacggggcacctgggaaatatatggacacgatgccccgttcctgtagcatggggatcctctcctaaagcagcctccattgctcctcctgaaagtgtttccttccactcacccttccgctccagagactttgactatcctgctgcctttgaggggagccttgagccaaggaggccgtatctccaggtatgttatgggtcaacgagtttctgcagattgtcttctgatcttttttttgagagagtctcgctctgtcacccaggctggagtgcagtggtgcgatctgggctcactgcaacctctgcctcccaagttcaagtgattctcctgcctcatcctcctgagtagctgggattacaggtgcctgtcaccaagctcggctaatttttttttgtatttttagtggagacaggagtttcaccatgtggtcaggctggtcttgaactcctgacctcaagtgatcggcccgcctcggcctctcaaagtgctgggattacaggtgtgagccaccgcgcccaggcttgtcttcagatctaaccaccacagtggctgaaagatttgaggaaatgttgaaagcataactatctcatatttgagggactgtctagttgagcaatttttcattaaacatccaacaaatatttattgcatacctaccataagtatgtcaggactcatcatagccctgcagatgtgtcagagagcaaaacagacacagatctctgtctgccttcatagaaggtcaagagatagacaataaacaaaatagacggggacatgttacagtaggttagaagatcaacagtgctatggaggaaaagaacacaggaagagtaaaagagaaatgggcacagagtgaggataagtttaaattgtacttagggtggttagggaaggtctcactgaaaatgtgacatttgagccaagacttgaaggaggggagggactcagccatgcagtttttccaggagaagagcattcctgcagaacaaacagcaagtacaaataccctgaggcagccgtgggccaggtcacgccacagtgaggctggagcactatgagaaggggagcagtcaggtgagaggtaagacaaaccagagagaggccagatcgtgtggacttggccttttcctctgggtctgatgggagcctctggaggattttgagagaggaaggacaagtccgtctttagtttgtttttttttttttcttgagatggagtttcgctctcgttgcccaggctggagtacaatggctcgatctcggctcactgcaacctccacctcctgggttcaggc

SEQ ID NO: 27448 - DNA, 2300 bp, Homo sapien
tgtttttgtgatccttttaaaaataaagcttcacggaaggtatgagaatagtatttttcaactttaaatttctcattaccagaagaccatgtggtaattctctgtatacagttagaacagcacggaaacttgaaggcctaaaaaattagctgaccttgttaaaaatgttggcgtgagcagtatattattacctatctttttttattgtgtgtgtgtgtgtgtgtgtgttttaaactaattggctgaaatatctgcctgtttccctctttacatttttcttgtttctttccttatttatctttgtccatcttgagatctactgtaaagtgaattttttaatgaaaacagttccaagttttactctcagtgggtttgggacatcagatgtaattgagaggccaacaggtaagtcttcatgtcagtgtttgttgaggaacgagcctatgaggtcagttttcccaaaaggaaaaagggcagaagggatttgttcatttttacatctcgtttctgtaatacacctttgacttcatggttgatcagactttgaagtctaaacagaacgtaagcacttggtgtatcgattatcatactacacagtagacatgttttcaaggcatatcttgtcactgtgtgtgcttctgacttgtatctttccctagaactaaatattttgaaggtccaaacattatactttgggaaacttgattgatttttttttaatctagcttttcagctgataatggttacacgtggtattatttcaagtccaagatattatgtattctattttaactgtttcccagttttgtattttttgtattggaatgattatgaaattaatgagaaatctttagaaacagactacaaaagagtagttcttaaatacagaagtgattgtgaaactttgtgatagcaatgtgtgtagtagcagttttgtctcaaatacatttatcatttgttactcaaaggatgttgaagtattaaaagtcattatgctgtctgtggaatcctactattagtacagaacaccctgcagtgatttttccgcccgtgttagcattgaagttgtgagctctacttgcttgtctttatggccctttaattcaagtaattggtcagtatccgtatgggtcttttataccacccgctgggggctaaactaatttagctgctgctgtatacttactaacaaggaataaatgttaagctttcttctcagtattgatggatggtatctaaaagtatttttatgtttctttaacatggcttaaattttgaacttaatgtatcaagttagtatggtcatattaatacctgtgcttttcagattcttcaaacacctaaatgaaagtgataaattcaaaactgatccttttagttcctcattatatgatatgaagggattaactgtagcaggatagtcaacctgaccgtacggcatggtgctttttttcaggtgattggtcttaatgtgagggttaaggtcttgtgaggacagtattgttgaagttcacaacaaatttggggatgggtgggaatacggtcgacgagactcctccggtattcaacttcatgacattgtcctgtcatgtggaactgtagggaatagtggatgatggcgacagtggtgaaatatagctcgggctttaggatttgtcatatgtctaatgaggcttgacatgcaagtactattaaaatctccttagcatacattgttttcctgattactgggggggaccttaagttgtctcatgtaataggtgtatcaactgatgtgtgatagacattaatatgacagctgttatggatacagtctatacaaaatgagatcctttcataagcttgaagattggggtttcacgctcatgtgtgagatgtccctctctcaaaccttactatgaagtcagcaccactgggcacattacttgtctgacatgaaggggaaaaagtaaaacaaaatgtaaataaggagtaaagcatgtacttaaaatatattcttattctatcataggataaatcttcagacaaaaaagtgcaaacaaaagggaaaaggggagcaaagggaaaacaggccgaagtggctaaccaagaaactaaagaagacttacctgcggaaaacggggaaacgaagactgaggaggtcagaagtgtgtgtgtgtgtgtgtgtgtgtgtgtgattgctttgactctgaacagtagatactaaattgtacattttttgtagcagataacagtattcattataatattgaacaaagttttgtacggtatcccaaagtgattggacaaatggttttcta

SEQ ID NO: 27449 - DNA, 2300 bp, Homo sapien
cgagtcctgggactgcggcccgcctctattcgtgcgtctccgtctccgcaggtcagctccgccgaaggcgccgccaaggaagaggtgagtgcgggccttctgcggggggtggtgggtttcccgtgagccgctggcctgccttctcttctcgctgactctcctttttctttctccaagcccaagaggagatcggcgcggttgtcagctgtaagtaaagcgagccccgtaaccgttcgttttccgcgggtcgtcccgggtgaggacgctcagtgctgcttttgcctttcagaaacctcctgcaaaagtggaagcgaagccgaaaaaggcagcagcgaaggtaagcctcgaaacgcgcattgggatgcagcggggccttaggctacactgcttcttaatgcggggcttccattttgattagctattggagctttatttatactttaataattacggtaaataatttttctagtggtcgaggcaaaaatgtaatggatatattcatcctggtttatagaactatatcacactaatgctgctgcagatgttaggagacttaggacgacaaaaaatattaaatattaagtctacaaaggaaatttattctttgcgttgcgtacattgtggctggtgcttggcttttaattcgtgcttgtacttccttttttgacaataaaagagtcaagatagcaccgaggccaggagaaagggaacgtgtaagtttttatatatacagtttccaagccaacttcgggaagccttaacctttttacggggtgggggtggggaggtaaaaagttgtgatctctgagaaaataaccgccactactctggaagtgttcatcagcagttatacaaaaccgtgattttggctgctccctaacaaattcgtgattgcatgattcgaattgcaggtctgtagaatgaagttggctttgggtgtacgtgtgtttgataacttgcagggtggaaaagcagaacatgtgtaaaacaagtataagctttgtgtttggatatagcattgaaacctgtaaagctctacatgttcttcgcggggtgattaatttttatccaaaacttaggtgagagtttgctatttgaagtctcaaaaaaaatttttgttaatgccttcacctctttcctaaaagtgtaggtagaagtttagcactgcagtcatcagaagaggcaagattaatttccttgacattgaggagttgttggataattactaaatttgtccttgttaaataaaggtataaaacaaagatgttttttcttttttaatttaaattttttacagagctgagtgtaaaaatgttaactatgttttctttaacagaaagttctgtttttgtgatccttttaaaaataaagcttcacggaaggtatgagaatagtatttttcaactttaaatttctcattaccagaagaccatgtggtaattctctgtatacagttagaacagcacggaaacttgaaggcctaaaaaattagctgaccttgttaaaaatgttggcgtgagcagtatattattacctatctttttttattgtgtgtgtgtgtgtgtgtgtgttttaaactaattggctgaaatatctgcctgtttccctctttacatttttcttgtttctttccttatttatctttgtccatcttgagatctactgtaaagtgaattttttaatgaaaacagttccaagttttactctcagtgggtttgggacatcagatgtaattgagaggccaacaggtaagtcttcatgtcagtgtttgttgaggaacgagcctatgaggtcagttttcccaaaaggaaaaagggcagaagggatttgttcatttttacatctcgtttctgtaatacacctttgacttcatggttgatcagactttgaagtctaaacagaacgtaagcacttggtgtatcgattatcatactacacagtagacatgttttcaaggcatatcttgtcactgtgtgtgcttctgacttgtatctttccctagaactaaatattttgaaggtccaaacattatactttgggaaacttgattgatttttttttaatctagcttttcagctgataatggttacacgtggtattatttcaagtccaagatattatgtattctattttaactgtttcccagttttgtattttttgtattggaatgattatgaaattaatgagaaatctttagaaacagactacaaaagagtagttcttaaatacagaagtgattgtgaaactttgtgatagcaatgtgtgtagtagcagttttgtctcaaatacatttatcattt

SEQ ID NO: 27450 - DNA, 2300 bp, Homo sapien
tttcggctacaaatattctatttcatgtcttctggtgaaaatatataagcatttttgttgtgtacctttctaggagtggaatgactgagtcctgaaagtgtctgtttaggtttaaaacatactgccaattggacatggtggcacatgcctgtagttccaaccacttgggaacctgaggcaggaggattgcttgaatccagttctgggctatagtgtgttatgctgatcaggtcgttagcatcattatggtgactttccacggagcaaaagacccacaggtttgcctatgaaggggtcaggtcagaaacggagcaggtcaaaacccccatgctgatgagtagtggaatctactgccaaatagtttttcatttgagttctggctgctccatttgtttgtgttggcaacttaaaaaaaactaggccaaataaaacatctgtggaccatcagttgtcacctctggcctagcgcatcttcggttcttatgggagaaagttctttatgaggtaagtccaaaagcatagagttcgcttgcttaagaccttgcagtatccctcaatctttggataatgatcgaacttcatgacgggctgctcttctttttttctgcctcttttccctgatctttacgtccatttttcgtatctccatccctgccactttaaaggtcttggtgggctgccacactctagcaagtcagcatgccttgaaatatgctgaccccccctgccgatggcttcccctttctttactaggccaattgggtactttctctccccactaaattactagacccagtgcttgggatacaaacctggattctctctaccccagggacttcacggtgcctgccacagggcaggtgctcagtacatgcttgtgccacaaacttgggtactctctgatgttgaatttttttaaggtaatccatgcagataggaaagtgaaaaaaaattacacacgagaaaagggaaattttaccctcaatcttcccacttttccccagaggcaaccgctggtaccacttccttgtgtattcttcctgagatatatatggaatgtataaggatatatattcaatcaatgctatggagaaaaaaaaacagccctctgggggtccgcgagtgctggagacggtcgcgcacggctctcaggagctgcaatctgagagctgccctactctgggcccagaaacgaccctcgtgcacctgcagtcctccagggaaatctgaagaaagttccacagcttggatccccagcactttgggaggccgaggcgggaggatcgcttgagcccaggagtcggagaccatgctgtgcaacatagtgaaaccccctctctacaaaaaatacaaaagttagctgggcaaaatggtgccctgtggtcccagctactcgggaggccggagtgggaggttcgctggagccgaaggggtcgaggctgcaatgagccgtgatcgcaccactgcactccagcctggacgacacaacgagaccctgtctcaaataaaaggaaggaaggaaggaagttacacagaaaggccgcgtcggctctccttcccacgccctcctgcagcgcctgcgcaccagggcccgcttcacgcaggcctgcgaagctggagcccctggatagcctttcttgccgacagaggcgggagaaatttgctacttcctgtataccttatccttctcccttcccagtctaagatacgaactataaatgttcgaacccaattcaccccggaggggaggggccagataccagtggcctgaaggcgcccaggtatccagaagaattgtgggtggggacccgcggtcccgtgacgtgcgtccgccaatcagcgcgcagaccgcactttgcggctcggcttcaaactaccgtgaggccggagcgccactgggaccccgcccccttcgcctgggtctggggccccgcgagacggcggaaaggggtgggggcgcccggggggggggggggggcccccggaagggggcggggtccgggatcaattaagggcccgcctcacctattccgggcgcgggctgagtcccgtagccaatgggcgggggtggggggcggcccggccggcggggagggggagcccgcggccggggacgcggggggaggaggaggcgggctcccaatccggttccatccggttctcccaccgcccccgctgtgggtctcagcagctcgggcggcgggaggagtggcagcggcaaggcagcccagtttcgcgaaggctgtcggcgcgccgcggcccgcaggcacccggcacgcgccttccccgcaggcacccgg

SEQ ID NO: 27451 - DNA, 2300 bp, Homo sapien
tgtacgttacatgaatacaatcacacagtatacacacttttggatctggtatctttctctcaacattatgctagtaaaattaacccacattgttgtatgtagttgcatatgggttattttcattgctgacggtcttccatttattcatctattcttctgttgactggcgtttaggttgctctctgtttgggcttataacaaatttttcggctacaaatattctatttcatgtcttctggtgaaaatatataagcatttttgttgtgtacctttctaggagtggaatgactgagtcctgaaagtgtctgtttaggtttaaaacatactgccaattggacatggtggcacatgcctgtagttccaaccacttgggaacctgaggcaggaggattgcttgaatccagttctgggctatagtgtgttatgctgatcaggtcgttagcatcattatggtgactttccacggagcaaaagacccacaggtttgcctatgaaggggtcaggtcagaaacggagcaggtcaaaacccccatgctgatgagtagtggaatctactgccaaatagtttttcatttgagttctggctgctccatttgtttgtgttggcaacttaaaaaaaactaggccaaataaaacatctgtggaccatcagttgtcacctctggcctagcgcatcttcggttcttatgggagaaagttctttatgaggtaagtccaaaagcatagagttcgcttgcttaagaccttgcagtatccctcaatctttggataatgatcgaacttcatgacgggctgctcttctttttttctgcctcttttccctgatctttacgtccatttttcgtatctccatccctgccactttaaaggtcttggtgggctgccacactctagcaagtcagcatgccttgaaatatgctgaccccccctgccgatggcttcccctttctttactaggccaattgggtactttctctccccactaaattactagacccagtgcttgggatacaaacctggattctctctaccccagggacttcacggtgcctgccacagggcaggtgctcagtacatgcttgtgccacaaacttgggtactctctgatgttgaatttttttaaggtaatccatgcagataggaaagtgaaaaaaaattacacacgagaaaagggaaattttaccctcaatcttcccacttttccccagaggcaaccgctggtaccacttccttgtgtattcttcctgagatatatatggaatgtataaggatatatattcaatcaatgctatggagaaaaaaaaacagccctctgggggtccgcgagtgctggagacggtcgcgcacggctctcaggagctgcaatctgagagctgccctactctgggcccagaaacgaccctcgtgcacctgcagtcctccagggaaatctgaagaaagttccacagcttggatccccagcactttgggaggccgaggcgggaggatcgcttgagcccaggagtcggagaccatgctgtgcaacatagtgaaaccccctctctacaaaaaatacaaaagttagctgggcaaaatggtgccctgtggtcccagctactcgggaggccggagtgggaggttcgctggagccgaaggggtcgaggctgcaatgagccgtgatcgcaccactgcactccagcctggacgacacaacgagaccctgtctcaaataaaaggaaggaaggaaggaagttacacagaaaggccgcgtcggctctccttcccacgccctcctgcagcgcctgcgcaccagggcccgcttcacgcaggcctgcgaagctggagcccctggatagcctttcttgccgacagaggcgggagaaatttgctacttcctgtataccttatccttctcccttcccagtctaagatacgaactataaatgttcgaacccaattcaccccggaggggaggggccagataccagtggcctgaaggcgcccaggtatccagaagaattgtgggtggggacccgcggtcccgtgacgtgcgtccgccaatcagcgcgcagaccgcactttgcggctcggcttcaaactaccgtgaggccggagcgccactgggaccccgcccccttcgcctgggtctggggccccgcgagacggcggaaaggggtgggggcgcccggggggggggggggggcccccggaagggggcggggtccgggatcaattaagggcccgcctcacctattccgggcgcgggctgagtcccgtagccaatgggcgggggtggggggcggcccggccggcggggaggg

SEQ ID NO: 27452 - DNA, 2300 bp, Homo sapien
caaaatactgggattacaggcatgagccaccatgcttggcctgtcatcacttttcaagaggcagtttctccttctaaatccatctcaatctccagtgagagaggagccaggagcctggctgccgtgctgcgtggtccatccaggtggaagggaaggctatggaggagagccagactcctgctctttgttttggtcagttcagaagtcacttaaccaataagtcctttcagggaaggaattcactctaccactacagaatagttttgcttcacatgttttcttgacacagaaatttgtagaaccacagcctctttcttttcttttctttttctttttctctttctttctctctttctttcctttcctttccctttctttctttctttctttctttctttctttctttctttctttctttctttctttctttctttctttctgtctctctctctctctttctttctttctttctttctttttctctttctctttctctctttctttctttcttgacagagtttcactcttgtcacccaggctggagtgcaatggtgcgatctcaactcactgcaacctccgcctcccaggttcaagcgattctccttcttctgcctcctgagtagctgggactacaggtgcccgccaccacacccagctaatttttgtatttttaatagagacagggttttgccatgttggtcaggctggtctcgaactcctgaccttaggtggtccacctgcctcggcttcccagagtgctgggattacaggcttgagccactgtgcccagccgcataattattttaactggttcataataatgagccagagttgtgctctgtcgcccaggctggagtccagtggtgtgatcacagctcactgcagcctcgacctcccaggctcaggcgatcctctcatctcagcctccctagtagctgaggccacaggcacgtgccacagtgcccggctaatttttatattttattgtagagatggggatctcactatgttacccagactggtttcaaactcctgggcctgtgatccaccttgcttggatctcccaaagtgctgggattacaggcgtgagccagtgtacccgcaatcttgcatcattttgattaggaattagtcctcagaaaccagtcatggcagcatggcagaagagacagttgaacatgtcttgctttatccactaggcatacttttttttttttttgagacggagtctcgctctgtcgccagagctggagtgcagtggcgcgatcttggctaactgcaacctccgtcttccgggttcaagcgattctcctgcctcagcctccggagtagctgggactacaggcgcgcgccaccacgcccggctaatttttgtatcgtagagacggggtttcaccatgttggccaggctggtttcaatctcttgacctcatgacctgcccgcctcggcctctcaaagtgctgggattacaggcgtgagccacctcgccctgctcactttgcatacatttgagttgggattctttcgctgcaaaacctgatcttcacctagattcaggttaatttattaactattactaatgattgtgaacagtgcattctattaaacttatttttcaggtatgcagttgtgtaaattggttagacttactacagtgtttagatctggaacgaaaacgtaaggcattttccatgtaactgcttggaacacgacagttacctgctactataaaaacggtagttttctatttatggaagagtttttcttaaacttatctagaattaaaagttaatttaaagaaagtactaattatgacaaaagcagggagtcgttagcacttgaaaccagagtttggtactatgagaaggtttttaattttaaaaagaaggaaaaaaagaaacacggacgtcagaaaactggttcagtagggatgggtgctagaaggctacggaaccgccgaaggcccaggagaaacccggaacgtgttaaccgctccaactggagccggacgaaaaaacggccccgcctcccgcgagggcgacgcagttcgcaggcgcgtcggcgcgcctgttctggggcgcttggcttcaccgcgcaggcgcggtcgccgctgttgttgtggtccccatggagctgccgtagcggacccagcacagccaggagcgtccgggatgagctcagccgcggccgaccactgggcgtggttgctggtgctcagcttcgtgtttggatgcaatgttcttaggatcctcctcccgtccttctcatccttcgtaagtggctgcctggcctcccaagg

SEQ ID NO: 27453 - DNA, 2300 bp, Homo sapien
taggtaatgggacaactcagcatccacagaggcttatgacttgcacatccacgtggagagggcggtaacaccttccaatccaccacctttctcacagctaagtctagaaagcctcattaggggacattttaatctggtagaattgttttaagagtgaagttatttatagtcttgtttattcttatgtggctctacaggatttccattggaattttttttcttttttggctgttacatcaatttttattaaactaagagactaagatggctaggcttctactttatcaaacatgggacaattgaagttcactttagtcttctgtgagaggcttgcattttttaaagaaaaaaggacaaagtcaggagagggacaattgcaaacgtcgtttttcaggaattctcattggtctacagaaataacagtgactggcgattagattgttgtttgaaccacagggtatgagctgtggtgtccagcatatggcattgttaggttaatttatagctattggtggtgtcagtcagagcccacggagcaagcagcttagaaatgattacttagctcagctggggggatggggggacgtgactgctgtctcattccagtgcctctttgggcctggtcatttaaagggggttgcattcctcagataagcttcttttctttctcaaccctatgggattggtggtgtcactcacattttacagatggacaagagcacttaagtgacaggcagacccaagttcaaacccaagccggtctgccttcaaattgtccatcaccttctactccatcccactccctcccactactgtagctggacaatttgtgaatgtaacatgaaaaacactcttgaattaagcctttatccaaaattgcctgcataagaagacttgttgaaggagtgttctaaagtgaggaagaaggaggggctttagcagaagtcagccgaactctagcttgagtcagaaacaactggccaaaaaaacaaattcttcttgcggattagcaaccattgtttgagccatttggatttaccaagataggtgaggaggaaattagggactgaggtcatgagcaagagggcagggaggaacagctcctggggacaaggacaggcaaggctatgagggctacacgggagcatttgtagtctttcagggtcccttacaccaacatctgggattcttctttttgtttttgtttgtttgtttgtttgtttgtttgtttttgagacagagttggccctgtcacccaggctggaatgcagtgccgcgatcacagctcactgcaacctctgcctcctggactcaagcaatcccacttcagcctcccaagtcgctgggactacaagtgtgcaccaccacaccccactaatttttgtatttgttttgtagagacggtttcgccatgttgcccaggctggtcctaaacttctgagctcaagctatccacccacctcagcctcccaaagtgctggtatttcagatgtgagccacaatgcccagcctggattcttcttaatctagatgcaaaggttcacaaataaggatctgcttctgcccaccgctacacagcagaatgtgtctggaaagagaaattctttgccttaggattgtgtaatgctcccaccaatgtggtgttgcagtcatggtgcttaatgaaaaaagcactgcccctggagctaagaaacagggacagtctctgaactttaaacctgtctgaacctattccctctaggtggctgagatgaggtgatgtgaaataagtttgtacaaagtaagagcactagttagatattaagtgtaatgctaatattaattattactaagatcatttgatttcttgtagtgaggagattgtggactgcctaatatatttcatcagaagagaaggctggagaattaagcagatgcagcaaaaagcagaaactgacttcaaaaaaaaccctctcagtagagaaagtgatattagattcctattgcaaaggatctaatgccagttaaattctcttttgctttcttgataaaacaggagaattgagaattaaatgaaaaggtaaatccttttaaagacctcagaagatggatctgtttgtttcaatctgcttttgaggtaagctgctataaaagagatacttgtggtggtattgtccttagtgcagtagcataataaagaaatgcagaaccatctgctttgtaactaatgttaattttattaagggtataaatttggggtctttcttgtatttcactttctattccttccattttaaattatcactttagacaactaagag

SEQ ID NO: 27454 - DNA, 2300 bp, Homo sapien
ataacctccctttgtcaatgtttagagtgactcgcaaaatttctgaagcaaaaaattgggacacataaaagtagataaagtgtttgaaataatgttcttgaaaaccgtaagatattgattatcttagctatataataccacatttataagcttagagaagagcttttctgttcatttaacatttttgtcaaagagtttagagtttaagcctttcattcaataggaagaccctgaacttgggtctggctgatgtttttttctaaccagacaggctgtgcttgtggcagaaagaccacagaagtggtgctgtgatcttctcaagtgcccatggacactagtgaatgtcacctgtcccaccctggtgacatgaaccttgattacctgttcaagcacaaatctgccagttttctccacagccacctgttttccctttgcatttgattagtgctttgggaagagatactctgacgtggtaaatcccattttgttttgtttttttttgagacagggtctcactcttgtccgggctggagtgcagtgttggcatgatcaaattcactgcagcctcagcctcccaagtagctgggaccataggtgtgtaccaccacacccagctaatttgttttgttttgttttttatagagatggcatctccctgtgttgctcaggctgatgtatcctccttattggtattgatgttcaaattgccctatctttgactagtgggagcttcttaaagctggctcctgtgcccttttgatacacaccagcctttcttctctttgcctgcctcaggcttaggatcatccatttctccaaggaaccccaattcattatagcagagaatggtatttagtggagaatggtacacagtgtactcattgtttctggggtgtcgttgattctaggccctctcagcagagttaggggaaaaatacacgcacacatatacatacatatgtatatacacatacacatacatttatagatatatatgcacatagatctgtaactgtatataactccttgtgtgtgtatgtgtgtgtatttgaacctagcatttctcattctaatccaacatttcagggttctttccagccttccctctttcagacagtaagaaatttgaccccatgattctaaatatatttacttatgtcctcagttaatttgttagctctaattaatttcctaactttgccagctacctgacgcctctttgtcactcctcccccttacaactacttcactctgctttctcagccttcagccatgcttctgccactgcctctgcaggaaagccacctgctttaaaaaaaagtcttcatggagtgcttatgagagggtcggctgttttctccagctcatttttccaaagcaaacaatcccaccagctatctcaggttggtcatcttgttcctagatatagtccaaggcaaggtaaagcaagctggtttctggaacaattaagatatttccccaaaacgtttgaactcaccatcttctctgacttcttgaaatttataacagtgcaattcatttgcatttaatagcctgcttttagtctcattttaatttgtgatgtttttcaaggtacctgtattagttctgtattgctgctataacaaattaccacaaactcagtggcttcaaacaaatttattttcttacagctctggaggtcagaagtctgaaatgagtcttaaggggctaaagttaggatgtcagcaggactgattccttctagaggatccaagggaggatcattcccttcccttttctaacttctagaaaagcctgtattctgtggcatgtgaccccttcttccatcttgaaagccagcagcgtcgtgtcttctccctctgactctgcttctgtgatcacagagccttctcactctgacccctcctgtgtccttcttagacaggcccatgtgattacattaggtccacatggataatctgggataactcaagataatcttcccacctcaagacctgaaactgatcacatctgcaaagtcccttttgctatatatagtaacacaggttctagggattaggacatggacatccttaggggaccattattcagcctaccactgtaccaaatgaaagtcttaaatcttaaaaatgagaatttaactctattttacatgtagacattgattggaaaatgaacgtatcttagagaactttacatatctacacatacacagatatgctttattttttataatatgcattatcagtattcatcacagttataataacaataatatgttttatctgattctttaa

SEQ ID NO: 27455 - DNA, 2300 bp, Homo sapien
cgcctttaatcccagcactttggaaggccgaggcaggcagattacctgaggtcaggagtttgagaccagcctggccaacatggtgaaaccccatctctactaaaaatacaaaaattagctgggcatggtggcgtacacctgtaatcccagctactcaggccgaggcaggagaattgcttgagcccagagatggaggttgcagtgagccgagatcttgccactgcactccagcctggccgacagagtaaggctctgtcttaaaaaaaaaaaaaacaacaaaaaaagagagattggctaggggccttagctccttgagggcagggacctgtcacattgatcgcggtatcagcacccaggtacttactattcaaaatgatcagcatacggatgatcatttgtctgcatctcagtttgcctcttttggtgcttctctaaaaaataaaaaaggaagagcttaaactcctacatgattcctgtctttgcgctgggaagaaggctctgggttcttttgttcttcaggacagtcccttgtaaagctcttgccatagttctgttccaggggcactgtcatatttatacctaacaaagctaaggggtgtctttacatttttagcttgttagcaggatgcttatatggccttgctgacccggtttaaaagttgcaatttgcaaaatacatactgaaaatactgcacttttacctatggaagttgtaatttatataaggaaattgtaatttatataatcctttaaaaaacttactcatacgaaataacagagaacggggaaataccattaagactgtcatgctcaagtgggggaggggcagactcagggaaaccaattaggaagcaagtaaaataatccacgcaccagatgatgggggcctggaccaaggtggtgacagtggcggttgagagaaatggtagaattgtgaatctattctgggtgcattttgaaggcagtgctgacagactgaaggtgaggaagagaaaaacaggactcaaacaggatgcaagactcgggcaactggaggatggaatttccagcaactatgatggattaagattgtgggaggacaggcttggcttggggaattattgagcgctatcttggacgagctgtgtttgagatgccgtagacatccaagtagggatgtggcaggcagctaaatgcagggatctggtgttcaggggaggggcgagggctgggaatgcacacttggggctcactggaattcagataggctctgagtacaggcgactggatgagttcatctagggattgagtgtagacagaaaaaaggctcaagctcacattcagccgtgaaaactggtctctgaaaaaagttaaccgttggcttaagtgtggcaacgaaacgttaacacgctgaggggagggtgtggataaagagccccgaggctgggtgagtgggggacaaacacagacagagaagacatttcaaaagatttagattcctacgagatagggagatgccagcgctaaggttagaaagaaaaactaatccaaagcaaaacagcaagtaagcagaggcaaaatcggaggtcagatagaagattcagatagaaaaaccccaaagttccctcggtggggcggcggtgagatcggcctccgccccctcgccagacccaggcgcggccccgggagcgctaggtcacctcggcccaggccgtccccctgcccagcgggcctgagagtacgtgtgtcgccggggcgcccggtcactgccgagccggggtagctgttccttggcaaactgtgccgcgaggaggaaacggcggggcgccagcgaggcaggcaggggcgaggactgagtgaccggcgatactggaagcccagaaagagcgtagcaggagggtccggaagggcccagagctggggctgtaacagggtaaccggctgagggggacgacggcagcagcggggccgttacctgctccgcgctgttcccacgactgcgccaacgccgcagcgccggcgcgtccccatggaaacccgcgcgcggggcctcctgggaagcgccggcctgcgggggctgggcgcgcgcatgcgcactcgggcagcaggagccgcggcggggaggggcgtcttgggcctggaggtcagtgtggcctcgcgtttgtcttcggtgacgggaagtgagtttcttgtgtagacgtctgtaaacgatcctcctgccgtccctgttcggcgcccgggaccctgccttcccgcgtggccgcaccgagacgagggagcctgtcacgcgctctggcgctctcctgacctcttaaggctct

SEQ ID NO: 27456 - DNA, 2300 bp, Homo sapien
taaaaaacatctataactccatcatctaggtgattttgacttttgctttggacttgcctgtacatttctaaattctctatgccaaacatgcattgttttgtcatcagattttgttttacaaaaaaaaaaaaaaaatcgtctttatgacaaggggttaataggggaactgtgcttcccaggaattgaccaggcgtctacacccacctactgactcaagttacctaagactgacagagccttaagaggtcaggagagcgccagagcgcgtgacaggctccctcgtctcggtgcggccacgcgggaaggcagggtcccgggcgccgaacagggacggcaggaggatcgtttacagacgtctacacaagaaactcacttcccgtcaccgaagacaaacgcgaggccacactgacctccaggcccaagacgcccctccccgccgcggctcctgctgcccgagtgcgcatgcgcgcgcccagcccccgcaggccggcgcttcccaggaggccccgcgcgcgggtttccatggggacgcgccggcgctgcggcgttggcgcagtcgtgggaacagcgcggagcaggtaacggccccgctgctgccgtcgtccccctcagccggttaccctgttacagccccagctctgggcccttccggaccctcctgctacgctctttctgggcttccagtatcgccggtcactcagtcctcgcccctgcctgcctcgctggcgccccgccgtttcctcctcgcggcacagtttgccaaggaacagctaccccggctcggcagtgaccgggcgccccggcgacacacgtactctcaggcccgctgggcagggggacggcctgggccgaggtgacctagcgctcccggggccgcgcctgggtctggcgagggggcggaggccgatctcaccgccgccccaccgagggaactttggggtttttctatctgaatcttctatctgacctccgattttgcctctgcttacttgctgttttgctttggattagtttttctttctaaccttagcgctggcatctccctatctcgtaggaatctaaatcttttgaaatgtcttctctgtctgtgtttgtcccccactcacccagcctcggggctctttatccacaccctcccctcagcgtgttaacgtttcgttgccacacttaagccaacggttaacttttttcagagaccagttttcacggctgaatgtgagcttgagccttttttctgtctacactcaatccctagatgaactcatccagtcgcctgtactcagagcctatctgaattccagtgagccccaagtgtgcattcccagccctcgcccctcccctgaacaccagatccctgcatttagctgcctgccacatccctacttggatgtctacggcatctcaaacacagctcgtccaagatagcgctcaataattccccaagccaagcctgtcctcccacaatcttaatccatcatagttgctggaaattccatcctccagttgcccgagtcttgcatcctgtttgagtcctgtttttctcttcctcaccttcagtctgtcagcactgccttcaaaatgcacccagaatagattcacaattctaccatttctctcaaccgccactgtcaccaccttggtccaggcccccatcatctggtgcgtggattattttacttgcttcctaattggtttccctgagtctgcccctcccccacttgagcatgacagtcttaatggtatttccccgttctctgttatttcgtatgagtaagttttttaaaggattatataaattacaatttccttatataaattacaacttccataggtaaaagtgcagtattttcagtatgtattttgcaaattgcaacttttaaaccgggtcagcaaggccatataagcatcctgctaacaagctaaaaatgtaaagacaccccttagctttgttaggtataaatatgacagtgcccctggaacagaactatggcaagagctttacaagggactgtcctgaagaacaaaagaacccagagccttcttcccagcgcaaagacaggaatcatgtaggagtttaagctcttccttttttattttttagagaagcaccaaaagaggcaaactgagatgcagacaaatgatcatccgtatgctgatcattttgaatagtaagtacctgggtgctgataccgcgatcaatgtgacaggtccctgccctcaaggagctaaggcccctagccaatctctctttttttgttgttttttttttttttaagacagagccttactctgtcggccag

SEQ ID NO: 27457 - DNA, 2300 bp, Homo sapien
tctaagcccctaagttcgtggtagtctgttatgacatccctaggaacctaggaacctaatatagagaaataaaggctatgctttttatgtggcatgatggagatggccccagaatagtgaaaggccatggctcttctccttccattgtgtacacagaaaagaacaccccttcgaaagcaaaagcaaaggccaggcacggtggcttatgcctgaaatcccaacattttgggaggccgaggcgggcagatcacttgaggtcaggagttcaaggccagcctagccaacatcgcaaaaccccatctctactaaaaatacaaaaagaattagccgggtgttgtgactcacacctgtaatcccagctactcaggaggctgatgcaggagaatcacctgaacccaggaagcggaggttgtggtgagctgggatggcgccactgcattccagcctgagcgatagagtgatacgtctcaaaaaaaaaaaaaaaaaaaagcaaaagcgaaagcaaagaaagattcaagggcagatttgcagtgacttatcatgtctacagactgggaaaagctggtagaaaagaggaggaaaccattctcaggaaactctacctttcaattcctccagtcatgagctccagggttggatgctcccgcaatggcaaaactccgctctcgttactgtcatggggccaccaccacccaccaagcatcagcccatctttccataatgtcaagtctagagtgacatttgtctaatgtttgcctacctggagatgttgccccgcccaccaccaccagcaaaaacaaccggcacccatcttatacggataattccctacctaaggagttctagaaatgcatggcccaccaaaactcagggtgggtcatgcatttctagaggaagaaatggtgatatggagagaaagcttgtcctaacccacttctaccaaagtaggattaaagtcaatttgaaaaaaaacacccgtttctccttttatataaaaaccaaatgcagaaactatagagaaatgtaataagcttgactctacacaaataccaaaatacactgtaaacaaaattaaaggtaactgacaaattgaggaaatatttgcaacgtatatcacaagccaagttttcaagcatcaaaagtccttacaaaacccatttttacaaagatgaatgtcaagttttaaaatggacaaaagacaggaaaatgcaaatcacacaataaggacaaatggcactcaagatatgggaaaaagtctattcttcctactaaaaaggaagtgaatacaattaaagatgccaatttttgacaataaaatgggcaaaaaaattttaagaaaaaagagaatttccaatgcgggccaagtatcgggacacttactggaaggcagtttccctctacctttagaaagcctcaaagtgagcatatgctttggccctgcaacctcgcttgtaggaatttatcctaaggaaacagtcaggggtgacctcaaagattcatctgcaaggatattcaacatggctttgatgcaggaaaaaaagtaaataaataaaaggaaacaatgtaagtcttcctaaattatgccaaattcctatgctgtcattaaaaaacatctataactccatcatctaggtgattttgacttttgctttggacttgcctgtacatttctaaattctctatgccaaacatgcattgttttgtcatcagattttgttttacaaaaaaaaaaaaaaaatcgtctttatgacaaggggttaataggggaactgtgcttcccaggaattgaccaggcgtctacacccacctactgactcaagttacctaagactgacagagccttaagaggtcaggagagcgccagagcgcgtgacaggctccctcgtctcggtgcggccacgcgggaaggcagggtcccgggcgccgaacagggacggcaggaggatcgtttacagacgtctacacaagaaactcacttcccgtcaccgaagacaaacgcgaggccacactgacctccaggcccaagacgcccctccccgccgcggctcctgctgcccgagtgcgcatgcgcgcgcccagcccccgcaggccggcgcttcccaggaggccccgcgcgcgggtttccatggggacgcgccggcgctgcggcgttggcgcagtcgtgggaacagcgcggagcaggtaacggccccgctgctgccgtcgtccccctcagccggttaccctgttacagccccagctctgggcccttccggaccctcctgctacgctctttctgggcttccagtatcgccggtcac

SEQ ID NO: 27458 - DNA, 2300 bp, Homo sapien
catttcctattcccatcatctctagttctgtgtcctcatggtgagtgggcataataatggaacacagttttagggttcttatacaggttaagggagtggcttatgcaaagcacctagagcagatctggcacatggacaacacctacaaattgttagctgttatttgagtaggaaattaatttctccccagggtttgcagatggaggaggtgtcattattgagggcagttttcacctgatataatcaagagatgcgtattctctagagcacctgagaatccagctatagtttatgctactaacttacaaagtcattagaaaatatgcccccactttcttcaagtaatatttggagaaatatggcatgcttatgtggcagactttaaggtgtgaaaatatataattgtatgaaaaaataatacgtactgtagaaattttgaaaatgcagaaaagaaaaactgatctgtaatccttggtgtgctttaaaataaaatttataattctactgacttaaatttggggaaccattaatcatcttcatcaaggaccttatttttggagcagctaactttgcatgttgaagccaaaagttaaatgttggtagtcacctcaatcattcattgtgatgtaggggcatttaagcgatattccaggaactgggatattccggggactgggatgtcttttctcgttgcaggcacctacctgagggggtgggaaacatgcctctggggctctgggactcaggtgaagagggagtacagaagcctgggagattcctctctgcttcggaacgtcggtgccacccaatccatgatgggcagcaggggattttaaaaagggagccggagaacagagagagagagagacagtaagagactcagttatctaagctaaatatcccccaagtgcttcttgaaaaactagccctttgtccctaatgcccttgatcttgattttgaaatctatcagaagaatttgcataactggcatttgggcttctttgctagattttgtattcctttaatttaatttgtttgtttgtttgatttggttttgttttagagataaggtcttgttctgtcacccaggctggagtgccgtgggtgtgatcatagctcactgcagcctcaaactcctggctaaagggctcaagggatccttccacctcagccttccaagtcgctggaaatacagatacaggcgcctgccaacatgcctggctgtttttttttgtgttattgttgttggtaaagtcgtacctcagtatgttacccagactggtcttgaacttctgggctcacacaatcctcctgccttgacctcccaaggtgttgggattacaggtgtgagacactgccccggaccttctctaacttttaacacaattcaaaatacctatataaatattaacatgtataaacacaaatatatataaataaacacaaaatacctatgtaaacaaagagcctgttataaacagattattttggttttttccccaagcactttaaaatagttaataaacttcaagtcagtgacaagtaaataaaatagtgagacaattggcttgttgcagccatgagtattgagaagccagcggctatttccctacctccctggatgtcagtgaaactttagatggcccatggctggtcagtttctgttctttaggagaaacaggtgggaaagagagcacactggaaacagccactcttaaaggcatttctattgtatgacagtttacttaaaaaattttttttaacctgccaggaaaaaaaacaaagttgctctttacttaaaggcctctgtggctattctgacccttccagtttatttgtttgccaaaagccctttaaacccagcctcctcctagactgaggtggtgttttctgggcttttccagctcccaagagctcctccctcacttctttcgcctcctgctgctctgttaccggggccccacctcccttggccccaaggcatctctgcacaggtctccgattggtgcacagcacagcctggccttttagggactgttgtcgcgcgtttaaagtgatagggaaagggtccagtggctgcttttatcgaccaatcaaatattttcctgacagatcccaaaatattcctgggccaatggagggaggagcccaagatgcctctgctgctccttggagagacagagcctcttaagttggagcgggactgccggagcccagtggacccctgggctgctgccagccccgacctggcacttgcttgcctgtgtcactgtcaggatttgtctagcggcgcattccc

SEQ ID NO: 27459 - DNA, 2300 bp, Homo sapien
atagctcattaagtcatacagtcggtattattaatatcatccccattttaccacgaggaaatgaacacttggaaacactatgtggaccacctaagtactcacagttagcaaagggctgacatttgaccctagagtttcccaacttaaagccagtgctcttaactccttgatgtctacttatctgtaagtgaatcatgcagaagaaagcacatagttttctccctgggcataggttagctgtcctcaggccttgtgggttttgcaaaattccaaggtcaatattaagtgctctggtatcatttcatatatatgtggattgagttggccttacttctaaaattacaggcaatgttctggttcccactctgagctggtcatccttactgccagcattgtactcagcactgcaggtgcagggggccaggctctgcatattcttggaagccactcctcatgaagctgcttaagtgatgccactagcccccaagacctttgcttgccctgagggcccaagatgtgcttcatctagagtaattctgatttctggaaaagaattgagaccagcctgggcaaaagggtgaaagtttgtctctaccaaaaaaaaaaaaaaaaaaaaaaaaaaaaaaatatatatatatatatatatataaaatatatatatatatataaaatatatatatatatatattttatatatatatatatatataaaagttagccaggcatgctggcacacacctgaggttttatgtccataaaacataaattctggcttttaattggacactataatttttacctcattatatcagtaaaacctccttgaaaaggatttttctttctttttcttttttttttttttttgagacagagtcttgctctgtcgcccaggctggagtgcagtggcgcgatcttggctcactgcgagctccgcctcccggattcgcaccattctcctgcctcagcctccccagtagctgggactacaggcgctcgccaccacgcccagctaatttttttttttttttgtatttttagtagagacggggtttcaccgtgttagccaagatggtcttgatctcctgacctcgtgatctgacctcctcagcctcccaaagtactgggattacaggcgtgagccactgcgcctggcttctttctttttcttttctttttgagacaggatctcactctgttgcccaggttggagtacagtggtgcaatcacggcacactgcagcctcgactttctgggctcaagtgatcctcccaccccagcctcctgagcagctggaacctcaggtgtgtgtccatatgcctggataacttttatatatattttttgtagagacacagttttacccttttgcccaggctggtctcaaactcctgagctcaaatgatcctccgaccttagactcccaaattgttgggattacaggcgtgagccactacacctggccggattttaatttttcttattgaagtaacttgtcatagaatttcctggtgggaagtcccatcaagacatgaaatagacataatgtaaagacatttattgaaaagcaaaaattccatttcccaaagccatgctctatgcatgatggttgggaggcttttaaatagtgggactgagatgaattattctccgatttctgactgtcacaatggttttaatccaagaataaaaccaacacaaacagcgtggctctaaaccaagaaacaagtccattttaaagcaacatctgtaagcttggaaagcacctgttttctctggtgagctgttaaaaatccaaatagttgagcaattacagatggctttccaaagacctgttttcctatttttttctcttccaaaatgattttttaaatatttaacattaacaagtaacagtattggctcatatattagcatgcggctcaactttaagttttattttctcccgaagcttttgtggtgaggtgaagaggcaaactgtggagggttagcctggtaaccatggcaacagcattgccatccatgaagtggctctgagagcccaaggccctcaggctgggaggctaattcctacaacaaagccttttctgtgttcaactgggtacaggaaagccgctggttgtgatggtggctatgacaaaccttcagcctgaagacccgggagggaaaaatgtgagtcttacccttcacacattaattattttatgaatagatgaatgcaatgtgctagcaaacctgatgaatgtaattcaggcctgctctcctaaaccataccgttgcttcattcgacatgctcctgcaga

SEQ ID NO: 27460 - DNA, 2300 bp, Homo sapien
cttgctgctgactgggtgctgcacggcccctcccaccagccgtgctgacagtccaccgtttgtgacacagaactctggcattatttatttctgtcctgcccactcttcccttctgcaggtccctaggaaactcctgttcagccactgttctctctcttccccactcccagttagtggcttcatcctcaggcatgtctgtccctccttctgcaggagcacacagcacgctgcactgtggggaccgctgtcctttggtctgcatgctgctcatcgcatctgggggagaggacccgatatcgtttgtttttacgtccgcgaacttcacatggtgttaccatgtaagtgttaagtcgcacaagagtgggtgctgaagccgtcctggcctgcttgctcctcctctaggagctgaccttctgcatcatgctggctgaggagggagaaaagaggaagaagcagcagctctttttttttttctctaggtgctctctcccatcgctgaatacaaccagcatcagccattcgggttaaaatacagaagagctatgttgaaactagagtgatatttgcagaaggagtagcacattaggctgtgtgctgagacacaagacaggtctgtcccatgaacaggcagtatctatggctgcagcactgccagggacagcagcctccagccacaataaagctccaggagccagggtgggggtagtttggggtggggagggttgctccgtatttggagggtggcatttttgtttactttgccacttactttaatccctggtcacaatgaaaggactttaggaaacgatcctctgaactattatttcttgcttatccactaaattacaattaaaatttcaacaatacaacctcattgggagcctcgtgcaaacaagtcaggatccctcatattacccaagttctacctacagaactataaacaggacacgttcatgtattcctattgatggttgacaataattccactgtcagccatcaaagaactcccttgtgtaagaaagcgcagtgccatgcagttagtgaataaatttctggaataaattgaaccactagagttaaatcagtaaatttagaaaacctaggaaacccaataaatgggaaggtagaactttgcagtggacacagggatctgtcacagacacagaaggtaaggtaattcatccaggcctcgaaatagcaacagcaatgaacattttccacatcaaagattttaatcttaaaaaagggatcattaaaaaagacacatcattaatcttattttacagcattagaaaatggcttaacgcctagatcttccaatctctaaatgaagcactataaattttatgacgtctatttttttagtgataataatacctgtcctgagatgttcagcttcccactggttaaaaaaaaaaaaggaaatgaaagaaaaagttgctattcaataatttactcagccaattcttccttgtagagttctacaggacaagccatcatttcacagttttcatgcctgacctgcctccagagctcttgaaaactttggaaccaagaatatttttatcagccatcctccagactcactcacgggttacctgaccgcactaaatccaaaatgagggtaaaaatccctgctgcaaattcctcctggctttgccatcttggccagtcattccaccaaaccgattgtgccttgcagataaaagtcgtaaaactgaaaggcaagtggcagatgcaaactgatttcctaattgatcccttggttcaacctgcatctacagggaagttactgtgtctggcacagtgctggacactgggatacaaacaaagggtgcatccaggaggtccttaagaagaagcagtcccagactgtagaagcctcccagaagaagaagggggagaagtgtgtgaatcatgactctgaagagcatgaagaaagatgtcaccgcagctgggggagtctcctcccaggtttcccagcccagctgcctcacctctggccagcaaggtccactgcacacagaggtaaccactggaacaagcagctggaaacctcagcttctttccctgtaggctccaggagcttctaattcatgtctgttgtccacatgctgaggcttctatccatccctcaacccctgctgcacaggaaacccttcctgcctcttctctggcgttgagcccctgactctcccatccagcttccagctcagccccacatatgtctctctgtgtctgtgtttatcactggtgaatcttcagcattggggctaccctatgccagctcaaggcccagc

SEQ ID NO: 27461 - DNA, 2300 bp, Homo sapien
tgataaagcccaggcagcttttcaaagtcactgtaaccaggattcaggatcaggctctaggcctggcagaaaaccaagcagaaatctgatcagacgcccagttaaatggacaagcatgcatggggggcatcccctgggatgccagtactgggctcagttccatgcccaggaaggacaagatggagaccctgaaactcttcttggacccgtctgaactggcctgaatctgtagctgtccagggacagaggagggagggctacaccttcgtgtcctctgctgcatggatgaaggttaccatccgtgtggagaagtttggccatggtgaggtatgcagaatctcataaaaccaactattaaaggtggcccttgtttattcaaagtacctacttagaaatcctacaaaagaagggatgcccttgtctggaagaacctttgcaaagacaaccttgtccttgtcaatcttctgaggtgacagcatagtgaaacatctctttccgatttgcatctccaggaggtaacgtccatgggcctcacactgagctccttcctgaacacgtcagatttttattattattaaatttacctaacaaagaaactacttaagacgaactgactttaaaagagaaggaaaaaatgaaaggagataggaaacaagacttaatacacatgcaatcattccttaaaagatataaaattctccctttgaaaccaaatttgcatattacacgcacctgttttaaagaggaaacaccacaaaaggtacatgtaaagatgggcagaatcagcatgcatttacctagaaatgcccctccgaagacttcctacatctgtaaaatactctcaacagcagccactgcctaccccaagcacccaacgaaacatgacacttccccagatctgtatcttcattaaattctactcctcctccatctccatctctttgaaaaagacaaaaatagtaaatgaggaagatgtggagatgagaagtaatgttaatatttacaataggtggccacatataacaaagacttaagtttgctatgctaacataaaggaccagtgaaaaataattttccaacatctgattactgcagattcagttgctattatttggaagctgtatttatccctcaagagtcagaaacctaaacaaaaaacgaaacaaaaccacgaaggaaaattatggtgcggtgtgtgtgagaacacacgtgcacatgcgcacacatacgcgcgcacacacacacgcactcacacacacacacacggtacagatattgtttttaaaataatgttcattactgagtcttaaggtacctcactgtatttagcaatgacctacagactcccttctggtcctcccaaagtcaaaacccctggtgtcatctcttaatgaaaagctgtctttctcatgatcctgcccatcagccccttccacaacccccacgatgcagaagctgcctgccgcagggtgcttcagagtttgttttgttgttgttgcttaagattaggccattctttttaattgtgcgatgtttccatccagtgctgattccctaagtcttgtgtccgcaccgtgcccacccaggaacacaacttcctcggggcgtggcgtgagtagcgataagactttataaatgagtatgttttcacaccaagtttgatgacatttggtctgtaacaattttctttcccttcatttaaaaggaacgaaggagaaaacagaagagcacgcctgcagtgcgcggccgcgccgcggtcccctgcgcccggcacccacgcccccgcgcgccgcaggacccggccccccgctcccggccagcgctccccgcgccccgcgccccagccccgggccttaccgtgcgcggggcagccccggcaggcccagtcgggctggaagccgccgctggctcagagccgcatcccggcccgcggacgcagggggcgcgcggccggtccccggaggcgctgggtccaggccgaggatggttttgctccccgctccgctccgcatttaggaggtgggaggagcgcgcggcgatgcgcacaggaaatctgataggtgaggaggccggcgggccgcgcagggcggcgcgggctgggggacgcggcgggcggctccgggaggcgacgggacccccaggccggcagccgagtgaagaggcaggaactgtctacaaatgctccggctccgaagccccgagggaaagagcatctttcacggagcaccaggaattgacgacggtggaatttgctcagatcccctgaggccggttctttgagtttctgtctggccctccgg

SEQ ID NO: 27462 - DNA, 2300 bp, Homo sapien
aaagactgaaggcccagctccaggcagtcaggcaggagaactttccttttactcacgagagggtcagcattttgttctgttcaggctgtcaactgagtgacccagaaaagctggcacataacattcaccatcgtgctgcaagagctgcaaaaccctctctgcttctaacactgatgctcagcccacctccagtgggcagggagctgggtgccgggaggacttggggttgccagcccagtgtgggcctggacagttgctgagaatctccctccgccctgtgacttcttaattacttagagggtcaccctggttgctcacttcagctcacttgggagattctctctgcttgaggccaggggtaggtccaggtctgatggggtctgaagcttatacaattggggtggggggcattcctctttaaggaaaagaaaacagcagaggtgagtcgtcctgcagcttagcttcactagtctcgtggaaaatttgcctcctaaaatgtctttcctctgagaaagcccaggcctccaaaggcccagccaggctggcgtcagtctggggtcagctgcggggaggctccaggccatgtgtgacacgggagtttaccccatcccagtttccagtggagaagcatcgttctcgtccacccccgtcatgctcttttccaccttctccaggggaagggatattttcagtctgtacaacgaatccactgaaatgttaaggtgggcacagtggtctggggtcttcgaccttgtttatacgtggtgcctgttactggtcgggtctgtacaggcagtttccactggcgttttttaccaggccagcctagagtagaatgaccgcatgttaaaatatagattcctgggccccagacctgccagaatctctgtgagatggaacctttcaacctgggttttaaacaagcctcccgggtgattctgacactcactggatttgagaaccgtggggttgttcagacagcagggacgttgatgttgttccttctgcgttcctggtgatgctgttctgttctcccaaggcctatgcggtggtgagaatctccaaggatacaagacagtgatctggagcgagtgtcctgaaagcagactctagcactcaggactgccaacaccctccccgggtttccttggtctggaattcccatcccctggttccacctgttacatcacacctccccttcaaggaccagtgcagatgccacgtccttcacggggctcagaatgctcaccagcttcctctccaccgagggccacagcccctggagaccccttgagctgagtgctttgtccttgcatactctttctggcctcatagtggggcttggccattgtcccttcactccagatctctcctttcaggtccaggaagtgcatcttgaacttaactttccagacccccccttcagttttccagtccttagagaggtggacttctgattcctttgtctctgtgccctgtagcctcaggtcaggcttaaggcaaggtctcctcacctggcctggggagagtcccaggacgctgcacgtgcctgtgcgggtaggatgctgatgcccagatttcccgttagagagcctttccctatcctgacggctctagctttgtgtgttacttacttgttccactttaattcaaaatgtacccagcaaccagcttgtgcacagttctctggggtttcaggagggatgtaagacataccccttgcccttcaggcactatggccagaaggggggcagtgacctaggcagagggcgggagccagcagatgggatacactcagaggagcctgcagcaggcagaggcagaggagaagggaggtctacacgttctgcactgtatttatctccttcagttccaaggttctctcctggcatctatattgctcatgagttacagagcaaagcctggtgtgatggttacttttaggtgtcaacttggctggattaataaatacctagagaactggtaaagcattatttctgggtgtgtttgtgaaggtgtttccagaggagattggctgtgagtcagtgggctgagtggggaggagctgccctccatgtgggcaggcaccatccattgactgggcccagatagaacaagaaggcagaagaaatgtgaattcctctttctctgctggagctgggatattcttcttctcctgcccttggacatcagagctgcaggctctctggcctttggacccgaggatttataccaagcaggtttctgggttctcaggcctttggccttggactgatagttacaccattggcatatctggt

SEQ ID NO: 27463 - DNA, 2300 bp, Homo sapien
ggtggtgcacaagtacttctaggaaacacaaacacctaattttgatcttatttattaggattttattttaatgtggatctggaaaaaaaactagcacatcatgctcataattatacggatcttactgcttaggaggaggcctaattaattgtgtgcaattaacagccgttaattgtgttttagagatcaagttaaagaataatccttggtaaatcttggctgcgggtgactgatggaagtttcagaggctggactggaagatgaaactggggcaagatgttacacagcatggcctcaggaacctgagctccagcaacctgcgggtcccaatggaggcgaagtcaaggagcgtctcagagagtggttgatgtgtgaagtctctgtctgcccatctgaataacaagagatggggcttgtgattttcctccacggtatgttgtctggttcctaatcccctctcattactgtcagttttaactgtgtgtgggtctatgtgtgttcacctctcatgggcagggtggcagaactcgctagggtaggaggagagaccacgaagtcagaccttgattcctgtgtggactttgaaagagttttctccatgatttagcctgtggatttcagcattttgaaaaattaaccagaaattcagaaattagatggagacctctagtggaggcctgggagaagaaagattggaagattggagtctacaaaggctgggatagtggcatgtggatgggctgcttggagtgcgcagaagacacgcaggcctctgtctcatgtcggggtccaccagggcctctgggtgccgcatccggtggtgttagctggcctctctcctcagtcaccagtgctcaggcagtggctgtggatggaggagccaagatggcagggcagggtggaggcggtgcatgcccctcaccaaggctgatgtagctgctgcctccactgtgtctgtcctacgcttctagccctgggggaccagcaaacacttgatagcaggttgattacatctggccccttcaattgcagctggaggtgattttcccttactggaattgacacctgctgctaatacagatttgccttttctgcctgttctcctgccagcacccctacctgagggcctccaggaggaatgacatctcaaacagaaacctgcataacatcagcccaaaccaaggacccattttatcatcaaagaggtgtgccatgaatgcatgactgtgggatccactgctttgaccacatatggatgacttggaagctgccagcctacatgaacaatggaaaggccattgatggctcagcaaagttgccagctgagggccaatgctccccagggttggcctcgagggtggccacagtgctgtaacaacagccagtgtggtgctgaacctgcagcctacctatgatgctttgacaccaattgtcaggacacacgggtctggaaaccaaatcttggaagtaggattggttgctttccgtgtaactcctagtgacccactagtagaattttgcttcctatccctgagaacttatattccacaggactagagatcctggttcctgggatgaagcagggcagcttctgctgaggttcacagtaaaggttctgttgaacccaaatatgactatcactgggtccctttgggcccactagtggacgagcaggcaaagaaagaagttactccaccatcaggggacagataattccagctctcaatggggctatggttgctaccaggggactgaaacacagctgagactgaggagattgtcggtggcttcttctggtgcttccaagtctggggataatgatgactgggcagccatcagagcctgataaacacaaggcaaccaagagctcagaccctgagcggtgaaaaggccagccagtgctcaggcaggtcacccagaccatcataagcgctgatagaaatctaggacgtgcggtggaggagggagatgacacgtcccaaccatggtccctggttagctgcaggtggcgtgtccaccacgccttctctttggagtcatttggagatggtggctggccacgatcttgcaggcttagtgacagaacaatctgagaagaacgagggggggagctgctgcagacccatgtggtgctctgcctcatgccctctcagcctaacctctaatttcagcagagatggggtgtgtttctgttccgtggttaagtcgctgcatgctcacagaggcttacttcaagcacgggctgcaaggttttactttcttcatcaggattcctctcatgccacgaatggggaaagttc

SEQ ID NO: 27464 - DNA, 2300 bp, Homo sapien
tttcatttggggttagtgtctgatttagcagtaacattatatctctccatgtcagatcaaaggattgtcctaacccttgtaaaacatcaatatagccatcagggttatctgagaatttacctaggtctattttaatttgctttaagtctgagagagaaaaagttacatgcactctggctgggctgaattctcctcctcccgctgcttggagggggcataatcggggaatattggcactctttggttcattgtttacccctttgtctatctccttttggaccatttgggctgaagagggggttcttattagttggggaaggagtcagggggatgttggggtagggaggtagattctgagggcttcctgtagggcataagtcatactttttgcataactgcgagttgtctcttaatgaaaagaaagtttgtacatatggcacttcactccatttgccttcttttctacaaaagaggtctagctgtaagatggtgttataatttatacttccctcaggaggccagctttcttccccttgaagagaatatcacggccaggcggtactgcagaagaatataagtcatttctttcttagcgtctgagggtcaaattggtcctaattctccagaatacatcttaggggcaattttgccttggggggaacgtttcccatctgaaaaaggaacatagggatgccagcatccctagtcattttctgatgagcattagtcctagagtgtcctctgtggtcctaatgcttattcctttccagggtgcgtaaccacccatggacctctgcttatcggattagttacactcaccgatgtagcagtcctgcacctgttttcccgcctttcttgaccacaaagaaaggggtccgggctgctggattctagtggtcctttaccagcgtgcccaacattgcctttgcgctcaggagtgagtcctagagctgggctgggttcctgagtatttcataacaacccagctgccccatcaagatgcattcccataaacaacagtttttatgcaaattcgtttcagagagggtgtagcgaaccttttgagtcaggattgagatagtcttttgattctgtaagtactttaaggcttggctgagtgcaaacagctcgcacatttgaggagaccaattattaggcaatttttctaactctgcttccacaagagtctccgtatcaattactgaatacccattgtgttttttacctcaatcacctgggaggaaccatctatcatcctgtcctgaaggaagatcctcctaggtctggtcggacctttgtatggtaattaagatgtaaatcccctgttagaaaatctgctgggttaagggaattatcagcggttggagttacattacttttttctaacataatggccccatactttaagatttttgagttagtaagctacctctttgcttttttgacttagactaattctgaactggtgaggtgtgctcacagcgaagtttcctctaaaagttacttttctacttttagcaaagcagttgccgctaccaactgaatgcatttggctcatccgtgggttactgggttaaggattttagacaggaaggctatgggttgtcagtggcctcagtgctttcgggctacgcccttatttacactgacaacaaagtggcattggagtgttataggttcatagagaagatcttcaattatcaattatgggtttcaaatttaccctggcttttaaaggaatagggcacacttttttttttttaactatttctttttctttcttttactctttgacttccttggaatccgtgaggccaagaacctgcctctctgtctctctctctctcttcatctctctctctctctctccatctctctctctccgtgtctctctcttagccattacaaacttggggccctggcaagggtggtggggaatgggtcctgcataactgctcatgtcaagagctgtatacctaaattaggagggacgccagggataagactccctgggctatagcctaggtgcctgaggacgcagcgtagggcttccttagatccctttggagatacaacctgctagaggaaatgaaagtctgaaccattagtacctaggaggcagggatcagaggaagtagattcagaggtaaggagaattttggggctatactttcaagaaagtcgtgttcgggacccaggaggtatgggtcagaaggaaaggtaagggcgcatgcgtgggcgactgttgagtagagacttctggctgagccatgatctcaatcagctactgctgggaggtt

SEQ ID NO: 27465 - DNA, 2300 bp, Homo sapien
atcacctctttaaagaccttttctccaaataaggtcacattttgagatattgagggttaggacttgaatgtatgaattctggaggaaggcaatcagctcagaccataacccattctccccaatagtcttcatagtcccttggttggtcccaaagaattgctgagtctacccagcaaagcctcagcccagccctgcacctccaatcctgcccctctacttggagcctcagcactaattgctgtgctgccaacctcaggctgctgcagcccttgatgtgtctttgtgttgttagaaaatgcaggtctgctccagagccagccagcagagcacaggctgattctccacatgccctctgcacagcctggaggaccacagcagggaccccatggaggctcacactgggagaccccttctacacctccaggctgtgggggtccagcccccaacagggcaggaggcccctggggagggtgtggtttttgcccctgagaaatcacaggtgtctcctagtatagataagcaagcacccttcttccaatctgtcaatctgtcctacatcgcagatgacactatggctccagttcctcaccctgccctcctcctccttctctcccactactaaccacctgggcaaccctaaaggcatcccacgtgggccttcccaagcgtggcattgggggcaaggaggaggaggggagtgagagaaggaggatgctgtcttcattagtttgcaaatgatttgtgtggtcaggatatgtaaataaataatttatatacatataaaagaaacgaatataacacacatattttatataatatatataatgttcatttctgtcgctctgtgaaatataggttattttataataactcatgtatgagactctgtcttgctggctggtgttcccacgctgtgggcgagggtgctgaccagctggtgctcctggccaaggcctctgagggcagcctgtgctcgccggtgcccatttgggggcgcatggccttctgcttgctgtccaaggtggacctgaggatgtggtcgcatcggtgacctgggcatgtaaggagggcagtccaggtcagagggcgtggggctgctgagctgaggagagagggttgatgggctggagtctggtggcctgctctgcacagggagatgaggggtgctggggacgggtggcaagacgcttcaatcttctcgccagaccctctcagtcctgtaccgggactggcagagtaacagatgtgaatgtgccttcagtctgcacaacgcttttttgggacagttgagggcccactctgatgccttgaagactcttcagagcctcacgatgttgggactgaacaaaggatggaacctcttcccggaaaagctgaacaggactaaggcaaggagaccttcaaccaggccagggccaatgcccaggctccttcctggccccactgtggttgtgaggagggcacatcagcaaggctgctggagccgctcgcctcctttgttgaggtcgtggggacccattcccatgtcccagtccatctactcttatccttccagctcagggtacaagcagggcgacagatatgggataggggagagacagcagagatattaaagtccttgggctgagttttgtgttataaagggcaagggaaacacagctcctgggaaaacctgaaagtgcgtgagcgggcacgcaggtattttcagagctcctcttcccttagaaaaacaatccttcccattgacatttgaaaggtattttacatgcatgtaaatcttgcactcattgaaaaacgcacaatggcatccctgtgatgatctttgaaactttagcttttactttttactttttttttttttttaaaagagacagggtctcgttctgctgcccaggctggagtgtattactttttaaagaaatcgagcatttccttccatcctggcggaatttggagcagcgacctaacgtgccgttctcttttgcaccactaggtggcccctggtgctctcagatgtcggccaggcttgcagacaggtgaatgcatctcattggctccagggaggcatgatgccaccgggcagctctttttaagagaaaagccagaaccggtggagcagcgacccctgagcagtgttctctgtgctgagcggcgggactgagctgttgagttagagccaacatgagtgaggtgagtgatgcttcgacctggagagggaaacttaggagtgagaagggacctcggctgaaggattagtctcaggaaatgtgagggacttagcagtgctgaggaacaaatta

SEQ ID NO: 27466 - DNA, 2300 bp, Homo sapien
aacccgggaggcggagcctgcagtgagccgagatcgtgccactgcactccagcctgggcgacagagcgagactccgtctcaaaaaaaaaaaaaaaaaaaaaagaaaatagaactgataggacatagaactcgcctgaatgccaggatgaggcaaaggcgatgaggaccaaggtggctgctaggtcttggtgaagagccctgaacaggtgaagagtcctcctgccaggaataagaaccacggggtgtggcactggctgtccatggctgacttattttggactttggggaattgaaagtagccctttatagagatatggaaaggggaaggaagagaatgctattggatgtgctcgttgtatcaggcggactcatgtttagaagaggtacatcagcattatttactgtcccacaagatttctgcattttggggctggaagggaatgtgtatttcaggttgactgtctgttccagttgtgggtgcacaatacagtgctgattaaaaagcaacacatacaaaaaggaaaaaataagtgaaggaaggtcagagcacggcacttcaacccacagtgactatgcttacctggtctgtgttagcaacccaaaaggaatttaagacactgggcttattggcaaaacacattgaaaattaactgtaaagtttgtctacctgatacagatggcataggattatgggaaagaatctggaaaaataggaaccaccataaagaatgaaactaacactatgttgtggccacttaatattatgggataatggtttttcacactttgggttcacctactaataggttgtgaaatcagtttcatggattgcagctttactttttaaaaaaatgaaataaaagagcatagaatgtatcagtgtgtatcaaatagtggtgataaatattctgcagcttgtttcagtacacctgtgcatacataaagttatgtgtgtgtttgtatatttatgtgtgtatttatgtgtatgcattactgagttctaagataaaatgtctttattctatgtatctcttactgtgagtcagagcaaaaaatgtttgaagagcctttttcaacatcttagtgatggaattgttacttttctgactaggcttccgtttcaaagcaaggctaatcgtcttttagcatcagctggtataccttggattcttaaagttctctctttaaatatttctgcattttaaattaaagattcctgctttagcaagtcccctagttcttattcctggtagggggactcttcacctgttcagggctcctcaccaagacctagcagccgccttggtcctcatctcctttgcctcatcctgacattcaggccaattctatgtcctatcagttctattttcaaagtatatcttgtatcatttccttggacatgacacattttttcccacctcaaacacatgctttgagaccagcaagtctataaggccataggcttggttgcatttataatgggaatagcagagaaagcagtttatttttttaaaactgcaacatcatttgaaggtcttggattacatttgtttcccaatgacacgtgatgatgtcaaaggaaactataatgagtttactgagctatccatacaaatgtacatgcaaatatgtatacttacaagaacacgcaagggtagaaaccatgtcagatgcggtccctcgtgtcactcccactccactgccttttggtttcaaatagtctgaccccatgagaatctttgagactgtctttcatgtcacagagccttgcactgtgagagtaactcaattccctaaatgacttccccagatctagcttatcacaaactccattgccttgcaataacctttgtaacaaaatggtattaataaaatcatgtagcaactgcccatcatatgcagacctagtaatggaatccaagttacctaaaaggctaattcctaatgagaaggaaaggaaacataccataaagtaaaagtgcaaacaattgcaaaacagaggcaaacagtgtcagttggatatacgtaagcgctgatgtaaagagagattggaaatgatatatctggctgggcaggtcactcatgcctgtaatcccagcactttgggaggctgaggcaggcagatcacctaaggccaggaattcgacaccagcctggccaacgtggcaaaacccgtctctactaaaaatacaaaaattagccgggcgtggtggtgtgcgcctggaatcccagctacccaggaggctgaggcaggagaaatgctggaacccgggaggcagaggctgcagtgagctgagatc

SEQ ID NO: 27467 - DNA, 2300 bp, Homo sapien
acttcaggagctgcaatagagactctgtatctctcaaagccaaaaatatttatcatttggcccttcgtaagaaaaagtttgctgactttgattttcagcgagggcacccagagagcttggaagtgattactcctgggctcataacatgaaaaaaagctgaacagaatgaaaatctatgacttttctggattcatcagaggattgaggtcacagggcaaaccactggtctgcaatctggagagacaggtcaacacagagaatgagagccaaggtcagcttacagggggcagaagcttgcggagccagtgattggtaggaacacgtaaatggtaagttcaatgaattgctggagactaagtatgtgaggcttgagagttaatatttcctaggagcccctacagctttcttgagtttttcctccaggaagctcaccagattctcacatgaaggtcagagaaaaatcccctccagttctgagcatgggaagtgagaaggtaagtatttgaagcaagcccattgcattctctataagaaaaccatgtccttcaaggaaggctaccttaccagaacattgtccaacttgaggaaaggaaaattagccactggtgcccccttctatcctgcctgcctcacataggaggaggaagaaaagctaaaaaacaaacaaacaaataaacacaaccacaaagcacatctgaaagtcacaatccagggacttgggtatactgcaagctgagattttatcttaagagtatggagagcttcctctccctaacacctcagcatcacatcaacaaggctccaaaataataccagtgaattacagctaagagagctgcaagatgcagcctctattcaagaatgagttcctagggaaacacaaagacaacaagagagaaaagtgagataaagaaactaaaggctgtgtcacctgcagctacatcaaacattaaatacagcccagattcatgtaaaacctcatgctaaaagtctaattatattagctttcattacccaaatactgtgtctgactctcaacaaataatgacaagaaatgaaaggcaagaaaaaatacatatgaagagacagaataagcatcagaaccagactcatatatggcagtgattttggaattattggatatggaatttaactatgattaacagaattagggttctaataggaaaagtagatgacaagcaagaacagatggataatgtcagcacagaaatggaaactctaaggaagaatttaaaggaggtgctagaactcaaaagcaatgtagcagaaataaaaagtgcctttgatgagctcattaatagactagatataaacaagaaagaatcaatgagcttgaagatacgtcaggagaaactttttaaaccaaaatgcaaagagaaaaaaaatgaatggaaaaatagaaacagactgttcaagtactctgggacaattacaaaaggtataacacatgcagaatgagaatcccagaaaaaggagaaaagggagcagaagatatatttgaaataacaatagctgacagctttccaaaattaatgatagacactaaaccacatatccaagaggctcagaaaaaaaaaaaaaaaaaaaagaaatgcaaaaaagtctacacctaggcatgtcatatccaaactgcagaaatctaaagaaaaagagacaatattgaaacaagccagagaaaaacaccttacctgtagagagacaaagctaagaattatactggactttttgccacaagctacacaagtaagagagtggagtgaaatgtacagtattgaacaacaacaacagtaacaacagcaacaaaaaacccaccaagatagaattctctgtctacataatgtttcttcaaaagtgaaggagaaataaagatttttgtcagacacaaaaaaattgagggaatttgttaccagtaaacctgcctttaacatttaagaaaggttaaaagaatgtattcagaaagaagaaaatagcatgggtcagaaattcagatttacataacaaaaggaggagtttcgtaggaataaatgacagtaaaataaaatgcataagcagaattagaaaaacttgctgttatagttaggggcttcagcacccctctgtcagtagttaacagagccagcagacagaaaatcagtaaggttatagttgacctatgtaacaatgccatcaaacaactgaatctaatttacattcatagaatacttcatgaacaacagcagaatgcacattctttacaaattcacatggtctattcaccaagactatattctggactataa

SEQ ID NO: 27468 - DNA, 2300 bp, Homo sapien
tgcatcattttggaacagcaagcctgtgttctgccaccacctgccatctctggtgagtgtatgggcatgtgtgcaggacaagcactgtgcaggagttcagagaaaggcctcgcagtgaccatcccctcagcaggctggcagtgccagggcacattccacaagtggccagaggcttgtgcccacctccaatccagatacccagagcttcccagcatggaggttgcaatccctgagggatctcctgtccactgtacattgggacagtgggctgtgggagagagacagtggcttccccaccccctaactgtggctggccacagcatgtgggtgcagccaagggcagggaagcaactggcaagtggaagcctcttgtactgcactgagtcacctggaaggtctgtggggtctgtacaggggtgcattcccacgcccaaggaagagcagcatgtagcagaaaacaccatgactggttgagagaggcaggaagaaaggaggaagtgttctgttttagcacttgttatggtgcttctttttcattttgagaaaggagctctccattttcattttatagtggaccccacaaatcatgtttccagccctgctcccaaactcagtaacagttaaccacagccatcgctaactacagtgaccatgtgctgtcaacggatggaaagatcttcacacctctgtgagttaagaactgtgataatttccagtctgcatatgaggaaattgaggctcgagtcacatgcagaagccccacatcggggtagtggaggagctgcaattcgaccctgggtttccctgaccccagtgcctgggcacccttgcaggtggctagtgtgcaagtaagaattaatgaataggtcaaccagccagatgcagggacagaatcaggcccatcccctgccttcctgggttgcatttgggaaggaccagggactgagcacccagcatttgcaaagccagaggatgctggttctggtgcgtggtactgggggctgggcctgcgcagcctgagtgggcggcagcacgtgatcacctgcagctgcagagccgtggtgagccaggcagcatcaccggctcagctgacccttcctggtacacagggcctggccatcttgtgcccaaccctggtaaagcaccattttgtttctgcctcaccatttgcttctcctgtgttttgtgagctgtctgagatgtgcatcattcttctgtatttggagggggacatggagcccagttaggatacctagtgcctaggaaaaagcctactcaatttcccttgaaaatgtctcccttgacccccaccgaatgctttttttcagtcctgattgtcctgactgtgagcattccatcctggcttctacactggggtgcattccagccctgtcggtcattatattgcaaagtgatggatagatgtacgcccttgtgagagctttaatttaaatattatcatgacttcaagaatcatacagaacattcaggaaatgttaacatattgacttttcacagaaacgtgaaaggggctatatgtttgggattactcaaattatcagcaatttcaatcagcttttttatgcgccattcagagagcaaaattagaagtgcttgtgtttgcattctaccatgtattcaagataattaaaaattagcccgtgaaatcatagagatctttacagtagcagcaaggatttggaaggagcatttccctctaagcaaatgaactggacttttctgagagtaaatacggaatcggaatccagctgcacattttattaaaactacgagcatttcatgttcacctctccgtggctggccaccttccgcaatagtcaccccggccatcccttattagcaaccggcaggaaaataactaaaaataagcagctgttgaaatgattatttaagcctctaagaaattcctcctgatgactgtgcgtgactgtgcggtggctgcgctctccccggtcctgcctcagttcggctgcacgtctctgctgctgctttaagactgcagagcgccccagcggccagaggcaggggaggggtccctgctcgcctccgcgctcggcttcactcgcccggctcgcaggcagggaaggttggcagagggatccatgtgactgaggccggagcacggcaaagatgagcctgcccgcccgcctgctgcctggatgcggagggtgagggctggcgcacgggaggccgctggctgcgcattctgggcgccgagtgcccgggatgagctcacgcccgcgtctgcggctctctccacctgccgacctgccgggggc

SEQ ID NO: 27469 - DNA, 2300 bp, Homo sapien
tggctggtccccggctgtcctagactgctcgtcaagtccccctgcctcgacctgtgctctggaggactggtgactctccagtaccattggatggggcttccatgtggaatggccagaggggctggacattttctgagacacagactatggctggctgcttttggttggtggtcccatgaagccagccacaagcagaacccctggacactgactcagtttccccaagactacttgactgagggagggctcatcaaccctggcaggtttttctcaaacaactccctgtcctcccggtcctcacctcacctgcatcctgtgccctccatccccaccaggagggaggagaaaaccaaccccaatggtgcccgcatctggaattatctccctggcgctcaggtcaacagcctttccaagaacactcgatgtgagcatctgcagcctttgcttctcatttcctcctaagaggagcccctgggatgctatgaaggaaagcatatggagggcaaaggagactcacagattaatgcttggaattctgtcccatgacatcccatgctctgaccttgtggcacagggcctttggatgccgcaagtggtcatagaggctgacagcgcatgtgccccatgttgagctggacttcttctaagcagctacagtatcagcttattgagtctccatgacagccccatgttgacctggcttcttctaagccgttacagtatcagctcattgaatcttcaccacagccccatgttgacctgggcttcctctaagcagctacagtatcagctcattgaatctccgtgacagccccatgttgacctggcttcttctaagcagctacagtatcagttcattgaatcttcaccacagccctgtgttgaccggggcttcttctaagcagctacagtatcagctcattgaatcttcgcaacatcatgcatggcagatctaacaattgtcacccttgtttacagatgaggaaactgaggcacaactggcaagtggcagaaactggttaaatgctcaatgagtagttgttgaatcttagaaggaagaggaagctcgttccgctccgcagcagcggcagggtggggctgccctgacccacctacactgtctttgagcatttggtgccattttgggatagtgaggttccttttcacaggggaagctgcagtgtctcccggggatggtagccttttcgagaagcacaaccagttagcttgcagaagtggggacgcgactgttctgcatctccctctccacgcacccccacttgcagaaacagccagccgctctgtcactgaacctgcacgaaatgccctgtgtcttaggaaaatgaacagtgtctgtttatccaagatgaatctactctagataagaatgtatcaacctcagaccacattgtgtctgcaaatatttttctccgtttcccgattgtttaatggacaaagcgggtttgggggagctggggagagttgggcagttctcactgagcaccagtccttgttcttgagcctgtagtttttgtctccacggctgcagagactggccagggtctcatctgccatccaccttcagaatggtggaaacagttgaaaagaacattgcagtgaagcttgggctggtttgcaagcaggtcgcatcttagaaaccctccttgccgctttcatggcaaatgctcactttctccagacccccttgcttgtgtgggcaggggtcggcatgcacggggttcctttttagaatatgggtgcaaatatcacaacagtttgcataagtctccaaccgctttttcctcctgtgaatcaaacttgcttttttcccggttagaatattgtgaaagcaaaacaaacaaataaacaacaacaacaaaaaagatgtgggttggttcgcctgcttgtgcgtatttctttcagtggggtcaatgaatcccccattgtttgctcctacaggcccctcattgtgtccatgggtagccctgtaccaggtaatgaaaggatttctcttatgtttctgttctttgttttcaaggaacaacagagagatggtatttccagacaagggaataaattcccggaagcaactggccaaggaatgaaaatcctggagaacagagtggaagaaacgcgtattccacatttcctgttgattttctttcctccctaaacactgacctcccgcagtcttcactagcaggtaagcccattttcctccctacaccaccatagcctgtaggtccctaacttccagaccctgctcagggttaaacaagctggacactgaacagcctctg

SEQ ID NO: 27470 - DNA, 2300 bp, Homo sapien
gaggctgtaaggagaagggaaggagttggaggctctggtggagtgaggaagagcagggcagtatcccatgtcctctgatgttaggggtgaggtcaggagggtgggtctcaccttctcctttctctgccctgcatcggtcaccatggtttaaaaatcaatgctattccatgagagggctgccacttatcatttcagttccaacacctggaaagtaaaattattgtctcccaaatccacccagcaccataggcttgaatagggatcatatgctctaagaccattcatgaaaacagagacaaccaaggagacagtcacccaatgctgtcccttcagcttgcattattttctgacaagacagctctgccatccatggaagcctgtgtgctcctccatccctggatctttatgcatccttttccccacaaacccaaaccatccctcttaaaatgaaaagcttaggaatactcaccctagactgagtcacgcgtttcttgtacaaactttaattagacttgattttttaaaaatttcccttgtggcttttaattattagacagagcaaatgtctctagtattaaacttatatgtcacatagcctctttatcaatggccctaatacatttcatgtgcttttcagaaagattatattcttcccagagctgtctgaatgtctttttgaacccctcaagactggacaccaaggagtataaataatcattttaaaaaaaatcacattccctccacaaccttgaatctgaaacgtgaatatatgaatagaagggctctggaataactatgcagatttatggagaatatcaacttaagttatatcacgggatccagctatgcctttcttcatggagttggggatttgttaaagttgagatatagtttgggggaagtgtgatttatggttaaagtcatctgaaaatcaatacatttgaagatctctgacataaaggtcccttgcagagctagacgtgattctaaaattgggaacacaggaataaaaatcaaatcttgagtagaagtagctgaaaattgcagtgattcggggaagcttggcttctaactccccactgtttgaagatgggcttgtttgttttttaaaacagccaacataattcagctggaggaggtacaaagaattttctattccttgtttctgtagaaatcgatggactttagcttgtctaattgtcccccctgcctttagtatctaaaataaaataaccctcgttgcttgcattactcaacgcatttctgcgtcttggcgtctatggctaaacgagtattaattagacagtccgcagagagctggctggggatagaaggggaggtgggggagaagggcagggatcacagcagggtggactcgtggccctgatttgggatcctgacagcaacttactaggtggcctgagggctgggtgccaggggaggcagcgggttccagtagcatctgacctgcattagggacaggggcgcggcggagggggcgaagggggcgggggtggggggaaggtggctggggtgaagcccagcttcgcagctagctgtgggcaacagagggagtaagggggggcaatgaggctggggccaggcgccagcagcagccacgccccccacctcccccgatttttagggaaaattctccaaagctctcgcatcctcctctgcctccttccaccctccaccctcccagcctccactgagacctctttaaaaccacccaggggccgccgggggatgaggccggggaacgggctggactgagggcgggggctcgggggcagcggacgggaaacgcctcgaaagcagccagacccggcgactgaaatgaggcggaggagcttggcgaggggaggcgcaggctcggaaaggcgcgcgaggctccaggctccttcccgatccaccgctctcctcgctgacctccgagtcacccccggaagctcccgccactgccgggcgaatagacccccgcggacccccaagcgcgcggggccggggccctagttcaggccctcgctgcccctttaagggttctcgaaactttccccccggtatcagatgagcctcgtcacatccgttggccgtggccgctggggcgctttccgaggaaattcgggactcgagtttcccggggaagaggcgcggcctgagcccggcgagggtggggagggcaggcgcaggtggaccccggcgccccccgagccccgctgtgaccttggccgcgggggaggggctgggccgctgcggggcagtcgcggccgccagagggggcagcggagaagaacttg

SEQ ID NO: 27471 - DNA, 2300 bp, Homo sapien
aagcacctgtgactctctgcagatggcttctttggccagctattgagccagaaacgctgaagagtgaaccccctgtgagctgccctccacccacggttggcaggagggagtgataaggcccagctgccttgccccctagtcagcacagctgaatctatctgatgtcacctctcagagttccccagtggggagtgggtctcagtggcccacatttataacctcctccatgacacacactcttacctgcgactcctggtgaggcaggaggcgggacttgattccagaggcaaggcttggacataggaccaaactgagcactagctaaaacaggtcagggcagatgcagttttccataggacacacccaccagcatgccatgtcggtttaccgtttccatggcaacacccagaagttaccacccctttccatggcaatgacccaatggccctaaggttaccaccctcatcctagaagtatctgcatacaccgcccattaatttgcatatagttaaaggtaggtataaatatgactgcagaactgcctctgagctgctactcagggcacacagcctatggagcagccctgatctgcaaggagcggcatctctggcgctgctgtgcacagctgcttccatgaaagctgctgcctaacaccaccagctcacccttgaatctttgggcaaatccaagaactctcccaggctaagccccagtcttggggcttgcctgtcctgcatcatctggcaaccagcaaagggacaaggacagcggagatggtggcaattggcagagaggcaagacagcagagacagagaggcagcaattggtgagagacaagagacagcagttggcaagacagcaagagacggtgaagcagtctgtgattgaggatgtaagatctgtaacactgaggaagtaccaataaagagctgctaacactaccgagctctaaccctaaccagtgcctcttttcacagccatcatctttccctggcaggtggtgaaactgagtggacagccaagtgtccatagtacagctgcctcgtgtgggacccactgctctaacgagccagcccccgacacagaagctgagcacccccaagctggggaacctagagagacctgcacccgggtcccacgtggaagactggctggtgccattttgtcttctgtggatgggtgagagtcccctttgcaccctcccccagtaatatcaggtaagctaggaaataaaagcctttggctaagcggtcagttccccacggtttaggtgccttgaagcacattcttgccaccccttcacctggttctttctcctctgactccattttattgctccactttggtttcattttcagtcctaacatgtatgtcttgtttggagtcttatgtttgctttcgactttctgttaattgtatttgggcaattgtttaaggcaggacacttggttgtgagaggtcccctgttgtgttgactctgggataccagagtcacgttgtcacgttgttctatgttctgtaacctggtcttgggttcacggggttggccgcccactgggtaccccagggtttttggcactgctgtgcacagctgctttggcgagggcatccttgttggctgaaacgcaggcattttgggttctcagcatcggtattataggccaccctccagatgctctggggtttttagcactgacatttcctctaggattgtgggttatacccctttcgctaggcgaatattggtcttgtctttttccaccctgaagttaggagtattattttcctaatagccaattgcaagctccttcctgtgtactgtcttataactcccttgcctaagctgctcttggtcaaaggaattgggagctcccaggctcctggcctggcagtcagccacctacagtggtagacaagtggccagcccaatatttttttcagtatctccactactgggtaggttcttcagcaagtcagagcctctgaggtctccccttgggcaacgctgtttacccctttcccttcctccatttgtttagccccctctccacccaactctagatctctatggaatttaggctccacattcgactgcccattcgtagctcataatccatttttataacaccttgctatctatatttacacctttaaagaacacgggaatttaagagggaagagtaactaggcttttgctaaacttgggctaataaaaccctctgtagagagatccttaatataggcatggggacaacaaggagtatcccaagggactcgccgctagggtgtcttttaagcta

SEQ ID NO: 27472 - DNA, 2300 bp, Homo sapien
acaggggacttgcccaagttcaagctttgaggccagcagtccccaaaccttcagccaacacctgctttttataacaagtgctttgtcattccctgaagtaaatgcaaaggtcatatgacttatctacatacacagctcaaagtgccctgacgtcatatggggggaatacaagggaagtaatgtataaccggctaatcagtacctcagtacgtgaacactctggctccgtggtgctggtagaccacgcagtaggcagatgctggaggtgagttaacatcaccatggacatgtacacccagtgtagactgatcaaggcaagctgacttacactcacacaccccaagcagctcagcttgctgtcttagactgttgtgctgctataagagaatacccaaggctggggagtttataaagaaaagaggtttatttggctcatggttctgcaggctgtacaagaagcatggtgccaggctctcaggctgcttccagtcatggtggaaggtgaagcagagccagtgtgcagagatcacatgggagagaggaagcaagggtaggggaaggacgtgccagactttttttcaacaatcgatcagccctccctggagctaacagagtgagatctcagtcattattatgggcaaggcacaaagccattcttgagagatccgacctcactacgcaaacactttccaccaggccccacttcctacactggggatcaaatttcaacatgagaattggaggggacagatatccaaactctatcagttgctgatgtgattttccagaatggacaagaatcttaggaaagttccaagaaaaacagaaagagaatcagcttccctggatttccatagtagcgaatatgcaatgtatactaaacctgtgtagaaaagatggtatgcatatgtgaatgggaggtgcattctgtgctcatatgatccagcagatttcacccatgttgatgcccagagcgactttggaaagtggtgtgggatgggaacaatacttcattttgcatgactgcccttcacattccaggataaccagcatgcttatcaaacacacccccaaagtttccaaaacttcccctaggggacaggaccttccccattgagaaccgcttatctgaatagtccctgatagtcccagccctgtgttgtttccactgctgggctctagtctgtacgacacgttttccacgtttccccctcactggggctcagcacacaggggcagaaccaacacacgtggagcttgcatttcctcgtttagcaattctttcccacttagaataggtttttctctcatcatctgtagatgcaagatacaacagaaagaagcagtaaagcacagtaaagtcaaggttagggtgatgtggatggtgactttccagatttaaagggaaccatgcaagtcaagccctgtggatggctacttttttcatggcagataaatagcagttctgtggcagccgctcatcgccagagtccatcaaggtcaaagtatgcttctcaatccacacatcctttcgctatgcagaggcaattgttgaaaccttcaagggtaaataatactctgcattatcaagactatgtgcaatatttcatcaaccgtagacaacccaccgcatctttctcagctcccttcaactgtgttcagtgtttggttgagctgtggttctctttcaggctaccgtgggacacatctctcttacttacctgctagccctgttttgcattcaagtggcagatggttcctgttttccatcctttgggcttctctagtccatatgcatttgatgaatatgaaaactgggatcatccagaactcatttgatgactaagccttccctcctgctaatctcacaagataattcaggatttcttgccaccattctgaccactcaaggttctgatctgtttcttcttttgtgggtaaataaaaagagaaagaacacaccagtgtctggggaaagcccctcaatggttggtttcaccccattgccacttccaccattcaaattcagtgtaccttccttatttgcgagtactgcagagactgacttattacatataacacatcacgcaccttttgggtgtctaccctggtaccgcctttcttttcaagagaccattcttcaacagaactgtaaggtttcttcttggctgaatcagatgtgacgcatcccacttctgcgtttgaggcgagttctattccttcagctgcatccctgctaccatgcttgctttgcagattaaattcttagattgatattaacttgtttccttttatctgct

SEQ ID NO: 27473 - DNA, 2300 bp, Homo sapien
caagaatgagttaatgaataaaaggccagatagggtggctcatgcctgtaatcccagcattttgggaggctaaggtaggaggattacttgagcccaggagtttgagactagctcgggcaatataatgagaccctgtctcggcaaaaaaagaaagaaaaatattagttgggcttgatggtgtgcacctgtagtcccagttactcagtaggcagaggtgggaggatctcctgagcccaggagttcaagctactgtgagccatgattgcgctatggcactccagcctggatgacagagcaagaccttttctttaaaagaaataataaatgaatgaatgaatgaatgaatgaacaaatgatcatgtcatctccaaacttctttactgaccttaagcaagactgcactagttcatgtaatcccacaacaaagacttattaacacgtgttaatgttcacagactgattattaaaacagagtgaaatcaagcctgcaggtgagcaggatcgctttagtatgatctactgggtgatttgatatttagcttagaattgtgattattttcttaggaggagcatggtttgagttcatagacatttgcctagagatgtttcttaggttccttcctatattccagcagttttcaaactcaaatgggcataggaatgaccttatagggtgggactccccagggccatgacacctgctgtcctctctccacagtgctctacccctagagagccccaggtctcactgtcttcattcaggtctcatgcaaacatggttggatccaagagttctctccaaccactgggtcacttgaggtccccttgcctgctttgttccctgggtggctctcgtcccgtaaccaccattcccgcattcattatctctcctcactgcagcataaactgagggggcaggactttcgtctgatcttgtgaatgtcgttctgcgtcagtagctcttacctccagggccacgtgagtgtcaggctctcggtcatgtcacagtgattcatgttctggcatgccattagcgtcactgcccatattttggtgagagtataatcacctttggggcattgggggagaaccttgagaaggacctgtgacatgaaggacctgggcttcagcaggtagggcttggtcattatttgtcacatgagttgtatgtgtgaacctgaactccagctgctgcgggcacaggctggtggagcctccctctgggatgccggcacctacccgtgtcacacagcagcagcacagcagccctgcaaagccggagggccaggcaggtgccagattgggttgtgtccttcaaagggtcgtgtcctacggtggccaaacaaagcacctgacttatagggtttaacttgggtatagtgaaaaattaaactccagccacatgtttacaccagtgcgtcccttccacatgacatggaaaacactgttaccaaaacattagcgattatgtttttgggggaagctgtcactttgttaacattgatgctgttcatgataaagaatggcttacaggcttacagtagactttctgtgtttaggatagctgccttggacacggcaaccttatcttcatggttcgggaacatggatacataagagaatgcaaggggcttagccgggcgcagtggctcacgcctgtaatcctagcactttgggaggccgaggcaggcagatcacaaggtcaagagatcgagaccatcctggccaacatggtgaaaccccgtctctactaaaattacaaaaattagctgggcgtggtgatgtgtgcctgtattcccagctactcaggaggctgaggcaggagaatcgcttgaacccgggaggcggaggttgcagtgagccaagatcccgccactgcactccagcctgggtgacagagcaagactccgtctcaaaaataaataaataaaaataaaataaaataaaatgaatacaatatgcttttcttttctttctccaggtctagcacataccgctccaagggctttgacgtcacagtgaagtacacacaaggaagctggacgggcttcgttggggaagacctcgtcaccatccccaaaggcttcaatacttcttttcttgtcaacattgccactatttttgaatcagagaatttctttttgcctgggattaaatggaatggaatacttggcctagcttatgccacacttgccaaggtaaggctaatccatggatttaaggaaatcaaataacaggatgagattctgaaaatcagtcattaaagggctgacacatgagtcttgggctgttcttggaga

SEQ ID NO: 27474 - DNA, 2300 bp, Homo sapien
tgacctgatgtcattaggagaagagttaaaagacagtatcccctctctcctgcttgtgtgccaagttcagtgttccctttgcatttttttggggtgggttggctatattacagaattccaccaaaagtgctaagtgtcccctcctgcagaagtatcgtttgtattcacagtaggctacgtgtggatgtttcagccatctgctctgctccctgggtccccgggtcaccaccatactgagaaatataggactctgccaaagagacgtggaggccacgtcggcttgtcatggtgtcctggaagactctccagcagccagaagaaccttctgtgctgttttcactagagaagatttgagttgcagcctcttggaaagaacatgacggcacggaacgggaggagggggctcttgtatcagggcccgttgtcacatccgctctcagcttgttgaaaactcataatctcagaatgcatttcacacggagagatgtctggaagtccaattctcatcccattggctttttccgtggttgctgttttgtgggccgctttgcacaggagtgaagccaacacccctagattgtgccttcacccttgctgtgaaaaattcaaagccctgaaataagaggagggaatcgcagacatgccctgattagttttcctgcttatttcttcatacaggcatcttctgttccgttgtattgtgttaggtttcagaggcggggagcttcctcctgcagcagatgaacaggcatagttcttaaaatacaggaaagtaacaagtgaggtttccaggtagagtaggtgaatgaagtttgccgtcatgctctgtatttcatatcagatttctttatcttttcatatcgcatgtcattggatgtgacattttgatgaaaatactgaaactacaaaagcataacttcgcaacaagaatgagatagacaattgaatgtgggacatttttctggcatgtcttgctgctgagaatcggacttccagtcaaaaccctgttagtgacacccacctcctccagttatgcaaattgatgcttagcttggcaagctttcaaggaggtttgcttggaacaggaaaggaattaacaaccctttgagggtgtcatttttaccttgtaatacactgtggaaaattctggaagacggtccttgcctgaaaaggtgcaacttagcattaggttgttatcagaaaccttgtcaagtctgatgggaaatgaatagatgctgctttatttccttgataacttctttggaagtctgaaataaatcctgccttcagtaactgaaaccatttattaaaaatagcaagaaacaagatggggaccaattctatttttattcttgggaatttgaaagagccacaagtgattggtgtccgatctcccagcatatactgtacactattttgtatttctcctgaaccaaaaccaagtacttagcactcaagaaacagatgccctgtgtgtgaccgaggggagtgtttttccacaacaggttccacttctgaacacttggaaggaccttgcctgattcatggtgaaacacagaggttttggttggagataaatttggggtcagttactgttcaaaattgtgaaagtagttcccaggaagacagcattagtgactccgcagtgctttgggtaatagattttgaaaagcaattgtgagttggggattccatcatttcatttaagaggtgaagagggatttaattatttaatacgccgggtgcaaacttgttaaattcctctttccctgtccctgcttggtggagctgccacgtgtggttcagttctaagttctggactagtgccactcgatatcattgggaataaatcgttgttcaacagtctgttccacaaacaacagtaattgaatttcacagactttatcctgattagtggaaatcaaataatggagtggaatccccatgtgttttctcttgcacaaacttattagacttgattagaaaactgtttggaggaaaaacttgccagtaagttttttggttgttgttttgttttttttgaaaaacgacgcaacaccataaagtgtaaaattaggggttctggccaagagaggtactagatttttttaatgccgagaaaagtccatgccacagaagttattgtgtatgtctctagggagctttaagaatttcacgtttgaactttacagctgtttaccaattaaatggcaagctggaaaaatacattttgagaggggtagaaagaataagaatataattaaaagtatgctaacaaaataagcagtacatattttttt

SEQ ID NO: 27475 - DNA, 2300 bp, Homo sapien
atttgttggtcatttgtatgtcgtccttagagaagtgtctgttcatgtcttttgcccatttttttaaatggagtttaaatttcagactgctgcagtaaagcaaataacataaacaaaaaagttgtttatgttatatttacactctactgtagtttattgaatgtgcaatagcattatatctggaaaagtaatgtacataccttaattttaaaatattgctgaaaaatgctaacaatcaagtgtcttcagccaatcatcattattctgctgctggaaggtcttgcctcaatgtggatggctgctgactaatcaggttgttgaaggttgtggtggatttgacaatttctaaaaacagataacaataatgtttgactcttcctttcagaaaaatatttctctgcagcatgcaatgttgtttgatagcatttggcccccagtgcaaattctttcaaaactggagacaatcccctcaaaccctgccactgccatatcaactaagtttatatagtattctcaatcctttgttgtcatttcaacaatgttcacagcatcttcacaaggagtaaattccatctaagaaactatttcctctgcacatccataagaaataactccttgtctgttcaaattttctcatgaggttgtagcaattcagtcacatcttcagcctccatttctaatcctagttctcttgctgtttccaccacatctgctgtaacttcctacactggggccgtaaacccctcaaagtcatccataaggattggaatgaacttctcccaaattcctcttaatgttgatattttaaccacctttcatgaatcatggatgttcttaatggcatcttgaatggtgaatccttttcagaagattttcaattgacttttcccaagatccatcagaggaatcactctctatggcaagtatggccttatgagatgtatttcttaaactatgagacctggaacaaccaatcagagctcacctccttggccaatcagggctcagttgtattaaccaatcagagctcagctatattgaccaatcagggttcagctctgtcaaccaatcagaactaaataagtttcaagccttcatttgcataaacagacctgattggcaacttgggaaggcacttttgctataaaacctgggccttccctctgttctctggagtgcatcttaatttttacacgtgtggtgctgtctccccagtttgcaaatttttcactggaataaagtgtcttttctccaaattttttttttcagagaacttgttcacacagggttgtcacaaaccttcagtttgtaaaaactacatctgtaaagcacaataaatggaagacaaataaaaaaagctatgccagtatttaattcctgagtgtggatgcagagaaataaacacatatcctcatttccaggaacctacaggccaacaggtgcagctggcacccaaaggagtcctcaagcccagtttgcaaggagtacatgaaagtactgtgggggtgatggatggcaggcaacgccagaagcgttttcacagaaacgtggaaattcatttcacaggacctcaggacacaccctcagaccccatgtaatgttcccaggatcccagcaggaaagacccgggagctgcgcgccagggaccagaacagcgaggagaagtcaccagaccagacctcacgtgtgtgtgtgtgtgtgtgtgtgtgtgtgtggcagggggggggttgtcacagccggaaagggtagatggacacgaggggggaacacacggcaggggaggggcgcagcagaaaagaggagatagacacgaggggggcacaccacaggggaggggcgcagcgggaaaggggagatgggcacaaggtggggacacaccgcaggggaagggcgcggtgggaaaggggagatgcacccaacggccacacccagggtctgaaggctggagaggcaggccatgtagaccagatctgcttcctggggtctactggcggaaacttcctcatagactggattcgcgactgcgctgttcccgtgatccactgcgcctgcgcgggcgcctggctgggctcggcgggcatggctggggcaccctggcgccatctttttccaccgtgcgaaggcaggagcccgagactgggtgagaggacgcggggctggcgtggggaggggaaggatggacggggcaggacgctgccgcctgcatctgggaccctgagcagcccgagggagtcgcccccgaagggccccaggttgcctgcaccggcggtttcccacgtgcccaggcacctcccgttgcg

SEQ ID NO: 27476 - DNA, 2300 bp, Homo sapien
ttctccaaagatgatatacaaatagccaacaagagcgtgaaaagatactcaacactactagcaattaggacaatgcaaaccaaaaccacaatcagatatcacttcatacccattaggaaggctactattaaaaaaaaaaaaagagagagataacaacatgcgttggtgaggatgtagagaaactggatgccctgtgcactgagtgggattataaaattgtgcagctatggaaaacagtatggtgattcctcaaaaaattaagaatagaattatcgtatgatccagcaattccacttctcagtatgtatccaaaagaattgaaagcaggatccagaagagatatttgcacacccatgttcatagcagtattattcacagtaattaagaggcagaagaaacccaagtgtccgcggatggatgaatgaataaacaaaatgtggtacatatgtccaatggaattttattcagccttaaaaagaaaagaaattttgacacatgctacagcatggatgaacttggaggacatgatactaagtgaaataaaccagtcacaaaaagacaaatagtgtatgattgcgcttatatgaagtatctagagtgctcaacttcatagaaaaagcagaatggtggtttccaggggctgggggcaagggtaaatggtgagttgtgcaatgagtacagaattttagttttgcaagatgaaaaagttctggagatcagtaatgtgaatttatttaactctattggactttacacttcaagatggctaaggtggtaattttaggttgtgcattttttagccacattttttaaaaattgaaaacaaacccagagataaaagccttacctctgaagtcaggtgagctaaagatgaaggtaagattggcggtcagttcattggtttaagggagtcgttccaactagctggagagtggcttcttagtattcttgcacagcaggtccgagtggcatccagactcaaacgggccgtgctcaggcccaacgctggcatgattcttgagtcattaggaaggattccttactgtggagacccctgtcttctggtccctctggtttggggagactgcaggtgggggtgaactggaggaataaagccacattgtccacaggacatgtgtccctagaacttcccaggagcaaagacaatggtggagggagactcagggccaagcccaccagggtgacccacagggtggataatgtccctgggaaggcagggcaccttgggcttcttgagagagcagaggccggagcagagtagaactaccaagaaccagccggaccctggggcggggactgggtctttcgcagaccctgcttccctggagctctcttctgcaaaagtgaccaactgggctcggagttttaacttgcccttgttacctgaggccactgtgactatcatgggtcaaaagtgctataaaaacctgatgtgtgtttggaatgaaggtgtacccgtggatggggagagaggagctattcctgtttggggatcctgatgtcttcacacatctgcctgacccccactcctgaagctccttggtcatcatatcatataaaggaggacctgcagacccatgccgtggccagaggggctgggcatggccctcgcttcactttcccagaatgaattcatcatcctggcagtaaaagagaaaacaagaggtggggcgcctgctaggctgggctgggctggcaacagcgagcctgtagcgactgttctggaggaagcaaagaagaccgatggcctcagacagtggacatggacggcgaacttggactgggctgggcctctgctttgtcatttgaaaggcttgggtcatgcttccctttcctcttgggagacattaactgggagcctagggagccaaagtatcaagtggcgtcgtttcctcccttcagagccaaccttgctgggcttctccggtcagatcagccctggcccggggtcagcccggcggggaacgggtccaccctccgccagcgacctcagagctcccgggcacagcccggggcacagccccgcgcacctgccccgcccacgcccgccccgcgcacctgccgggtccgcacctgccatttgcccgactggccgcgcacccagctggcccgcccctgcccgacacgaccgctgcccgccccttgccttcctgacccaggggctccgctggctgcggtcgcctgggagctgccgccagggccaggaggggagcggcacctggaagatgcgcccattggctggtggtgagtgcgcccccgcctcggggcgagggtagggg

SEQ ID NO: 27477 - DNA, 2300 bp, Homo sapien
taagcagaaatctcaccactgtactccagcctgggcaacagagcgagactccatctcaagcaaacaaaaaagaaacaaagagccaggtcacacggacaatgacagggtggagttccactccaaggtgcacccgctgctcctgtgctctgctgggagggacacaccccaggtaagaaccctgcttgtctacagcacttcaccattgcctttgtcctgttaattcaggaaagcatttgcttgatctttccttctgtgattggagaggccatgggagagtggatgcatgctggctctggatggctccaggtgctgcaggtgcttccaggtggccaggaacttcatcagcacacagaggcgctggcgctttccatagagtcagcgtgccagggcaggaggcgggcactggggcttctggacttcgcctctttaccaagctgcacactgtaacgctccctgatgtggagctgagggaagagctccgcccagcggctgtgaccgaggcctgagcagcagcatcttttctggccccggcccctgtgcttggatgctgcgtgggacattcattcaccctcagggctttagtgctcagaacgcaagaaccctgtccttgaagtttgcatgcgcaggcacctctggtccttcccagggctgctggtgaggggcgtgcaggagggggatgctgccttgacagagggtggagggtcccctgagctggcccgagctgctcgtgtccctctgtccggcttctctgaggcctttctttgtgccttccttgaagcagtaggccggcccaggccctgttgtgaaagacattcctagtgaaaccgaatgtcacatcacgctgccaagtctgagattcacattcctcccctcactcctcagcctctgtccgcccgggctcttgggaagagaagtggttcagggataggtgatcctgacgatgatctcctggtgttaatatttctaatgccaaggttttgaaaaacatgttaagtttctaaatatcttccgtaaagttaagcctgcactcaagggaagtcactacaatgacttagccaagaggagctcaggagtttttttaaacgtatagtgttgatgtctgggagaggatcacgggtggataggagagctgagagcctgcttcctccctcccagccatcactgccagtccttgagaggcttggtcccctccccggtgtctggagggctcctcctggaggttcccagacctcttggctctggtgatgggaatgcctggccctccttgactttggtcacagagcaggaagccttagggagcatgcggttgtgcaccttcacttttgcaggtgaaaagtaactgaggaccagaaagatgacatgcagctggctcagggctgagttccggagcctggggtttgtcctggggcctccttatctccaatgggaagaaaaccgtcttggttttgcggcggggacctcaggcacgggtgcttggagaaagctgttgaccctccttctttgggttttccgcacctaatgaggggagaggtgacatttgtcaggtgcggctcaggcatgaagctaagcaggacagctcagagcgtccagatcatgtacctgagagcatgtcctcggctgtaacaggagtgcatctgtgaggcccgatacacgaaccacacgtggctattcattcaaattacatggagttcgaagtccagttccttggtcgcagtagtcacatttcagagccacacaggtggtactggatggcactgtcagggcagaaccttccagtgactgagccactctgagctgcccccatgccagcctcccctggaatctgttagcaatgctgattctcaggcccagcccagacctgacagatcagactctctggcgggggtggggggacagccgccccgtctccacagctctcccaggattcggatgcagctggagtttggggaccactctgtgagtcatctggagagcacgctgataactcagtttcatttctgtggccagatcaagtagtttcatttctctccctgtttgttgatgacggagcaggggagggagtggttcatatgccacataaaagtgaagtggaggaaagggaagagatgatttctccatcctgaacgtgcagcggtaagagcggggccggtgcagggagggctgctttgtgtctgatgcacagcagatgcgtgtttaaaaaatatttcctgagtaacgtgacatctgcttggtgaatgtggcttgtgctgggaggcaggagccacaaagataagattctggtgtgaggagcagaaagggcc

SEQ ID NO: 27478 - DNA, 2300 bp, Homo sapien
tacagagcctgagtcctgtggcctggcccaactgtcccaaagccccagcactctggctgtgtgtaaaccttacctcttcttcatgcccttcctggtccatggctgtgtcctttattgtacctggtctccttatcttcaagggtgcccatcacaccactctccagctcagaaccctccaaaggcctccctcacacccacacacaatgcaagacctctgcccacatcttgcaagcctttttcctccctctttttcaccagtcacactgaccatcttcctattccctgagctcattccgacctcaggacctttgcacatgcatttcctctgcgggagaggctggtccccacttcctccaagccttgctcctctgcccattcccaggcacaccctccagtgggcacccaagttaccctcaccccagaatctcaagcccaccacctgtctttctccagacactcccttgtcacctggagcctggttggttggtatatttgttttggcatttccctgctaggatggtgtgccaggagtgagggcttggtctgacttgatcaccacaataaccacgtggtggaaagtgcctggcacattcagagtcgtacccttgtatgagtctgctcaggctgccatggcaaaagaccacagactgggtggcttagacaacacacattggttctctcacagccctggaggctggaagtcccagatcaaggtgtcggcagagctggttccttctggaggccccagggggaatctgtgctctcctcccagctcctggtggctgtggcagaggccttggcattccctggcctgggctgcagcactgcagtctctgcctctgtcttcacaggcccttctccctgtgtgtctccaggtcccaaatctccctctgcctgtctctgataaggacacctgtgatgagatttagggcccattctaaatccaggatgatctcatctcaaaatcttcaccttaattatatctgcaaagagtctttttccaaaaaaaaagtcatgttcccaggttccaggtgaacataaattttggggggactgtggggacaccattcagcctcctagatccacattactactagaggaaagggggatacagtgtgatccagagtgtggggggctcctgcccggagcacaggcccagctctgagtcctggcttaggcgtcattggccctcccggatgtcagtttcttgaccctgaaaatccagataagggccaaatgcataggcttgttgtgaagcttaaatgtatgtctcagcatggtgctgccctcatctgagtgcaggccacagcctgagaactggggcccaacacctgcttctcccacactcccctggtgcctggccaagcccgggtgtgaggccaggtctggcttccagcaggcccaggaggtgctgcctgtcatctctgcacacctaatggttctcctgcctggtgctgagccacagagacctgatgccatagatgacacagaccatcagaagtgacaaaggagactgggtgtggtggctcacgactgtattcccagcactttgggatgctgaggcggacggattgcttgagctcaggagtttgagaccagcctgagcaacatggcaaaaaacccatctctataaaaaatacacacacacaaaaaaaactagctgggcatggtggtgcatgcctctagtcccaactactcggtaagctgaggcagggggactgcttgagtccagggaggttgaggctgcagtgagtcctgattgcaccactacactcccccactgggtgacagagtgagaccctgtctcaacaacaacaacaacaactacaagtagcaaaggaacattgagactctactgggaatgtggagtccactgccccccgttccccaagcccgggccggtagaaatccacttgtgctctgtggctgccaagagcccctcctgcagacaggggccctgcactggacccctggtctctgcatctgtgtgtagggggtaggttgtagggtggggtgaggaggggttggcaaaagtgccaactcagggaggacttctggtgacctgtgggccgctctccctcttgtgtctttgcagagcttgtcaggaagatcggaggtgccaagtagcagagaaagcatcccccagctctgacagggagacagcacatgtctaaggcccacaagccttggccctaccggaggagaagtcaattttcttctcgaaaatacctgaaaaaagaaatgaattccttccagcaacagccaccgccattcggcacagtgccaccacaaatgatgtt

SEQ ID NO: 27479 - DNA, 2300 bp, Homo sapien
cccaccaaatgtgttagttttcaactgcaattgatcactttctccttcttgaaagtcttcttcgctggcatctgggcacattgaccctggttctttctctccctcctgttggtctctccttaagtgaattgttcctcacttccctgacctccaaatgttgcaatgccctagagatccattcttcccattgaaaactctccctgctatgtccctgaactacagcccagtctcatgactgtaaataccacttcagcgattcctaaatcattatttcaagcccagctctctcccctgaaatccaggctcctatctccagctgccgattcaccagtgccctttgagcatctaatcggtacacaaactcagtgggtccaagcaacacccgatcttccccccagtatctgctggccccatagacatccccgtctcagacagtggcacctccaccctcccagtggctcaggccatgaccactggggtcagccctcccttttctcctcctctcacacgacacgtccagtccacctacaaagcctgctggctctgcttcaaataacacacccaggcccacgtctcctcccacttccaccagcaccctcacctaagctgctgctatcctgaacctgggttaccgcctctgctggcctcctgctgggtttctctgcctctgcccttcccggcagcacccatcccaagaatgtttcccacacagctcttgtgttttaaggcacaagtcagatgctatcatccttaaagttccccagcggctcccatgtcaatcagtgtaaaattccaaggtcccatgtgatccaatccccctacttcatggaccacatttcctgtcactgcgccttggcccctcgctccaccctaccacatccgggttctgcggcccttggtccctctggctcacttttgcctggactcttgcgtgtgcatgcacgcttcccactgcccggtgctctgcccgcatggctctccgcagagggcatccttcattcctcgcgggtttctgctgcaaggctgccctacctgggctgccttgcctgacatactgttccccgtgcctggctctttcaattccacttgccctccctgatatgtctccattgtgtttattgcctgtctcccctcctgggctgtaaggctctgggggcgtatgctcaatgccgagtctctgaaccccaggatgggccccacacctggtgggcactgctaatgtttgctgcatgcacataacgtgctctttatggtcaccccctctccaggcaaactgttccggggagcattttcactctctgatatcctacatgaatgcacatgagtgagtgtgcattaaatacggtgattcccagcccagagcttttgtacccccaggggacactggcaatgtcaggacatctttttgcttgtcataactcaggtaaggggtagggtttgctagtggtttggatgctaccggtatccagtgggtaaaggccacagagtctgctggacagcttacaatgcctaggatggccaccatggcagagtcatccttctgaattgtcaacagtgctggaaggagagctggagaaccctgggctgtgtggtctgtttgcctgcagacatcagcaggacagccccatgggtgtagcaaagggaataagcacacaagcaagaagagagttttcaactaaaggacgatcaacgttaaaacttgttcagaagtatagcatctattattcaatgattagtaaagcagaaaataaagtcaaaaaaaaaaaaacttgttcagaaaggttgcttaaggccaggtgctgtggctcatgcctgtaatcccagcactttgggaggccgaggtgagcagattacttgcggccaggagttcaagaccaacctgggcaaggtagcaagaccctgtctctacaaaaataaaaaattaaaaaattaaccaggcatggtggtgcatgcctgtggtcccagctactcgggaggctgaagtgggaaaaacacttgagtccaggagtttaagattggggtgagccgtgattgtaccactgcactccagcctgggcagcagagcaagaccatgtctcagtaagtacatacatacatacatacatacgtacatacatacatacatacataaaaattaagattgcttataactttagccagttaagttttctcctggccgaggcttcattgggcctgtttgtatttgatgattttatttgactccagtgctcaatttcttctgtgttgtcagctcgggctaatgggacacagaatggctcatttttggctgtgcagttttc

SEQ ID NO: 27480 - DNA, 2300 bp, Homo sapien
gaggctggggcaggtgggtcaaaaattccagatcttcctggatgctttaaagggctcctactcatataccaaagaaatcagttggccaatctcttaagccgcagtttgattgtttgcaattgttttgtttagaaatcgctcccgttgttagaaggacaaataagggagagccaccagaaggcgaccgaggagctgcggcgttgcggggctgacatccccagccaggaggccgacaagatgttctttctaattgaggtgaggatttccgcaggactccacgtgacactgcatccttccctggtggccctgcagctgcccttccccttcttcacccatgagatgaggtgggcgggtggacatctccttgcaacgccggtcccagttctttcatatgatttccgcaaagactattgactttatatcattttcagaaaatcaagatgtttaatcaggacatcgaaaagttagtagaaggagaagaagttgtaagggagaatgagacccgtttatacaacaaaatcagagaggattttaaaaactgggtaggcatacttgcaactaatacccaaaaaggtaagttctgggcagggctccctgcaaaacagggtggtatttacccagaccagaggctatgtccagcacatgataagtgtgccaagagtggaacacgtccatccaagaccgtggaacccttggtaatcagcaactgtctctcaacgaacaaaacccagaaatatggggcatcgacctcagcaactcaacacagggcaattccactgcctctgatgtcctcgtgtcttgattttgttttgttttgttgagacagggtctccctctgttgcctaggctggagtgtagtggcgcaatcatgactcactgcagcctcaacctcccaggctcaagtgatcctcccacctcagcctcctgagtagttgggaccacaggcatgaaccaccatacccagataatttttgtacttttttgtagagataggttttcaccaccattgctcaggctgctcttgaactcctaggctaaagcaatccacctgcctcagcctcccaaagtgctgggattatagatgtgagccactgtgcctggccttgcttcttggttttgaggctaaatggcattccatgcccacctgaggaattcgcagagcagcccagggtacctcagggctgctatcctgagtgcctggagggaagcctgtgcccaaagcaggggtccagatgactctgggggccagccccacatgaaggctctccagccactgttgaattgagtgcacagctgccagctggccatggtgcctgttgtggacacaccaggcacggagccttcattagtagcagctaaacatcagcttggtagaaaaagtgacctgggatacttatttattttggtggcattgagacagagctcagcatgggtgccaggggaccaggggaggggggaatccacatgaaatcgtttaccatctccccctctggaaggtctggggtgtgatgatctggttttagcaataagtaaagactagatgaagtagcagttttttaactgctaaaatgtgcccagatcacccaaacaattccactcatcccaatcccccttctctttgcccctaattcaagatcagagagattcttggtttgacaagagcctgctggcttcacctggcaaagttctgattcccatgtgctccagcccaggttccagtagggcatgtgtgtgtgtatgtgtgtgtccattttcacacagctataaaaaactacctgagactgggtaatttataaagaaaggaggtttaatggactcacagttccacatggctagggagacctcagaaaacttaacaatcatagcagaaagcaaaggagaagcaagcaccttctttccaaggtggcaggagaaagagcaaggaagagctgccaaacactttatttatttatttattttgagacggagtttcactcttgttgcccaggctggagagcagtggtgtgatctcggctcactgcaacctcagcctcccaggttcaagcaattctcctgcctcagtcttccaagtagctgggattacagttgtgtgccaccacacccagctgatttttgtacttttagtagagatggggttttgccacgttgaccaggctggtctcgaactcctgacctcaggtgatctgccctcctctgcctcccaaaatgctgggattacaggcatgagccactgctcccagcccctaaacacttttaaactatcagatcctgtgagaactcacttaccatcatgagagcag

SEQ ID NO: 27481 - DNA, 2300 bp, Homo sapien
aactacctgagactgggtaatttataaagaaaggaggtttaatggactcacagttccacatggctagggagacctcagaaaacttaacaatcatagcagaaagcaaaggagaagcaagcaccttctttccaaggtggcaggagaaagagcaaggaagagctgccaaacactttatttatttatttattttgagacggagtttcactcttgttgcccaggctggagagcagtggtgtgatctcggctcactgcaacctcagcctcccaggttcaagcaattctcctgcctcagtcttccaagtagctgggattacagttgtgtgccaccacacccagctgatttttgtacttttagtagagatggggttttgccacgttgaccaggctggtctcgaactcctgacctcaggtgatctgccctcctctgcctcccaaaatgctgggattacaggcatgagccactgctcccagcccctaaacacttttaaactatcagatcctgtgagaactcacttaccatcatgagagcagcatgagaaaaaccacccccatgacctaatcacctcccaccaggttgctctcttgacacatggggattacaatttgagatgagatttggatggggacacagagccaaacacaatttgagatgagatttggttggggacacagagccaaacacaatttgagatgagatttggttggggacacagagccaaaccatctcattgtgtgtgtgctgttgtgtttttgttctggcacttggagaaaacagcactgtttacctccgtggaaagatccctccaacggtaaactgtggctgtatgcttgggaggtaaggggtacaagattaagtttccatattcatttaactgatcagatttttgtgtttagttttgtttttgtttttcagagacaggctcttgccgtcacccaggctggagcacagtggtgtgatcattcccagatagctgggactaaaggcacataccaccatgcctggctcatcttttttttatttttgtagagacaggatcttgttatgttgcccaggctggtctcggactcctggcctcaagtgatcctcccaccttgacctcccaaagtgatgatattacaggtgtgagccaccacacctagtttctaatcaggtttttttttttttcctaccagttagaaacaatagcttctctcttggggtgatgactttcaattgaaacacattttcatagaataagatttttttcccccaaaagtcagtatttcttaaactcctgttattagaccatgaatatttttctcattgtgaacaaaactccactttgcaacattgcctctgcgtacagtggggagcaagactttataaaactgttgctagctttacgacgtctgcagaattagcagaattcaccatggaggtctgtttgatgttgcagttaaaaatattatccacgaagaagttgaaaaatatgaaaagcagtatcgaggcaaggagcttctgggatttgtcaactacaagacatttgagatcatcgtgcatcagtacatccagcagctggtggagcccgcccttagcatgctccagaaagccatgggtgaggactttcaagcaggactcccaaaccatcactctcataccttccatagaccccagtgccttggagggagagattggaatggagttaccaaaccagcctgcagacacgctcactggtgtgctagattgctactctgtgtggtctgtgagccagcagcactggcaaggcctgagagctggtcagagctaccgattctgcccttctgcctgagaactcgtactgaggtttccaggagatggggaagcacactgagtgccataggcgttccatcgctgtccttcaaacacgtggaggaggcggggaagatggtttctcttgtctttggggggcaggcagagggtgcacatgcacttcatctgtatcacacgcagccaccaacacagccgcgtaaggcagcggtccccagtctttatggcaccagagactgctttcatggaagacaatttttccacagaccagtgaggggtaagaaggatggctccaggatgagtcaactgcattgcatttattgtgccctttatttctattattattacattgtaatatataatgaaataattacacagctcaccaaaatatagaatcctcattatggtgggagccctcagcttgtcttcctgcaactagactgtcccatctagcggtgatgggagacagtgacagatcgtcaggcattagattctcataaggaacacgcaacct

SEQ ID NO: 27482 - DNA, 2300 bp, Homo sapien
accggcttctattatgagaggtgatggcacctttaggcacttatatttcaggtagaaggagcaggaataaagaagagagggccacaatctgaaatatcagttctggatctccctgggggcaagacactggcccttagctgagctattctgtcatcactgtgagccctcatgctcgacctcaccggagcacccctcgatcatgtgctgaatgcctagcacgcgcctggcactgtggggtacagaaatctagagcacagagctgagttttcagggcttagctgtcctcacatctgtgacacaaacaaggatcaaggaaagttttgtttttgttatttttatttttttttaagttggggccttactctgtagcccaagctagagtgcagtggtgcaaacatagctcattgcaccctcgaactcctgggctcaagtcatcctcccaccttggcctccagagtagctggaagcccagctcaaggaaagcattaacatgttctacttttcaccataactcctgtgtattgggaaatggaaaatgagcttttgaagtggcctattcgcttcctccatgagtacttcctgaacactttcctcttggccactgctcccaagaccccctcaaagtctctctcctggacttccagcttctggaatgagccccaagagtggcacttagctccagctcctagtagctcactccttccttgctcacctgtgccccccacctgtctccttaggggcagtggctttgtcttactcatttgcatatcacaaatgtccagcatagaagccagcatggggcccagtaagtgtttgtggagaaagaaagggaagaggtgaagaagggaggagacggagggagaaaaggagggcaagagaggggatgtcatgtcatgtcatgtcatgtcatgtcagttctcccttcctagatctggacaagggaaagaaaagcaagcaagcctgaccgcctcagtgcagaccctctaagatgcaagccttccccaggtaagacagttccgcagggtgcttctgtgggctggctttctgagcagccatctcaaagtatgcgaaagaaatagattttgggccgggcacggtggctcatgcctgtaatcccagcactttaggaggccgaggcgtgtggatcacctgaagtcaggagttcaagaccagcctggccaacatggtgagaccttgtatctactaaaaatacaaaaactagccgggcttggtggcgcatgcctgtagtcccagctactcaggaggctgaggcaggagaatcgcttgaacccaggaggtaaatgttgcagtaagccgagattgccccactgcactccagcctggatgacaagagtgagactccatctcaaaaaaaaaaaaaaaaaaagattttaggggtaaaatattttgctttccttcagtggctgggccacctgtacacaatgcctgaacccaggtcctgcagcccccagcttggctctccaaagctcaccagtatcaaaggatttcagcttctgctcctctccgcagggctctctggtgggccccagacagagatgaaggaaaagtctggccttgaccttgaggaccaaaagcgaccacgtcagacgccagcagtctcgtgcccagttgccaagggatcacctgaggaaggcccttaaaatacaggtggtaatgcaggggtcttgggatggccccggaccgttcatttctaataatttcccaggtgaagccaatgctgctgttccaggaaccaccctttgagaagcacgggtctataccacacgcacagaagaggaaacgaaacgaggcaaaggaaaccagtccctttactcgcgcccaggcaggacaaagcgggcaagggtgggggcgggggcgcgggcgcgggcgcgggcaggcggacggacttgcaggaaatgcagccgggaggatgggcaggttgtgggatgctccgccgttccgcgaccacccgcctccccggcccagcagaaccgggtccaggctgggggaggtgctagcggtgtatgtgagtaacactgccccctcgtcgtggcaccgcccccttcttccctgcccccttccccgccccctggattctgaagtctgaagtcatgcaatttgacttttcctttctggaaaccagcgagcagaaatgaaaccgaaactgaattgtccgggaaattcgcggtgggggcggagagcgcagggagaagtaagcccagtgcaggatcctgaggcccgtgtttgcaggaccagggccggccttccgattccccattcattccagaagcaccgaacca

SEQ ID NO: 27483 - DNA, 2300 bp, Homo sapien
ttcctgcttcagaaagcatcagcccagcctgctcacagtcccccaggatgtgctgttgcctgggttcttgactaggaagtaaaaggcccagaggggttgagtgtgtgtgtgtgtgtgtgtgtgtgtgtgtgtgtgttaaagtgaggtcattgctaattcctgggagaacttgtgttccccttggatgaaccccttggatgaagaaccccttggatggggttgcccagccctaggagtggatcctgcaaagcaaaatagatttcagcacagggagctggctggggggctcctccccctcttgtaggtgcagcagtattgaatttgattccatccaggtttcccctgaccccaggacctaaagctggggcaggttctgggccttgaggttggttgggggtgacccttcctaatcatggaagtctttagcgggggcttgtaagggactgtgagctgagctaaggagaatggaggtggggtgccaaccgctcccaaagggaaatgccatctcccactcacagccagttagccgagaatgggagctcccaaagggaggaccacccatgggtctgcttgactcagccctccccaacccctttcacctttgcagtaaaactctagccaaggaagacaaagagacctttggagaccaaaacagaacttttaattcgggccaacagcaggctcatgcccaaaatggctgccaaccccaacaaagaaagcagctagcttatatgtcgtttgagatgggaaaaacaaggtaggatacaggtttcagacaaagacagtaaattacttaacccgtgacaattctgaggaaactggcaattcagttatattgactagtcatcctccaagctggactagggttggaggctggggtcccgaggcaggtgataagcttttgagataagcttgcatctgcaacttgttacaatgctgggaggggctgcttaaaattttagcctatgtgttacttctaaatagcttatactaaatgttaactgttttcatgtgcgtccatgtgaagagaccaccaaacaggctttgtgtgagcaacatggctgtgtatttcacctgggtgcaggcgggctgagtccgaaaagagagtcagcgaagggagataggggtggggccgttttataggatttgggaaggtaatggaaaattacagtcaaagggggttgttctctggtgggcaggggtgaatctcacaaagtacattctcaagggtggggagaattacaaataaccttcttaagggtggggaagattacaaagtacattgatcagttagggtggggcaggaacaaatcacaatggtggaatgtcatcagttaaggctgtttttacttcttttgtggatcttcagttactttaggccatctggatgtatacctgcaagtcacaggggatgcgatggcctggcctgggatgcgatggcctggcctgacaactattacctatgttatgtttattattttaagctttattattactattttatttattttattttattttccttccacacacccgtttccaccctggagaggccagatgagccagactccagggaggcctagaagtgggcaaggggaaacgggaaaggaggaagatggtatgggtgtgcctggttaggggtgggagtgctggacggagttcgggacaagaggggctctgcagccattggcacacaatgcctgggagtccctgctggtgctgggatcatcccagtgagccctgggagggaactgaagacccccaattaccaatgcatctgttttcaaaaccgacggggggaaggacatgcctaggttcaaggatacgtgcaggcttggatgactccgggccattagggagcctccggagcaccttgatcctcagacgggcctgatgaaacgagcatctgattcagcaggcctgggttcgggcccgagaacctgcgtctcccgcgagttcccgcgaggcaagtgctgcaggtgcggggccaggagctaggtttcgtttctgcgcccggagccgccctcagcacagggtctgtgagtttcatttcttcgcggcgcggggcggggctgggcgcggggtgaaagaggcgaagcgagagcggaggccgcactccagcactgcgcagggaccggtgagtgtcgcttctgggggcagcgcccagtaaccgcgctaggagcgcggagaagggcattgggagagcggcgttcgtggcggagactagcgctccggagcacgggcacgacgggggcaccttctcggctgctagtaactaacaataataataatcataatca

SEQ ID NO: 27484 - DNA, 2300 bp, Homo sapien
tcatgtgcgtccatgtgaagagaccaccaaacaggctttgtgtgagcaacatggctgtgtatttcacctgggtgcaggcgggctgagtccgaaaagagagtcagcgaagggagataggggtggggccgttttataggatttgggaaggtaatggaaaattacagtcaaagggggttgttctctggtgggcaggggtgaatctcacaaagtacattctcaagggtggggagaattacaaataaccttcttaagggtggggaagattacaaagtacattgatcagttagggtggggcaggaacaaatcacaatggtggaatgtcatcagttaaggctgtttttacttcttttgtggatcttcagttactttaggccatctggatgtatacctgcaagtcacaggggatgcgatggcctggcctgggatgcgatggcctggcctgacaactattacctatgttatgtttattattttaagctttattattactattttatttattttattttattttccttccacacacccgtttccaccctggagaggccagatgagccagactccagggaggcctagaagtgggcaaggggaaacgggaaaggaggaagatggtatgggtgtgcctggttaggggtgggagtgctggacggagttcgggacaagaggggctctgcagccattggcacacaatgcctgggagtccctgctggtgctgggatcatcccagtgagccctgggagggaactgaagacccccaattaccaatgcatctgttttcaaaaccgacggggggaaggacatgcctaggttcaaggatacgtgcaggcttggatgactccgggccattagggagcctccggagcaccttgatcctcagacgggcctgatgaaacgagcatctgattcagcaggcctgggttcgggcccgagaacctgcgtctcccgcgagttcccgcgaggcaagtgctgcaggtgcggggccaggagctaggtttcgtttctgcgcccggagccgccctcagcacagggtctgtgagtttcatttcttcgcggcgcggggcggggctgggcgcggggtgaaagaggcgaagcgagagcggaggccgcactccagcactgcgcagggaccggtgagtgtcgcttctgggggcagcgcccagtaaccgcgctaggagcgcggagaagggcattgggagagcggcgttcgtggcggagactagcgctccggagcacgggcacgacgggggcaccttctcggctgctagtaactaacaataataataatcataatcatagcaagggcgctgatgggcgggctcggagcacgcctgattctggttcccaccaggctgcccaggctcctgatgacgcatcagaaacatccccctaacccgcggccttcctgcaggagaggttgggaaggggtgggggacggggctcgggggaggtctccgagggactctagtaagcggggaagggcgccgggaaagtttcagatccacggctgcgcgggccacgagcccacccgaacgccgaccactgctttccgtcgacttctatttcctgggaacgcgcgaaagcaaacccaagtcagactgcggaggtcgctggggagggaaggttcaaggagttctcgccgatcctgctgaataaagggggttccgagctgggccgagatggggcatgcgcgggaagacccctgcccgctgttcccccccaccgccccagtggatgccatgcctggggcctccccggcgcgtggggctgacgcaccctcggggtccatcgtagttggccgggatcgtggagtgggtgcggtggacgaagggaggcaggacagtcccgggggtggcagaaggagcccgggcacagctgagacctgcgctcccatcccaccaacactcacagcaggtgctgccgagctgggcaattgggatggcccaagttatttggttaaattttaaatcacgtttgttactgggaagtagagtccagtgatgctaaccgcgcctctacctccaccaccggtgtcagtcccaaagggctcctaaaatggctgtgtcatctttcagccttggaccgcagttgccggccaggaatcccagtgtcacggtggacacgcctccctcgcgcccttgccgcccacctgctcacccagctcaggggctttggtaggtagcagtgcatttggtctaaagggcaagatgttctctcttttattcataacaaatttaaataccagcagggtttggggggaaaaacgctttcagaagaaaaggtgaatgtcagtcctgcaagag

SEQ ID NO: 27485 - DNA, 2300 bp, Homo sapien
cataagtaccgtttacaatggattaccttttataaccatcccaatcctacctgacaaaagaggtgggcagattacgaggtcaggaaattgagaccatcctggctaacactgtgagaccccatctctactaaataaatacaaaaaattagccgggtctggtggcgtgcacctgtagtcccagctacttgggagcctgaggcaggataatcgcttgaacccgggaggtggaggttgcagtgagccaagattgcgccactgctctccagcctggtgacaaagcgagactgtctcaaaaaaaaaaaaaaaaagaaagaaatacatccctttcttcccttccaaatcgagcaaggatgcctgccctggaagtgtataaacccggggaagggagacagaaaaggatagttttaagtattggtgttggggacgtgttctttagccaaggcagcatgaacccatggcagcacttcccaaccttcctgacatgggcgtttctgtgaactccagtgtgatggagaaatggcattggctcaggtgtgcagctagatatgttacagagcagggtgacaggcaggggtgatgagttttgttttaacaacctgtcccttcaaccctcatggtactgacaaagatcacatggctctcgggggagattcctgcgaggggaagcaaggagagcatccttacatattattgatccaggcagcagatttgcagcaaagctctgtgctttattcatctgttaaaatagttaaaatagtcaaaacataggaaaaggattctgggaagtcagaatcggcttcagagcacacccctcctgcacttgcccggttctcagacttgggaatgggactgggtgggtgggtactctcgggtgttccgcgggtttgggtcttacttgtacactttgcttgatttcaaggaggtgcaggagaacagctctgtgataccatttaacttgttgacattacttttatttgaaggaacgtatattagaggtaagttggtgcatgctattttctgtaacatttattttgagtcataggagaaagattttcagttacttttatccaagattattagacactgtaaaatttcatatttaggcacttgtcctacaacattttaaaaatgaatttcaaatacatacgtgtgtatttgtaatgcagacaagtataaggcagtcagttacatgctttcaagagtaaaatgaatgacatttcatttcccccatttgtgggagtaaaagaatgacaatatgaaattgatgatcaaaagaaagagcataaaagatttagagctcacgtgttttttaaactaaaggtttgggtatcaaattaccgtaatatttggattctcttggctacattggaaacagttctataacaattttatttttaaatgtaaagtttttgtttgttgttgtttttaagacggggtctcgctctgtcgcccaggctggagtgcagtggtgcgatctcggctcactgcaaccttcacctcccaggttcaagtgattctcctgcctcagcctcccaagtagctgggactacaaacacacaccaccacttccagctaatttttgtatatttagtagagatggggtttcactatgttggccaagctcgcttcgaactcctgacctcaggtgatccactcaccttggtctcccaaagtgctgggtgggatacaggcgtgagctactgtgcccagcctttaaatgtaaactttttaattgtattacaactgcatcagaagttgtatactttgcaactattcaaatttatactgaaaacgtttttgaagttcaacctaaaattatgacaggagatagttttagaaaatattttggggaacagaggcatattctattttttttttttgagacagagtcttgctctgttgcccagactggggtgcagtggcgtgatctcagctgactgcatcctctgcctgccaggttcaagcaattctttgcctcagcctcctgagtagttgggattacaggtgcccgccaccatgcctggctaatttttttgtatttttagtagagacaagttttaccatcttggccagggtggtattgaactcctgacctcatgatctacctgcctcagcctcccaaagtgctgagattacaggcgtgagccccggggcccggcctggagggatattcttgaagcgccttgagcagggaggcagcgtttgtctttatctgaccttggcttctttgggtcactctgtttctctttccgtgaataaaaagccagtgagcacacactgtgtcccaggcactcttctac

SEQ ID NO: 27486 - DNA, 2300 bp, Homo sapien
cgaggctaccaactgtattcatgcatttggtaaggctgtggttctttctcagtcagggcccattttgctccctggaacttgtggccaggtctagagacatcttggttgtcacaactcagggtgaatagtgaatagaggccaggtatttggctaaacctcctacaatgtgtagggtagcccctgcaacaaacaatcttctaaccccaaatatgaatagcttcttgtcctgttataaagaagctattctagtaaaaacgtctgtctatgatgaagcatgcacaaaaatagtcattagaaagaggtaaaagacaaaatgattttctcatattttcttcctgaacctcaatcagcccactttaggaaaattgcacccagctgctggtaggtaggcaggaccgagtgtgaagtctgctgctttctctgtttttatgcaagtacttcactattttgattactttagttttatagtaattatggaaattaggtaatgctagtcctctgactttgttcttctttttcaaagtcattttgactaagaatatttagatcatttctatttaatgtgactggtaatataattagatttgagaatatcatcttgctatttgttttctatttgtcccgtctgttcttcgttccccctttcgtctttttctgccttctcttggattattttttatgattccatcatgtctcctttgttgtcttattaagtataactcttggtgtttttagtatatatctttaacttaataagtcaaccttcaagtgatagtctgtcacttcatgtatagtgcgagaaccttagaatagtgtatttccatctctctgctctgagccttcatactatttctatcatgcatcttttacatacatcataaaccccacaatacattgttattattgatgttcaaacattcaattatcttttaaataaagatagcaaaggaatacaaaaaagtgtagtagttaccccttctagtatagactcctttgtatagatccagatttccattcagtatcattttccttctacctaaagaacttctttaacatttcctgtagtgcaggtctgctggtaatgaattagttaagcttttgaatggctaaaaaagtctttgttttgccttcatttttaaaagttatttttgctgggtatagaattctagattgatggtgtttttcagtactttaaaaatactgcttcactgtcttctcgcttgttattgcttctgataagattgacagcagatttctcatttgtgtccctctgctcacactgtatcattctctggctgctcctaacattttctctttattactggttttgagcaatttgaccctcttatggcttgatgatgtttatgtttgctgtgcttaatgtctgttgagtttctgggatctttgggtttatggttttcattaagtttgagggaattgtatgtattatttcttcaaatatttttttctgtctctcttccattctcttttggggattccagtaacctgtgtattagacttattgaagttggccgtctttaatggagtgtattggttcattctcacactgctataaagaactgcctgaaactaggtaatttataaagaaaagaggtttaattgactcacagtccacatggctggggaggcctcaggaaacttacaatcatggaggaaggcatctcttcacaaggtggcaggagagagaatgactgaaggaggaacttgccaaacacttataaaaccatcagacctcatgaaaactcactatcatgagaacagcatgggggaaacctcccccacaatccaattacctccacctggtctctcccttgacacgtagggattatggggattacaattcgagatgagatttgggtagggacacagaaccaaaccatatcatgagcatgatttgcaggccatgaagaattctccatttttgtttcctccaggtggctgagaacaacctgtgcagccagtatgaggagaaggtgcgcccctgcatcgacctcattgactccctgcgggctctaggtgtggagcaggacctggccctgccagccatcgccgtcatcggggaccagagctcgggcaagagctccgtgttggaggcactgtcaggagttgcccttcccagaggcagcggtaagaacttacattctgtgttagtctgctcaggctgccataacaaaataccacagacagggtggcttatacaacaaaagtttattttctcacagttctggagactggaagtccaaaatcagggtttagcttctcctgaggcctttctccat

SEQ ID NO: 27487 - DNA, 2300 bp, Homo sapien
tatgctaagcatgaagcacttcattagtattaactcatggaatgccctggaggtaggtgttactattatctgcatttgcagatggggaaactgaggcacagaaccttcaatagcttcctccaggtcatggagagtgagtggctgagcctgagtttggatctagagtctagtctcagaggtcaggggctgaaccgctgcccagtgctgcctgctgctgtttgagcacctgctttgtgccagcaactgggaaatattcttctgtggccatgtcacagacagtggacactggtctggccaggtccgaagcccagagcctcctccaggttcttgttccctcattgggaacatggtcttgtggacggataatcttgaaccccgtttcttaaaatattctttggtcatttaaagccaagcgggaaggggtggaaaaaagccctttatttgctcaggaaggtgcatgttaaagaaaaaaaaatcgtccaatgagacttgttaaaatggtgaagcgaactttattcaggaccacggaggcaggtacagggaccacagccagcagattttgcagtgggaagaagagactgggatccgcttgagtacagtatgggcaagtgggagttaatttataaccaaggatcagggtggggttggtgggtggaaaaatcacaaagagaaaacatcaagggtaagggggattctggctaaaccaaccaaacaggattcttgctgaagacaggctgggtgatcagacatcacctgtggcacggtggaggctgaggaacccgatcagatatccagagtgatcagataccgagggtgggaggttctggctaaactgactgagcaaggttttttgctaaaactggattttacaaggaaatgcacagatggcctagaaggttcaggagcttgatataagtttgatcaagcgaagaatctttgtccatggagagtgatgtcagaatgcggctttactatacagcatttcgtgttgacggcatctctagctattattgttaactgttcacaaaggacaacaagcaaaatggcccacagctttcttttcattactgctaatcttagcagtggtcaaaatggttggctctgaatttctttcttttttgggtttggggtagtaaatggagtgactgtggacatgttttatggattattttaagcgtatgtatctattaaaaattgagagggcccacatggcctgctttaaaaagtcaactgtgagctgtatttggtgctgagccctgaaccacccgctgggcagtgggtggctactggcagtgcctgtggacgttctcggggaaagacggtctgattgcacctgctcttcctcagttcctagtactgtgaggcactctttccccactctcccacaaccctcagcttaacacaactgtggtgattgctttgtccgttttcccatgaggaccctgagatttcaacaaggttcagtaactcacacatcgacacttccagggagctgtgttgccaggaactggcccaggtctttccctcctgggcccatcttgtccttaatctctgctgacattgatgggtttagttaccttgtcgtgtttcttcagtgttttatgccatacagtctcccttgagtagatgttctgtataggggatatcacagcttcctggtgagaactgggttaagtccagcaggatgcctgggcttagtggcactggagttgtgggtggccttgagccccaggcagtcccctgagagcccttcccgatggatgtttgagtcactgagtgtgttccttcttctttctggtcaggctgtcctggccgctgcacttacaattgcaccccatcctcctacccactctgatcccagaggagagtgcttctgctgtaacctctaaggcacaagtgggtcccaaagtccttaaatatggagggatgtggggaagcagtggtgaagatgcaggccaaaggtcagcaggcaacactggtctttgttgtaggtaaccttcatctagagattcttctagttctttccagatttatcttctaaaaactaactggtatggaaatattacagtcctgtaattctttcttctaggtcatattgaacattccagatacctatcattactcgatgctgttgataacagcaagatggctttgaactcagtaagtggttaattattaccttcctggccttttctttgttcccttgtcccttctgttattcccaacattgtttggggtcagcaattgcaagggctatttgtagggaacgccgggccacgctgatgctgttcaaggcaccc

SEQ ID NO: 27488 - DNA, 2300 bp, Homo sapien
atttctcctattgtttctgtttctctggagaaccctgattattaatataaaaggaaaaataaatggtgaatgaacaaccactccaagaggcctgagtctgcggcagcacttactccctggtttctgggtggaattagtaggcaccaaacacactgtcaagacagaaataagtgagttgccgctgaaagacaactgcacctgccctatgtgctggagagggtctttgagggtttcccactggggcagagcgcagggcagtgtgggggatggggagggctggggcatattggggacaatccctgttgtgggtgccaccagcagaccacaaaaggtgccaaaggagggagtgagagggaagggtttactaggaaagtcctgccccacaggaggcttccgggagagcttcccaggaagggagcagtgagccaaggcagcctgggatgggactgaatggggcttttttctgcttccacctcattttaaagcaaatcatgttgatttgtatattatgcaggggaggagaaaacatgcttcccctctacccttctagttcgttcagctagtctacaaattaaattggcatcaaatagatgaacaggagaaaagctgttttaatgtatgtactcacagatgggaatcccacaagaatatgagacttaaagaacaggccaggtgagtgaggggtccagtgcgagggctcacacctgtaatcccagcactttgggaggccaaggcaggtggatcgcttgagcccagattggagaccagtctgggcaacatagggagacccccatctctacaaaaaattaaattagctgggcgtggtggcacacgcctctagtcccagctactcgggaggctgaggtgggaggattacttgtgccctgggaggttgaagctgccatgagccatgattgagccactgcactccaacctgggcaacagagtgagaccccttctgggggaaaaaaaaacacacgaaaaaaaaaaggtgcagcagcccgatgattgaggcttatctgtcactctgagtgacagaaagaaatgggggtttgaggcttctggggagcggtggaggagtgaggggagcgtgaggagaggaggtgtctggtgaacgcaggttgccgtgtgaggcagataaaagtttcccaggtgataaaagttgtccgggaacagctctcttcctggtacagatctgctgactaacaaacatttcctttataggtgcaaatttcctttacaaaagggcattttctcagaggtactctggtgtctgcagttcctcaacataaccagttccaaatcatcaatgtgccaaagaggactatgttggggtagcagattctggtctcctccagtcctacttggggtgatgaattctggtctacggtcctattaaattctggtgaattctgagcccccacaattgcaaacattagaaagaacctctcaagtgcccgggaacagccacgtcttcctggctgaggtgtgtcccaccacttcctcactcccgccctggccggtggtgccgagagacctgggaccatccgggggagcactttccaccggacgctggtgggggccaagaaatgccagcctaggcggactggggagggtcttgggcgtccggcgctgtgtccccgccactcgtgcttgggccagcagtccccaaggcctaccctgggtccttgcccagaggctacagtgggttccccggaggccaagacggggccggccgcctacaggagctcgtgaggtagcagctccgggggctcacccaggactccaggagcgctccccagaatccccttccttaacccaaactcgagccctcgggcagcgctgcgccgcggaccggagaggggcaggttggccgctgtggccgggcccgggaagcgccccagagtcccttatgggtccctccgcagccggggttgagccaggcagggaacccgtcccggacttcccttgggaaacgcctcctcccgccgcccccgcccccgcccgcccagggtgacccgcgacccgcttgggggtgtcgccctggaccctgggacaccgcctcctgagattaaagcgagagccagggcgggccgggccgagtaggcgcgagctaagcaggaggcggaggcggaggcggagggcgaggggcggggagcgccgcctggagcgcggcaggtgagcggcgccggtaccagggtcccggctcggggtccgggctggggaggggaacctgggcgcctgggacccgccgatgccccctgccccgcccggaggtgaaagcgggtgtgaggagcgcg

SEQ ID NO: 27489 - DNA, 2300 bp, Homo sapien
acgcctccatctgtggtctttgcagtggacagtctgtgtgacgcctcctccgtccatggtttttgcagtggacagtctgtgtcatgcctccatccatgtcttccagcaacaccacctcactctgctttacacaatcactccacctccgtgtaatgcccaaccttgtttttcctttattcacctagccttgcttctcccttagctgagagagtcacacaaactccatcttggctctttcaccggcagccccttcctcaaggacttaacttgtgcaagctgactcccagcacatccaagaatgcagttaactgataagatactgtggcgagctagatccgcagttcccaggaatttgtccgaatgataacgcccgaagccccgcgtctatcaccttgtaatagtcttaaagcccctgcacctggaactgtttactttcctgtaaccatttgtccttttaactttttgactacttaacttctgtaaaattgttctaactagacccccctccccttcctaaaccaagatgtaaaagttaatcaagccccttcctcggggccaagagaattttgagcgttagctgtctcttggttgccagctaatagaggactcctaattcatctcaaagtgtggcgtttttctaactcgctcaggtacaacatccccacatgccctgcccccgctttgtatgcacacagcacacacctgtgcacatacaaacatctgctttcacacatggacacactcactgaggtgaagaggcacactcaggcacacacacactcacatttggtacatgcagctcctgaggggcaaggctgagctccttctcaggaacggacacaagactgagggctgggtcactcagatactttgcccctcgggccccacggattgatttaggggtgaactgtgaatccctgggagattccttcctgccacgcattcctgctgatgggaaacaaagcggtctttgagggatgctggaggaggcagcagtttgtgataaagagctgtgagaggagaagcccctttgccacctgccctcctttgtgcattggatgttgtcctcaatggacgtgatgcctggagtccctgcagccatcttgcctccatggggcaagccaggaaaacctcaccgacttaatggcttccctccagcctttccaaagccttgctctggtctcagagagttaggaattctgtcacttaaggcccagagcatcctgctgctcccttcactccagaaccagagccacacggctaacaggcaaagggtcaggaacatagcccgtgttttctgctctcggcacttggtcattctgcatagaatttggctccaaggcctggcctgacaccttcgcaccaaggtgccgtaaatgaaacctttactcctgagacttcctcacctctgcgttcccagggatccacaatcttctatttgtaaaatgattcccggttgtcatggagaccagggcaccgcagtggagctggaatgttaggtggggtccaaggttcagtcctgggggtagggagtggggcaggcagcttcactgggccctttatctgcctgattctcatctttcttacacaatagtctactcattattccttccctaagggccaggacacaggcctgcctggggttacagtccctgtctttacaagtcctctccttctggctcttgggcgtgcctgagctcaaaggagcctccaagcaaacttggcagggggtgtcccccagggcagaggtggggccctggctcagcacccccagaaaccacaaggtgggggcggaggatcctgcacctgaccttcaccttcgtgtggatcagatcagagcagaagttctatttctggaactgtcagacctgctgacctccagtcaatggcagaggcaggaaggcaggcagaaatacaagatgcagctcttgttacacctcctgcacagaccaacctagtctcggctccacacagccactcactctttcactcaacacgtgtttccgagcatcttctatgtgccttttctctatcatcagatgggggcccctgcggtgggcagaataacggccactgcaaagatgccaaatcttatccccagagcttccgcagagatcctgcagatgtgattcgagtcttccagcaacaccacctcactctgctttgcacaatcactccacctccccacatgttgcggagattctcctgggtcagtcggggggtccagtgtcatcctagggtccttatgagagggaggaagggaggcggaggaggagatgcaaggatgaagcgaaggttgg

SEQ ID NO: 27490 - DNA, 2300 bp, Homo sapien
aaaacatgctgtatggggacaggttccactgggctgccttggcagcctgggctgaggggcccaatgctggtgactcacctgccctccctccccttttctctctgccaagcaggagccacctttcttcatggcggccctgcaggccccaggcttggtgttgcgggaagagcctttcatgaacaggtccatgtcgctcttttctctccagcccatgacagaagtggaacacggcctgcacgggtggcaccaaggcggcatcatcaggctcttcccaatgtgaaggaagctttgactccatggtgaaccctttattgggggctgactccaggcccggctatggttgtattttacagaacttgctggagacacctgtcttgctgggctgatggattcagaaccaatgatgggaacggggtcaggtcctccgtccagtgagtgaggagggattccagatgagcctctggaccctcttcctatgcgcagatggcttgtatcctgaagatggaaacagcctgcttcttcaccgtcgagaccctgatggaggaaggtgctccccagtgaggccgagggcccccttttcagacatacagtggcaccttgttcctctgggctgggtctttgcggtaggccagtgttgttgtcgtgggcacctaagttgtgggcactggagggatggaggcctttaggctgcaccaagttacctgcctcggcttctggttcctcaactataaaaccagatggtcagagtagggagcctcgagggtcccgtccaggtctacaggtggataacctgtgcgcagaggccacactgtgagagaagacctggtggaggatgtttcccgtgtcacagctgcaagtaggaagagtgtgaatccctgtgaatcggcagagaagagcaaggggagggttcaggtgtaggtgggggcgggagggaggattagggggaggtggtgtcagtttcccaaggctgctgtaatgaatatccacagacttggaggcttaaacaacacacactgtcttatggttctcaaaatcagaatgctgaaatgggtcttgcggggtaaaatctgtgaacagtcatttcttccctctccaggccctgatgggggaaggggctcctgggccagtgtcagcagggccgggttcttctggaggctcaggggagaagctgccttcctgtcttttcagcttccagaggccgcctgcacgcctcagggtccccgcagcagaccacatcactccaaccttcgcttcatccttgcatctcctcctccgcctcccttcctccctctcataaggaccctaggatgacactggaccccccgactgacccaggagaatctccgcaacatgtggggaggtggagtgattgtgcaaagcagagtgaggtggtgttgctggaagactcgaatcacatctgcaggatctctgcggaagctctggggataagatttggcatctttgcagtggccgttattctgcccaccgcaggggcccccatctgatgatagagaaaaggcacatagaagatgctcggaaacacgtgttgagtgaaagagtgagtggctgtgtggagccgagactaggttggtctgtgcaggaggtgtaacaagagctgcatcttgtatttctgcctgccttcctgcctctgccattgactggaggtcagcaggtctgacagttccagaaatagaacttctgctctgatctgatccacacgaaggtgaaggtcaggtgcaggatcctccgcccccaccttgtggtttctgggggtgctgagccagggccccacctctgccctgggggacaccccctgccaagtttgcttggaggctcctttgagctcaggcacgcccaagagccagaaggagaggacttgtaaagacagggactgtaaccccaggcaggcctgtgtcctggcccttagggaaggaataatgagtagactattgtgtaagaaagatgagaatcaggcagataaagggcccagtgaagctgcctgccccactccctacccccaggactgaaccttggaccccacctaacattccagctccactgcggtgccctggtctccatgacaaccgggaatcattttacaaatagaagattgtggatccctgggaacgcagaggtgaggaagtctcaggagtaaaggtttcatttacggcaccttggtgcgaaggtgtcaggccaggccttggagccaaattctatgcagaatgaccaagtgccgagagcagaaaacacgggctatgttcctgaccctttgcctgttagccgtgtggctctggttctgg

SEQ ID NO: 27491 - DNA, 2300 bp, Homo sapien
tgcaggcacttcatgaggttaattaatgttgtcccatgaaacctcaggacagccacctcccaacttgccctattattcatttcatctttttctttaaatcgttccacttttctttggccctaaaatgtatttaaaacgaaactaaattacttttatacttggaaattctaacctcaccagcctgggaccaatgactgttaacataaatagcagctgcgctcccggaatcccagagggtctggaactcgaattcacaattcctggaaaggtgtttgttttcgttttaccagttgtcatgtgaatcggtaaagcacttcaaagtccgcagaggagccggataccaaaccaggttcctgccgccgagcccgtgatctttggacccgatctgctcacagctgggagctggctcttttggtctccagggggctctggtcttcagtcccaggcaccaggcactgagctagcagcagacactccataaatatttgtcaaatgaagcacacagatgattaaataaatgaaattggagcgttttattacttgcgtggtgtgggctcttagtcacccccagctgcggagctgtgtgccggagactgtagatggagaaaggtactttgctagagctgagccccgggaacaggacaggtgactcactttcaagtccattcatttttttcccaccaaaataataactatgtttacttccaaggtatcttcgtagattcaaaactccaattattttttaaaacattagtccaaatgtaagttacatttgtgacaagcttaaaacaactatttgccactccagccttaaggagaccaactttaatttccggagtatgtgggaaaggaagtggctccctggtccccccaggaggccccccgagcaagcatcgtcatgttgggatgtgtgagttccctccaaagagcggccggatgggagtggggaggcagtggggagacgcggctccccgctacaggctatgaaagaaggtccgcgcccgtttggaagggggagcctggagacactaggtctgcggctttcaatgcgctgacttggggcagcctctctctttccgagttactaacacaaaaacacagttaatgtcgttaaaataccctctcctttagctccgccctcctgtcttcattattaatctcctgtggccaaaaataagccttcactcaccgttgcgtctcaggaatgagtgagtgttttctgaggtgtggacgcgtgcgtgatctgtgatgcacttcggcctctaacccaaatatccttccaaggctgggaattttttttccccatatgtgaaaaaaaaatctttccttttcaaaccatctgttctacctgtaaaaagaggctgttatttaggaaaggatgagggaactcttgcatttgaaatggactttagatttgctgttgggtaattttttaaaaaaagttactttctgagaggaaactcgtgtaaaaaagcaagacgtgaacctgcagggaattagactaacgagtgaagaaagccaatttcaaaaaattaggcgctgtatgattcctgtatctaaacataacatttctgaaataaaacaattttagaaatagaggaaagattagtgatgccagggctccggggtgcggctgtaaaatcgccacaggagtggccaggtgggggtggatacgggaaggtacacagatgattacattgtgtaaaactaatacatgcaaaggaagacgagtaaaacggcaaaactgaataagatcggtgactgtatcaaagtcaatatcctggttgtgagattggacttttttttttggcaaagttttgcaaagtggtaacactgggggaaactaggcaaagtgaatgatttcttacaactgcatgtgactccgcaattaaggaaaaaaaaaaagcaaagaaaagcagggcagctgatgcgcacgtcgagacccgtgagaagcgtgagaagctctgctcacccaggggagagcgcagtgacccgcagcgtctattcatccgtccgcagtcaccgggcgctggcagagagggcgcccggggggcgggtaagtgggcggggcctgggggcgggacgacctacggaagtgacgtaacagggcggagcgcgcacctgggcacctgggcagccgccgcggcgctggctagacgtgcgcgatggagggcgacggcgggaccccatgggccctggcgctgctgcgcaccttcgacgcgggcgagttcacgggctgggagaaggtgggctcgggcggcttcgggcaggtgtacaaggtgcgccatgtccactggaag

SEQ ID NO: 27492 - DNA, 2300 bp, Homo sapien
aagccttgccctcttggccgttgaagtgtggtgggagagacatgagatcagtcacacacaggcatggctacacgggtgacggtgctgtgaaggaaatcgcagagcgcttttagaaagcatgccacgctgtggacaggtggatcagggagaccctccctgaagaagtgacgttaagctaagactgaggagtgagcaggcatggcagagagggctggggagtgaggagtgagcaggggagtgaggagtgagccggggagtggggagtggggactgaggagtgagcaggcatggcagagagggctggggagtgaggagtgagcaggggagtgggaacttgcagagagggctggggagtgaggactgagcaggggagtggggagtggggactgaggagtgagcgggcattgcagagagggctggggagagggccagccttggggggcgagcatgtggaaaggcccagaggcaggacccagcttggcgttccgggaagcgtggctggagagggtgggggtggggaggtgaggtgagaaggctgctgagaaaggcagtgcctggtcatgtgcaggagtttgggttttgttcctgggacagtgggaagccagtgaagcttcaggctggcaagcgatgtgattggatttatgttctagaagaactgctctgcagtgtggaaaatgggttggcggcccaggcagaggaggaagagttatctggagaccctttgcagccttacaggtgggagaaagtgggatgtggccaagggaggtagtaaggggggctgcaggtagtgggtgatgggcgggtgtcagagggaggcgagagaggtcacagcggttccaggtctctctgacaactgcgtcctaagatgtaggaggtgggggcagagagactttgtcaggagcatccagatgtttttactttttgacatgttggtttttgggttgcctgttgccttctgaatgaagatgcaaatgattttccttttatagattgtgtttttggtgacaagcctaaaaactgtggcttgccctagagcccaaagattttctctgtttttctaagttctattattatttaatattttatgttttaagactgtgatccattttgagttaattttctagtaagatatgaagttatagttcatttctttgaatgaactgtggatgcccagttgttcctgcactaactgctgaaatggttgcccttcctcgcttggattttaaaatccaatccgcttttgtctttgtaaaaaaatgcaggccaggcgcggtggctgacacctgtaatcccagcactttgggaggccgaggtgggcagatcacgaggtcaagagatcgaggccctcctggccaacatggtgaaaccccgtctctgctaaaaatacaaaaattagctgggtgtggtggcacgtgcctgtaatcccagctactcgggaggctgaggcaggagaatcgcttgaacttgggaggcggaggttgccgtgagctgagatcgcgccactgcactccagcctgggcgacagagcaagactccatctcaaaaaaaaaaaaaatgctttgggcatgtttgtttaggtctatttctgggttgtctgttttgttccattgatttctgtccaccttctcaccggtatcaaagtttttatgatggtagcttgataattaagtttgaagtcaggtagactgagtctgtcacttcagccttctttttcaaagttgtttttaacaggtgtcttcacggagcgttccgtgtaaggaacctgaagtcaccccccatttgcctgaagtcaccccccatttcccgtttaccaccaggttagatgcagatggtcctggtctgagcttaattgacatttctgataagtttggtttcctgatattattactgtggtcttactgtgatggcaggtgtgtttagttagtttttgtagtagtagtcatataaattgtaaagagatttttcaggcagagcagtggttctcagacttgagctgcatccgaaccacgtggagggttttgcaaacagagtgcagggccctctgccaagcctgattcatcaggtctgggggtgggaggcaaggatgtgcatttctgaaatgttcccaagcagtgctggcactgctggttcctggtccagggaccacattttgaaatcactaatgtaaggtaagtcttcccaggattggtggttgagatagggggacctcacactttttttttttttttctttttgaggtggagtctcactcggtcgcccaggctggagtgcaggggcgtgatctcagctcactgcaacct

SEQ ID NO: 27493 - DNA, 2300 bp, Homo sapien
aaatttaacattgatccaatactattatccggtatcactgttcacgttcagattttccattttcctcaataacaacctttatagttgttttttctttctttctgcccatttttcaaagttgtatattgcattaattgttaataatgaaaatttgacactttaagataaaacttttttttttcttttaacattttggagatgaatctgccttaagaggtattatttctagattgttctgaaggattatagtggacacattgacaatcctcttgaagacgagatatgacgattattgtgtaagtgaattccagccgtgggctgtatgtagtaataggagaaatggcctgggggaggttgaagtctttggtttactttcagttattcgcacttgctgtggacctgtcacttttttagtgtaaacaaccttttattcacatatgccgaggactgtttcatgtcctgaggcccacagaaccagtcatctggccattttggaactgtgagtgatgtcactggaggtgcgtgtatagagggaatgtccattagctgtagtggtggtggtgggagtggggttgggcggagacctgaatacagagaaggttgtggaaaacctgggaagtgtttgaagatagagtacagaaggccttgggaacaggcttcagggacaggaggctggagggaggcatgaagtcgcaggtggggacaagcagggagacagtggacgccggggatgctccagaaaggtctggggggccatgggatggcctactatagtgcaacatggaagccactgtagaatgctgggccaggcagagaaaccagccttcacagatcaacacttgcctaatctgtctccggctgcccggcgttgcagcctatggatgtgcccaggtgcatccaacacttcccatgggatggcacgtagtatgtaagcaaatgtgatgatcacatatgccattcatacaagcgagtccgtctctggcaccattcctgcatgtgggtcaaaggctatgtgcatttagaatttttatggatatccacaaatatctgaatggaaactacgctaatttattctcctacccgtaaaggagcttgtttctctagtttcttcaaaattatgctattaaaacttttttttgtttgtttttgtttgagacagggtctcactctgttgcccaggctggagtgcagtgacacgatcacagctcactgcagcctcaaactgtgggactcaagtgaccctcctgcctcagcctcctgagtagctgagactacgggcacgtgccaccgagcccagctaagttttttagagacaaggtctggctatgttgcccaggttgtattaaacgttttaaaaaatctttgctaatctaataaaaatgatcccactgcgactttttttctcttattgcagcgtagttgaatagcttctcatatgcttaagaaccattgaatttcctacgaactgtccatccacacactttgctcatttttctatatacatatatatttttattggttcacaagagtttcacgtacatgagggaaacgagcccttttgtggcatcaatttaaaatcattttccccggttcatcacttctctttatgaatgtaggtttttgccaggcagcaatgaacaagacagtcggcctctctgaatatgggcggccaggactaaggtgaaaagtctgtcccttctccgtctcacgttttgtgatggcacacacacttggtggagggggtcaagagaggccacacaggcccccggggaagaatggagagccaggtccgcggctggcccggtgctcaccggtagcgtggcggagcccgccaggccagactcccctcgcgggcacagagctcgtgtcccagggccccgccggccaaatccagaggtcaccgtgagtgggggcaagtcccaggcctgttctagagaaaaactcgacccacccaccgccaccactccccaactccgcaagaaacgcgtccgaggagaggtggagagggagctgcccgcgcgcgtgggcggcagggccgtgccacgtgggaggggggccgcgcgcggaattccctccggccagacccgccccgcgcgcgcccgctgccccgtccacgccgcccgcgccccgcagtcccacccgcaggacccccggccgcgccagggtctcgcctgcgccccccgcgcccgcccgcggactacaagtcccgccatgccccgccgccgccccccggcttccggtgctgcgcagtttccggagcggatcgcaacccggagtccggatccgatcccgctctgcac

SEQ ID NO: 27494 - DNA, 2300 bp, Homo sapien
gtctagccagctgtcagcttgggcaagttacttaacctctctgtgcctcagtttcttaacctgtaaagctgaaatagatcatgccccatggagttgtttcagagagtatatgagtcactacatataaaactatttgaaaaattcttggcacatattgagtgtgcaattattattagctattgttgtgatctcaagtctttctctaactttatttattttattgagatggagtctcactctgttgtccaggctggagtgtgtgatctcagctcactgcaacctccgcctcccaggttcaagcgattctcctgcctcagcctcccaagtagctgggattacaggcatgcgccaccaggcccagctaatttttgtatttttggtagagacagggtttcaccgtgttggccagactggtcttgaactcctgacctcaggtgttccgcccgccttggcctcccaaagtgctggaattacaggcgtgagccaccgcgcccggcctattatataaaagctatgcttgctaccgagctagactataaattaatacatcccctgggcttagtccagtgcttcacctggtacagcaatgatgatcaccagctgataacccttctattaaggtgcccaacgtacctgcacgtccaactttataaatatcgatgacattaatatagacctataaatacataggcaactagttttgaatgcctgttacagcagggcgtgactcgcagtttccactgtggacagtcacagtgtggagctggggaaggccagtggaggaaagctgtttctaggtcatgattgggaaggagggcctggccttggcagctttctctctagggggatcactgtgctatgtcagccatcctggtgtctagccccctttggtgagtgatctgcattttaaaaataaactttattgacatatacacacatcaccctgtctttgtaggggtgctaaggtcaaaacagcatgtggtcatcccctccagtgtcctgctcagtccccagcaccaggtcctgggcgatggagggtgaggtgggtggaagcaaagctgctgtctgtgctcacgtaagggtcatcagctgacctttgtccttgctctgctaggtgggcagtgactgtacgaagccccgggggatacaggaaatgagagcaatgcaggacagtgaagcctgagagccggaggcctggaccgtgccgctgcaagcacgccaattccgcagcctgcagagaagctccttcgtggggaaggcagggcttgagttgggttagaccattcgaagagtgagtgtgaactgctgggcacgaggatgcacactccagaatgaccgagggtggttgagttggattaatttgggcagtggagacgcattggcaaacagtgctcatctggaggtgatcagcttaggaaagttggtaaattaggacaagcttggcctccagcaactcaatccagcctcctcctggagcatcagcacaaagtgggtccctctggccacacagaggaagcaacagttcaatcactgggtcctgaaccacttctaactccaaacaagaggcactgccatcaccaccttgtggtgcccaggaaatggagcagaaaacctggaacccagctgggaagcatcgggctccctctaagggtctacacggtgtctagcgagcgggcgggacagctgagaggaggggtgggcagtgtggggacaggaggctgggcctgtccagtagctttctccaggacaccagctctccacgtgctctgctgtctgggcaccgcagggggaatgaagactgagggagaccacgggaactgatgactagaaagaaggcacgatgcctgcatggggcccgcaggacacgtctgtgacccgactcgaccgcctccctcccagaaccaccgtgagccccaggcaagtgccgacgctgttccacctgtggctgagccaggtacctgtcccctctgcatgcacccgggccacccaccggggtggggaatggacagtgaagtccaaggatgacctgatgaaaggggcgctcagagaagaccctgggacttccaggacagaacaggactcgggaaaaacaactcagtgtagtgttctgtgtgcacatttatttctttcaaagattgtttgtgttccagccacatcttctccaaaggaacccacccaagcccgtgtgcaggcttgctgcagggctgtcttcggcgtttaaagtgctactgaggaatacaatcattgtcacgtaagttcatcaccgcactccagcgtcaggccaaacctttccgtggacc

SEQ ID NO: 27495 - DNA, 2300 bp, Homo sapien
atcttttatgcaacaattcttggcatagagaagtagttctgaaccctcttagctccaagagacctcctttttttggaaaacaaaaacaaaaacaaaaccttttaactgtagtaagataaacaacataaaatgtatcgtcttaaccatttctaagtacatagttcaggggcagtaagtacattcacacggttgtgcaaccatcacccccatctatctccagagcttttttcatccctactctactgcctgtatgaatttcactgggtttttccttgtaaaataaactacagaggtttacattgaactcaggatttatacacaagaaagcaacaattagaggtaaagtcactaaaacactaaaatgaacgtgggcctgtatgtgtgtgtgtgtacacatcagtagtttcaatatttgttaggtttttaaagatacaaatattttcttagattgtaaaactctccccataaacataccaaaattgggaagcccttgcccagcctatccagcaataaaatcaagccatttggttacctcctaaagtgagaaagttgttatttctcccagttaactagttttatatcctagttgttagcaagaatcctgaggcgacttccttgattttggagtcccgagaaaactgggatgcccgtgagataagagtcctgagagagaagcctaacgcaggtcggggacctgcacagcatgggggtgctgtttacctggagagaagtcaacttctgatcccattcctgggtccccactccttctggcctcactcaaatttcgttccagcccagcctgatggaatccatgaaatttcgaactttacaaaaacaatgcaaagaacagccacataacctttactcaaactcacgtatccttaacatttgcccagtttcctctactatttgtgctcatgcttggtctctctctccctccccttactcattttcttttacacacacacacacacacaacttgagggtaaattgtatgcatcttggccctttatcctcaattctttagtgtgtattttcccaggaatggagatactctctgctgtgtccacggtacagttgtcagctccctgaatttacattgctgcaattccttagcttatgcccatcttccagtttttgtcactggacgaccccgtgatgtccttcagagcagtgacctttccactccggcacagggccggacattgcctgcctgtcttattgctttagcatcctctgtcctgcagcgtttccacagcctttctttgtcttttatggcatcgacatttttcaaacattctgaaacgtgagcacttccccgtgggctggatgcacgggaggagcgtgttccggctgctgggcgtgtgggcctttccgtcctcacggaagcccgggaaacatcagcggcaccccttgcctgtctcctatcttttcaggtctgctggcgacggcgacagttcctctggacttatttaagaagcagccttctgggccacagagcttcacgctgaccagcgggtctgcctgcggcagctcggtgctgggctcggtcacggcagaggtagggcgaggctgtccgccgcggccgggttccggcttggggcacttacccaaggagcgtcttcacttatgtctgcagagtctcactcctgcctctgtgtgaaataagacctcctccaagaggagatgctgtttcatcgtacgcaggaccagactcgaatagagcacgttctgtccactgtacaattgagttgtctgctggaggagataactgttcaggatgccattttatggacctaccccaaaaaggcctttgaaagttttgcttggttccccagcttctattctgttgccatcattacgtgttgagctggctgtgcgtaaggttgggtctgtgtccattctgggaatatccaggttaattggagatgctaagtgaccttaagggaaggaattatgaattatggttatttcacaagaaggcagtgttacctggctgatcagcctgggcaacttccacaaaaccagaaacaagtaacgcgtcttctctgcagttctcttacatggaacctggtgaattgaaatcctggcccatccctccccctgttcctgctgcaaaaatagaaaaggaccgcacggtgatgccctgtgggactgtggtcactactgtcactgctgtgaagaccaagcctcgcgtcgacgtggggagggcgtccccgctgagctctggtgagacaacaggaacgcagtcgaggaactttctgcatgacgcctgcctgtaaccaccttgcccccacaac

SEQ ID NO: 27496 - DNA, 2300 bp, Homo sapien
acaaaggcatggttttaaatagccagcactaacaagatttcctggctacctaagtggcttttttctgaaatccaccccgctagttcctcagccccactccagcagcaccccctttgagggaattgaagaggtgaagagttggcatcgtggatttgtgaggcgttcatgctctcctacatcccccagatgttttggacaatgtgatgagaaaataacctgcaaagtctgggtcatatttacccaacatttgatgcatgttttggaactgaatgagaccagagaggatcacaaacacaaatgaagaaatgtcatttctgacattgtgtttattatatcaaagcattcatgccattttaagcagctcacacagaaggaacacaattgtatctttgatctgttaacacagttaggaaccaatatgtggattacctctcagcgcagaggcagctgctagagatgggtaaataattgatgctagcggcaggaggcgttcccgcttctctgatgttcctccaaccagagatgcaagagtggtctccatcgactgagctgtctgtgtcaaaacaattaaagtgcacttttccactagaattacctaatttttttcctagaattaccagacaaggaaggcaggttggagacagttatgaagtagaagtcatcgtttttctcttaccctgcttctagcatgaggtgagagtccacttactcagatagtctgaagtcgttcttcccttttgtttaggagtggggaaggaatggagatctgcaaagttaagatttttgctttggacggagcatctagctgaagaataaaggatgcaatattagctttctatggctgtggaaacaaatgaccctgaacagtttaaaacagcacagattggtgatgccatcgtgaaggaggccaggtgtccggccaggcccaaatccaggagctgtcagggctgcctgccttagcggcagtcacaggggagtctgttcgttgcttttggggttgttggtagaatttcattccatgggattacgggactgagttccattttcttgtggctgtcagtggagggccatttccggctccttgaggcaccccattttttggctcagggtgccttcctccacgtccacacccgcagggatgcctgcagtcctcacgtcacatgccctggcccctcttctcccgtgctcccccactcttcaggactcaggtgtttccactgggctcttcggaaggacccagggtcatctccccatcttgaggtcctctccctgtcgcacctgccaagtctcctgtgccctgtagggtctcacagtcacaagttccagggattagggggtgaacatctttgggggccgctgttctgtctcccaaatggacagggtgggatgaggcatccttagagatggagtccagttagaggctgctgtggcggccccagcaagagacagtaaagatggctttgtgctgcacacaatcttcagggctgtttgagtgtggggcaggggagcccacgcccaggattagaatgaggcgccctgggcccttctctcactcctctttcctttatgccttgcggatactcccagaaggagaaatgcaaagcacagcaaactatttatgttaaatagactgcaaggtttgatggcatctggttgtcgaccaccaatgctgaggttcctctttgaggggtaggttgaggccagagaaggggcaggaagggcagggggtaaagagagtttggggtcctgctctccattttgaaagcacattgtatgccaagtggaaagctaagcagttttctgtgaaaatatgtgaataaatgagcaggtacacacatacatacacacatgcacactgatgcagacatgcgcacacatacacacaggcacacgtgctcacatgcacacttccgcacacgctcaaatacacatgcacatgcacacattcacactcacatgcacacacatgctcatacatgcacacatgagcacacatgctcatatgcacacatgcgcatacacgcacactcacatgcactcatatatgctcacatagacacatgctcacatgcatatatgcacacacacatgctcacacagtcacatgcacacgcacgtgcacattaaggctttggtggaaagagtggccctctaataacttgttttttaatagctggagttccacatgaaggagaagagagaggacctccagattagctggtctttcatcagtgtgccggaaatggccgttaatatccagcccaaagcactgggggaggtcagtccgtaagtttttatga

SEQ ID NO: 27497 - DNA, 2300 bp, Homo sapien
aaacccataactcgccctgggtgtgtgtggtgtgttgtgtgcacgtgtgttctacctgatgctgaaatacgccctgagagctgcgggattggggggtggggggcggtcccctgctctgtccataactcagggggctgcctgtttggtatgggcaccatgatttaaaattgtccacatttgtcactctagctaactgtaaacaggaagctcggctcagttgtcttttttttttttttttttttttttgctttgctttacatgatttgaaattccaggtattccattaacctggaatttatgctaaaatgctaacaggttgtgaaattgttttgaatgagggtctttcctagggcgggtggtggaggttcctcattggagaccccgtcctctgagatccagggcagatactgcccctgaatgcgactcccacgaggccacctgttcgtctggatgatggtgtatggaattctgggccgagccagcctgcaggtgcagcccgactttggcctggaggaaacagagtgaaagacctgtggtggccccgaggtttcgtcggttggtcggaatacagagcatggggcgtaggaggttggtgtggccaagtggcctggccctgtcaggaagcactagctgccagcctggagaagacctacttcccttctgctcttcatgttaaaggaactgtcttgattttgtcttttagtgtaaacttgatgaaagacaacacattcacaaacagatctttctgtgtagaatggccacattaaaccgtgtgatgcattaacaacacctccttgcagtgcagcattactgaaaggctttcttgtttaaagtatgtaacaagaaaagggaggagagtgttgctgggggcggggttggagtcaggttgacgcaggagccccacgtggtggaggcttcccccaaaagaggataaacagcagctcttggggttggccaccatcttgtttccaacccttttcatctcaatcccctgcgagaatttcttataaaaatacatctttggccgggcacagtggctcacacctataatcccagcaaattgggaggccaaggtgggtggatcatgaggtcaggagttcgggaccagcctggccaacatagtgaaaccccgtctctactaaaaatacaaaagttagccaggtgtggtggcacgtgcctgtagtcccaactactcgggaggctgaggcaggagaatcgcttgaatccaggaagcagaggttttggtgagccgagatcctgccaccacactccagcctgggcaacagagtgagactctgtctcaaaaaacaaaaaataaataaatacagttttaagcccggtgcggtggttcccgcctgtaatcccagcactttgagagcctgaggcaggctcaggtcaggagtttgagaccagcctggccaacatggtgaaaccctgtctctactaaaaatacagaaattagctgggcatggtgctgcacactcgtattcccagctacttaggaggctaaggcaggagaattgcttaaacccaggaggcggaggctgcagtgagccaagattgtgccactgcacttcagcttaggggacagagtgagactccatctcaaaaataaataaataaaaatacatctttagccgtttattttgaattagtgggcaaacaggattaaatgttgtagatgttgggataatctttagctctaatggagtttactttttaaattgagtcccagttccagagtagaaatagtattttatatccagttcatactgtcttaaaggatatttacagaggtgagactcgcttgcagagtggggaaagacatctgactaggaaatccagatgattactgaagggtctttgccttccttttatttgggagttctttccttgggtgttacagaatgtgatgaaagtgaaaattattcgagtatctaaaccttttgtatacatttcctcagctgcattgctagtttctttggagacaaaagtaattacatgatttccagttctctagagtgttctaagagaaggagccgaggcagctgtacaggaagcttaattgaaaaggaaagtgaaagggcacagtgagatctgaagactcaggggctctcttgttggtgaacagtagcaaaatctggagtaactgtgcctggaattttttggccccaagtctaaacaaaggaatagtttccagataagcgctgtttgcataggtatgtgactacatgaggtcaaggtgttgaggctggagagagcaccgagaaggtgaatgaaggcctccccgctcagcctgc

SEQ ID NO: 27498 - DNA, 2300 bp, Homo sapien
aagctccgcctcccgggttcactccattttcctgcctcagcctcccgagtagctgggactataggcgaccgccatcacgcccggctgagttttgtgtgtgtgtgtgtttttaatagagacggggtttcaccatgttagccaggatggatagtctcattcttatttccactttctgataacagacctggctcgcaagggtccatccccagctcacctgggcaatccccgtctaatttcacctccctgacagcgtcctatcctgttccccacaaaggctctccgtccagctgctgtgccattccttcctctttcctgaagaaaatccgggcccacggattcagggccagaatcccctctgatggaccatccactggccccgcagcagactcctggctagggaagagaaggccaaatgctcagtctatctaattcctttcaaggtcaagtccccttaatacagctgcagaaaataacaggggaatcacttttttatggtttaggcctgttttaggccccggagaatctcaggctagtatgtttctatggcactccctaaggaccgcgtccactctgcaagaggagggcacaggggcatgtcccacacaccacaccacacacacacacaccataccacatgcaccacactgacacaccacccacacaccacgccacatgcaccgcactcacacattacacatacacacactccacatccatgtaccacacatacacacaccaccgtgttcaccacacacacaaaccacaccacatgcaacgcacttacacaatacatatacacacagcaccacaccacacccatgtgccacacacacacgctcacatcaccctgtgcaccacacacacacgcaccacactgacacaccacatacatacaccacaccacatcacacatacacaccacacacaccacatgcaccacacacacacaccacatgctgtgcacttacacatcacacgtacacacacccatgcaccacaccgacaccacacacgcaccacaccacatgcaccacgcttacacatcacacacacacaccacacacacacaccacacacactgcacttatacatcacacatacacacccatgcaccaccatacacactcgcaccatcctgtgcaccacacaccacacacatacaccacatgctgtgcacttacacatcacacgtacacacacccatgcaccacaccgacacaccacacacgcaccacaccacatgcaccacgcttacacatcacacacaccacatgcaccacactggcacgcaacacacataccacaccacatgcaccacgcttacacacacaccacacccatgcaccacacatacacactcacaccatcctgtgcaccacacaccacacccacaacacatcacaccacatgcgccacacacatcacaccacatgcacccccgccccacccgcacactgaatgaatgacacagccacacagaaggcagggcctgggcctggtgctgagcccctccttgcctctgagaagcacgccccctaaggcaggcccagcccctggctccaggggcagccacggatttccagggactttccgaggactgagcctggatcctgtctcgctggcgagcaaatggcagtcctcgaaatcaccctgactgcgcgctgtgcacacgcacactcacacatgtgcacacacacgcacttgtgcaagcgcgcacacgagccaagccaagcagccgcacagcagccgccggggttgggctgatgaatccggaggcccgggtcacctcgcggcccgcgggcaggcgccggaggggcgggcgacgcgcgcacgtggcggggccgggaaggccgggcctttaggggggcgggggcacgccgcgttgggagcaggggggaggactgcggcccccgcaggcccggccgcgccccctccctcgggcaccgcccccgccccgccccgccccgcggccagagcctcctccggccaccgctgggccgcgggcgggacgcccggggcggcgcgcgcaggaggaagcgcggcccgcagcggcccaggaacttcccagacgccgagtcgggagcgcgggccgcggggtccgctcgcgcccctgttccgcaggtgtgcggggcttgcgcccagcccgggccgcggccgccgcgcgtttcctccccgcttgcccgcccagaggcccccggccacgctcctcgccgggctccgaccccgccgcgccccctccacgcccccagcgcgctgtggccgcagccagcgcgtgtcctgagtccgccgttccggcccgg

SEQ ID NO: 27499 - DNA, 2300 bp, Homo sapien
tacatgtttattcactgcctttattgttagtcatttgtgtctccccaagaggactgaaagctatttaaagactgataatctatttaatatcttttggcattatcaatgctcaacatgttatcttccacaacaataaagatttgacttttctgtactcttcactccaattaaatgcacgagtgaaaattatggctgttagttgttttgctgaagtaaagcgtattacatcactgccctgctttggagtactgtactgatttttctattcctaaagaaaatccaaactacagactggcatacaagacttttcatactctggttacaattcatctctccacccttattggacactacttaccatctactctacaaacttgcatatccagcctctgccacccaaaatctctctcttccctctcctttacttggctaacttctttcgaaagatccagttgaaatgtcaccgactctacaaagcttttgtaatttgcccctagccagcagctcagtcatctaaactaccacaatacttcatctctctgtaataacaccacaacttcttcaattaatcttcttttacatgtgtctcccccaagggactccctaaagaaagaacccttgtttgcatgcacgtatccctgatgcccagcacaaggcctggcaagctaggtacagggcaaagagagaaatcatcaaacttgaggctcaagacctggactggctcacctttatttctccagcatccgttacagagccccaaaacgtggcagtattctttgctttttctattagaccttgtgactttaatcactactggacgatgattcccaaatctgtatctctgtttagactcttgaggctccagcctctcaggtacctactgaacggttccatcacagtatatcctcaggtccagcatggtacttaaactccacaactctcgtccctgctcccacatctgtttgtcctcacatattcccgatttactttggtgtgttgccagaccctaaaatttcttctctttcccttatagcctatcactgtgacctggtcaaacctagctcttacatagcttataatctgctctctctacttccattggctttgcggacaactaaaactgtcccttcggctgggcgcagtggctcatgcctgtaatcccagcactttgggagaccaagtggggtggatcacgaggtcaggagatctcaaggccatcctggtcaacaggatgaaaccccgtctctacaaaaaaaaaaaaaaaaaaaaaaaaaattagctgggcgatgtggcggaagcctgtaatcccggctactcaggaggctgaggcaggagaatcgcttgaaccagggaggcggaggttgcaaaaccagggaggcggaggttgcagtgagccaagatcacgccattgtactccagcctggggcaacaagagtgaaactctgtcaaaaaaaaaaaaaaaaaaaaaagaaaaaaagaaaagaaaagaaaaaattgtccctttaattatctcatttccatcgagagaccttcttaacttaaccccaattttgttatttacaatttttccttcagagtgtacacatctaatattcaacagtgtaagttcctcgagggcaggggttatatcttcttcaacttctatttcaacagaatgaagcacattatactttcaataaagtgttaaaaaggaaaaataaacaaaaagttacttttaagtaaaccagcacttcaaattttgactttctttttaacatcaatatttaggggtgcttaaatttaaacttaatgactactagtccttagagatcatcatttactccaagtacacgaggaaagctttaaaagataattttccatgagaaatctttctaaaatggattaacccactttcttgtcttcttaaacaaggtatgaggaccgtaatgtaagctgcttaattgaggactcagggtcatcgtgtgaacaatcgctggactattttgtaacacacgcgtgccctcggaggctcggtgccagggctgtgagcgcttgcacgaaaggaaaaaccccaggccgtgtgaagtctaactttccccgtcctctcggtcaggcaatcccaccggggcacctgtctaaaaacaccccgcctccgaacgcgcgctcttgcggaattctcccgaaccgcagagccctcgtggctgggaccgcatagcaaccgggggcagagtgcgagcccccagcggtgtgctgggatggaaaagcaggagccgctgaggatggactacggggcgtgttcccgaaaagccgggaagagatgt

SEQ ID NO: 27500 - DNA, 2300 bp, Homo sapien
aatgaggcgtaactgaagcaatcactgctgaagcaattggaagcgtgtcacaaatcaaagagagcaactgaaagatgcaacggtttctgccagatttggcagtcaggtcaattccagtgaaatggtgaggccaaaagcctgatcatatagctcaaagcagagacaccaatgtgtatcgtcctgaggaaggttgaaaaaacaaaaaacaaaacaaaacaaaaaaacagctaagcaggtggctagaaagggatcgctcaagggaggctgcttccagcatgcggtaaagccagtactagttttctcacctataaaactaggataacagcacacactcccccagcctaatcacaggggaacctaaaactcaaggttcttttaagacttataatcactgttgccttctaccttcagaacagtcactttgtgcttttccaccatacagttcaaaatacagacactctttaggctgggcatggtggctcacacctgttatccaagcacattgggaggctgaggcgggtggattgcttcagaccaggagtttgaaaccagcctgagcaacatggtgaaactccatctctaccaaaaatacaaaaatcagctaggtgtgacggatgcacctatagtcccagctactgccgaggctgagacgggaggatggcttgagccagggagtggaggctgcagtgagctgagatcatgccactgcactccagcctgggactgacagagactccatctcaggaaaaaaaaaaaaaaatttaaagtgttttaaagttgtaggagaaaatttttaggtgcaagattctttatgtaagactaagagtcctcttaaaattagtcaaactaataatctacaacagagctgttaatttggcaacaaatttttaatttgtatcaatctaatgtctgtctttcacatacttccaaacattacataaattattttacctagtgcatacaactttcaaaaactgtatttggcaattaacagacccctgacaattattaacaggggttttacatcccggagtttgagtgtctgcgggagaaccgtccctgcaggaggcactccccctccacctgcgacccgggctgggagaacgcgcggagggctcccttgagcggtctccgccagcgaggctttcctcccggtcggtgttgacagtgtggcatttctgttatctaatttctggttttgactgaaagcgaagtgagttttctcatcagtggagttgtaatatttctgcaaaaaaaaaaaagatcacagccctccgatgagccgggcactatgcgaagtctccggctgcctgcgggccgctgtggacgccccggcgggggtcaggaccgacccccatctgcgcggcgaacgagcccggacgccctggccgcggccgccgggtccccgcccaggggccaggtggccaggttgcgtcgggaggaggaaatggaagcgctctgagcgactagcgagcggcaggagccgcctcccgcgggctttcctcgcgggccgggagcgtctgccgccgacccgaggaccgcagggccccgctcgccgcccgcgcccgtcagaaagccgcgcgtcgctcccgtcgctgtcggggtcgtcggctcggggagtcgcccgccgtccaccggtgaacgggagcgcgtcctcccctccgagggactaagcgctcgcgccacgcatcccgccgcgccggaagcggggactactggcggcccagctgggcaggaccgcggccgaatgacccggggcgaccccgcagcaagggcgcctccggcaggcggcaaagtcccctgagaatcggcgcgctcctcgccgcgacggactccacccggccggggcgctcagcctcctcgccgtggcccccagcccggccgcctcccctaacggccgccgcaggctcccctcatggaccgagagcgcgggcttgcagcgcggcagcgtccgttcggcgcgcggctccgggcaggcccgccctcccccgtccccctgcgccgcgaggccccccccccgccccgccctccggcgcccggcgcccaatcagagtgccgcgcacgtgacgagcgatgcctgcgatgacctcatccctggtgtgggatgacgtcaaattcaagatggatggaatcacagcggcagcggcggctgcggcgcgcgcgagccgagtgtgagcggaaaggggcccggcgtctgcctcgagactgaagaccggtgagtaactgtcacgcccctagctctaggagaactgcggggctccttgggaggctacagcctccccgcaaaacgcggcctttcc

SEQ ID NO: 27501 - DNA, 2300 bp, Homo sapien
gtgagtcggcttgggctgggaacaaagcagtgcaaactgggagcttaaacaaccgacgttgattccctcacagttctggaggccggaaggtcaagatccaggtgtctggacagagccctcctggcctgtgctggtgtgggcggaggcggtggtccctggtgtgccctggctgcagccgcctcgctccccctccacctctgttgtctcatggtactcccttctccattcatttgcatccaaatgtctctctttttataaggacatattagatttagggcccaccctactccaatttgacctcattttaactacacctgcaaaaatcctgttcccaaatacagtcacattcaccagttcggaggggtaggacttcaacatatctttttgagggacacaatttagcccccaagagactttaaggcttttggaggccatgagcgggtcccactgaggccccaggctggcctgcagcaggcagggccggcaaatgtgtgtggaaggagtggggcagggcagaggccggctctcagataggcagctgaagaaaaacccggcacatccacggggagttcgtgctggtgtcttctctctctcttttcctctcctttcttatatgttgggttcttctcaaatgtgaattttctgtatcagcatccctcctgcctgcccataccctcctcccaccacccaagtctcacttcctgttttcggcctttcgcctgaactgcttcagaagttgaaaccccacagggctgggcctgcccctgcgaggcatgttttttttctggaaggaggaagcggcaacgggttacaggctggaggctgtccctgtgctcagatcccacacacgtccccagcaagccccagcccctgccctgcgggaagtggggtcttgaacactgccccgtggggctctctcaggggcaggtgaggcagcgtcttctcgcgccctcatttccctcaacttatctccagggcaaaatcctatgcagtggcacccagtggccggccctgactttgatcttgggtgctttcttctccacccaaaaggctctgaggtcatctctgtatcagaaaatcagcaagatctgcagcgggacagtggggactgatggccactgtcatcagcatcatggtgagcacttgagctgtggtttcctcaggacaaattggccttccccacgtgaactcgcggcaggcagagaatctaggttgggaccctggactgcacccggtgctgggctcctggccttttccctctccgccctgctaaggctgctgtgccgagccctgggaccatccaacagggagaaaggccttgggacaaaaatgacactttctcaacatcacccactgttgaggttacaagaagcagagagtgtgagaacgtttccaaatgaaagtgggggaaggatcgcaaagaagcaagttagttagggctgtgcccagccagcgccagtgccaacgccgagccgcctctgcaggggaaaccgaagcagatgtggtgagataatacatccaaccctgagtgctactctaacctgccagaggcggagggttctcagtgagatgaaagcattacagatgcgttagatctaagggaggggcctgcagatgcgcagctggcagagaaaccagggaggggctgaactgtcagtcgcgaccaccagggatctgaatcagttcaccgacagccttggggacattcaccttgggctccacaacctgtcagaaatgcccccaagcccaaaggcgtcgagagaatggccaggttgtttcagattgacacatatcctaatgtacaagtcagcccacacaccccacgtgcactgagcgtctcttgttgttcaccccaaataaactctgccggaactggggcgggactcgcaggggcggagaaggggggagacgggcagagggcagaagtggatggtgagaagagccaatggaggggccccgtgagagtgagcaaggctgcacccctaaccgacgtcctggggctactgtacaaacaaagaaccacaggctgggaggctgaacaacagacctgcactctctcgcagctcggaggctgcaggtctgaaatcgaggggctgacagcgctggtttcctctggaggctgcgagggagaaaccgtcccctgcctctcccaggctctggggtgagcccttcctggcatcccgggctcattgtagatggatcactccaatctccatggcttctcagggcttccctccatgcacctcaaatctctctctccttccttttgtaaggatgccagtcattggatttaggttcac

SEQ ID NO: 27502 - DNA, 2300 bp, Homo sapien
aacacagacagaaacacacacacacacacacacacacacacacacacacacaaacagcaggggtatctttcattgtgcctcaataaaacagaggttgaaggagacaccaagctagaaacagactgttaattttgggatttttttctttaatcattttaatataaagagacagcatgttacaatgacattttatggatgattataaattattatgaagtcctcaactggtaaaatgtcttgattttgttcccctgtcttggggtctgtggttaaatcatgacagaccagcagtggagtggagtgtgaagaactgcggcttgaggcttagacaagcctgggtttaatctcttgtttactggctgtgtggcctttctgaacctgttttctcacctatataatagggacaaaggacctatttcatagggcaatcgtgaagatgagagacaacagtgcaccagacgaattttgagttttaacctgtaatattatccctgatttaccttgatattttatagacattcatacattatagtagcaaacattttgagatgatatatacaagataatacaaattcatcttgcattttaaaatgttcagatttacttaaatcataatactttttattcttttagtgttaataaaatttcacttccttgagtattatataatagctttaacatttattcttttcgtatgaaaacgttttttaatgagccaattctgtgtgaagcttttggttttctataaaagctgctgtgttccaaggacacccgttgtacgcagcccctttgctgtgagatcatttccagcctcctttttgtattcttgtcatggcatctgacatttagtcattagccaagcaaatgcagcagttcatcatctcagagattaatctacagagaataaaagaggtagcaacgttggtgcgggagttaggcgagaaggtcccttctggaggaatcgttttgtatctagaacaccagggaattatgctcccgaaccatgcagccaacgtgaatctttgttaattcatctgaatgtttcctcagtaaaatcaacaagatcttcttcatccaatgttaaaaattgggcttcagcagtcaacactaagaagtgagaggcaatcaacggtgcagtatgaaaacatcatgagctagaaagaacttaacatgagatttagaaatctacttcacatataccatgatgactactgaaataaaacattaatcacctgtattcttatcactcctcaaaatgttttcttcctgtcccagggccctttctggagttttctccatgcttatataactgtacagagttgtcactttcatggagatgaaattgcatgcgttgctgttttgacttcacattgttaagtatttgtttgtgctactaaaacttcatggtgagcatttcaacgcccgtgtaatgctgcatccagatgctctgtaataattactctcccactctcctgtggctgtccaattatgtaatttcccactttaagtcataataggtaatgcacatccctgtgaccacagcttcgtgctctcagcccaagctccgggaggagaggactgggtcaaagcacctggacatttttgtgacttttgaagtgcattgtggaaccgtgtgaaggacgcttttctgaacgtgatgttccactttgatttgatgctgttttcttctgccagttcagaacgatagggtaagagaatactccgtgttgatggagagactcagatatgagtctcaaatgtgttttctgcgtaacaacgagatgggatccagcgatgcggtctgggcttttgggtactcacctttcctaaaagatgccatctgcttggagcagaataggctgtgacacgcaggagcccccagggaaacggccatggcaatggtgggtgttaacgagcaggcataagggactgctcccagcggtgcttcctctgaagtcattgccacctgcagcagcacaggggacagaaaggccgtttctccaggtccaggcagctcaggcccctatgagccctggcgtagcagagacccaggcttcttggtagaggcccagagccctgtactgccaccactgccggacgatgctcaggacctcggggctggcactgctggctctggtcagtgctgtgggcccaagccaggccagcggcttcacaggtgaggggtctgggcttggcatgggcagttcttaaggacaggggcttcctggcatgggtctcatgaggacagccccctgtggagacctgggcaggcaaggacgcctctgcttggagaggcgaca

SEQ ID NO: 27503 - DNA, 2300 bp, Homo sapien
agtggagttgttgcacagcagcaactgtagctcagcaggcccctctgtgtgtgtggccctcgaagaaagtggaaatggggccaggcatcaggacaggaagggtctccttagaccagcacctgagcagcatggccaaggcataggcttgtcctgccagtggccctctagggaaccaatgagagtacagaagggccattgctctggggtcagctggccctgcctggtttctgttggtgatggaggtgttgctctggggtcagctggccccgcctggtttctgttggtgatggaggtgttgctctggggtcagctggccccgcctggtttctgttggtgatggaggtgttgctctggggtcagctggccccgcctggtttctattggtgatggaggtgttgctctggggtcagctggccccgcctggtttctgttggtgatggaggtgttgctctggggtcagctggccccacctggcttctgttggtgatggaggtgttgctctggggtcagctggccccgcctggtttctgttggtgatggaggtgttgctctggggtcagctggccccgcctggtttctgttggtgatggaggtgttgctctggggtcagctggcccggcctggtttctgttggtgatggaggtgttgctctggggtcagctggccccgcctggtttctgttggtgatggaggtgttgctctggggtcagctggccccgcctggtttctattggtgatggaggtgttgctctggggtcagctggccccgcctggtttctattggtgatggaggtgttgctctggggtcagctggccctgcctggtttctgttggtgatggaggtgttggttatggtggtattgttttaacactcctgaaagaggaacatgcctgttaacagcacacccgaaaccatcaggccctctctctgcctggccctctgaacggggcaacagaaacgcatcaactctccctgtcatcagtgaaatagcactgggggctgagggagggcccactcaggatggcccagcctgcaggtctatgcagaccccagactctacaatctggggcccttggtttctggaggaggcagacaccctggtttgcggagtccacgctccattctgctgttgtcctggtcttgtaatgcccaaccttgtttttactaaccctgtttttaggcttgtttccacctgaatggactctcccttagctaagagagccagacagactccatcttgcctctttcactggcagccccttcctcaaggacttaacttgtgcaagctgactcccagcacatccaagaatgcagttaactgataagatactgtggcgagctatatccgcagttcccaggaattcgtctgattgataacgcccaaagcctcgtgtctatcaccttgtaatagtcttaaagcccctgcacctggaactgtttacttttctgtaaccatttatctttttaactttttgcctactttatttctgtaaaattgttttaactagacccccactcctctttctaaaccaaagtataaaagaaaatctagccccttcttcggggctgagagaatttttagcgttagccgtctctcggtcgccggctaataaaagactcttaattcgtctcaaagtatggcgttttctctaactcgcctgggtacaacagtctcaggccacaaggatgggtcctgcaggatccccttcgtggcacccaggagctggtggcttctgcactctggaggtcacagcccttatgtctcagtgaccctggccaacaccaagctggagccacacacccccacatccctccacagtgggggtgcaaggcaggaccttctgactgtacagaaactcattgcagatctggtattgactcaaaattagcagccaccacacacacacacacacacacacacacacacacacacacacacacacacacacacacacacacacccctcccctggaagagatcacctgtgtgtcagtaggctgagccctgagtccctgccctatcccaacggctcagaccctggcctggcataaccacacaggtcaccctggtaactggccccaagcatcctacaggaaagcagcttccaaactgcactgaggaactgggaggacttgggggcctctgagcacttagggtggtaggctcggggctccttccagctctttcacgtattggagttcagaataggattttggctacgaaagcatttcactgcagcttttagaaagaaaaggctgctgtagaagagagttcagtgctggctctcacactcagtggt

SEQ ID NO: 27504 - DNA, 2300 bp, Homo sapien
tgggaaaatgggacaatttcccccagatttgtgctcaatgtgggacttggtgctggatgctgtcatcgacttgcaggacattaggcgaatgagaaaaacagaagacaaggtgtgggatgttaggaagcaggacagcacacgcagtgtctaaggaatattctccccagggaactggtctcggctgctccttccagctagaaagccctcagcaggggctggcaagccagtggctgggcgcctctgccacgcctgtgtccgggccgacattgctaatcagtcactgcattttaggtccctacgtggcctcctcctgctgctcaattcagcatcccaggtatccccgacccactcatcagaactggtccacagaaaagactgggggccgatacagcaggactagagctcagcggcccccatcgggcctctctgcagcttctctgggcttccacactgtctcgggctccaggccacaccctctcgggctccaggccactggggaaggaatccctcgaccccgggctgcatcctgacttctgtgggcccaaggaacttggccttcatggacccctgcacccctccacttaacaatctatcaaaaattacattttataatggcatttagatagagatgagtgtaatccaagctagattcattgttttatgtatatttactatccttctattaatttctttcttctgattttaaaataaattgaaatgaaaacatttctgtaggcccctaacattaccataggtcctcagccctgtgcctatggagaattgggctttgccccacccccagattctcgggcagggggtcttcccagagtcggcaggggggtcgacacgtaccctcacaggcccggcctgcgcgggagggggtggcgtccctggtggtacggcactggcaggtgtaggagccctccaggttgatgcaccaggcagccggtgagcagtcgtgttccgcgctgtccacacactcgtcccagtctgccagggggagacacaatcaaaacccatgagaaaacagccaaagagtgatcagaagacagacccatgctggaaggagtccttcctagccgtctttgcagtgaacggccgggagcaggggcattttggggcatccgtccaacactctcatgacaaccttacggcctgcctgtgcccaccttcacattggttggcttatttgggggcaaagattaggaaatgttcattccttaaatattagcacccatgggtgtgcatgtagccctctcttctttattctgtttccacacccaaaacttgaaatgttttctcctctctctttgatgtgccaacattctccaatacttagtgtctcaaccaagaaataggaaagtaactgagccaggggtggggacacagctgagtataacgtgaactttccgcatggggggtgggggtccagcggagtataacaccagctttccacgccgggggtgggggtccagcggagtataacaccagctttccacgccgggggtgggggccagtggagtataacatgagctttccacaccgggggtgggggtccagctgagcataacaccagctttacatgccaggagtgggggtcagcctgagtataacatggacttctctcgtggggggggtgggggtcagcctgagtacaacatgaacttcccacgccgggggtggggtccagcggagtacaacatgaacttcccgcgccatattctagagcacccgggtgtctccacaggtatgtccctcctcctgtgcccaaagacttgtgatgtcatgtcaccggggggcccgcctgaggggaatgaaggtgaggacaaggacaatgtagctcccatggggtggctgagccgaggtcgtcagggccaggccctgctggaggtgacagtgccttctgcgcgtgcttctgtagagctgcgggtggaggtgctcgggaacgaacccacacccggcatgccagagaagttccaattcaggtggaatttaagccacgatgcaggaccagttcagttctgggcaaagaaaaccctgctgctgagtgctctgaggctcgttttgtgggtttttttctgttgtgcttcctgcggtctccacagaagcagcttccctggagaacagcaagctcgtcagctgccacaacagctatgccaccaccctagcatggcctgggggctgccttgccatcagaacactgctggtgccaacccacacctcttcctggggtgctactcaacctccagcctacaggtaactctcctgggggtgctccgggttggggttggagcctaggc

SEQ ID NO: 27505 - DNA, 2300 bp, Homo sapien
gaggatgattgaagctcattataagattgtttgcctttctgagtgctttgaccatgatgggttagcatggaatcaatcatatagcgtgtggtgtgtgactgtgtccaaagagacagagtagaaagcagggcgttcgggggcaggaaccccctgtcctaatggggaagttggaaatgctcacaggaagcagtctggggagaggtagggaggaagaatgaaaggggacatgttctgcagtgccaggagcaaaagagctgttccagagaaggcagcgggaagtggtctccctccccacgaccctgcactcagccccctgccctcggtggctgcaaaccaggagtattaggttctagaagcccttgtgagcccccagcaaattttaagccccatgaggtagggtctctgcctgtgcccccaagtcccaccctcgccccacaggcatctttctgaagccgtttactggtttggggggggaaacaagggctcttctcatatcacagacactcccaggcgtttgtgctgggcttgaaaacacagcagacaggaaaggggcccagaaccaacctgtggcttttactttgtgccacgggccagccctgctgctgggcagactggcaggaggaaccgccttgagacgggcatctgtttcctctcagcgtggggacctcctcacatggcctctttccccgcaggtgcggggctccctgccagccaccatgtgtcagcacatggacgctggtggggtcaggatggaagtcgtcagcgtcaccaacggcagcatcgtggtggagtttcacttgctgataatcgcagatgtggatgtccaggaggtgtcagctgcatttctcaccgccttccagaccgtgcctctgctggaggtgatcagaggcgacaccttcatacagggtacgagaggctgggatggagcctctcccgtgttctggaaccagaggcagccagagggcagccaccacccttcgcttttgaaagatgtcgtgttgtgcccatgtggtccttcttcccccagaattagatgaagatgtgaaatagataggaccctgtctgtccctcttattgtgattataattgtgtaaaggttgaagtgttgaaaacatctttgggtgaacctgcagatccccaggggtgctgctttctttccgggtcgactgccccctcgctgcttgtttccatgggctgagggcagatgcatccctctctgcagccagactctcccccaagcatagttcccaaggagatcccagtaaagataattaacgagaaaagcagggagaaaaagacaattcagattcttttctcctatcatacttgaacataaatgatgaatggcttatagttacatgtatcagaaacaaaagactttttaaaaattggagattcatattaattttttgatttttagaataagaaggacttcctaaagaaaatacgatttttagaggaaaacgatgagatgctgactgcatgcagagataaatcaaaataaaggcaccattttaacgcaaagtaaacaaaaaatttttcaataatttggtgaagtgttagtatcccaaatatatagagagatcatacaaatagataaatattaagaacctgatggataaatgcacgaaagctctacacagacaaggtataaaagaagaaatatgaatgactaacaaagatgtggtaacccaagacatccccattagaatgcattgcactgtttgcccatcaaattgcaaacaaaaggtctctttactgctgacatgaatactggtgaaagtgtagtgaggcaggtgtttgcacagattgctggtggcagaaggatttgctcatgcttcctggaaaccagtttggtgacataaatcaaacgctttcaaagtggccatccacttggattctgaaatatcagctctacgactttgtcctaaggaatttgatctgtttggaccgtagtttaaatacaaagatgttcatcttcagtgttactttaaaagccaaagagttggaaatcaccaatcatccagtaacaaagaaggtgctaagttaccaggtgtccccgccccgggctgttatgcaatgatgagaatagcggtttgtggatttgcatggagctagttggtggcagaggcaagctatgctctcagagcatgcctgcattttaaaaggctggaaggaaatacgtccacatgctaacttgcccctggccacgcttttctggttcttatccatgttctgcagtaaacctgttttgctgtcaacaatcaacccagcatcatggcgaaaggcaaatggcctga

SEQ ID NO: 27506 - DNA, 2300 bp, Homo sapien
ggcatctgtttcctctcagcgtggggacctcctcacatggcctctttccccgcaggtgcggggctccctgccagccaccatgtgtcagcacatggacgctggtggggtcaggatggaagtcgtcagcgtcaccaacggcagcatcgtggtggagtttcacttgctgataatcgcagatgtggatgtccaggaggtgtcagctgcatttctcaccgccttccagaccgtgcctctgctggaggtgatcagaggcgacaccttcatacagggtacgagaggctgggatggagcctctcccgtgttctggaaccagaggcagccagagggcagccaccacccttcgcttttgaaagatgtcgtgttgtgcccatgtggtccttcttcccccagaattagatgaagatgtgaaatagataggaccctgtctgtccctcttattgtgattataattgtgtaaaggttgaagtgttgaaaacatctttgggtgaacctgcagatccccaggggtgctgctttctttccgggtcgactgccccctcgctgcttgtttccatgggctgagggcagatgcatccctctctgcagccagactctcccccaagcatagttcccaaggagatcccagtaaagataattaacgagaaaagcagggagaaaaagacaattcagattcttttctcctatcatacttgaacataaatgatgaatggcttatagttacatgtatcagaaacaaaagactttttaaaaattggagattcatattaattttttgatttttagaataagaaggacttcctaaagaaaatacgatttttagaggaaaacgatgagatgctgactgcatgcagagataaatcaaaataaaggcaccattttaacgcaaagtaaacaaaaaatttttcaataatttggtgaagtgttagtatcccaaatatatagagagatcatacaaatagataaatattaagaacctgatggataaatgcacgaaagctctacacagacaaggtataaaagaagaaatatgaatgactaacaaagatgtggtaacccaagacatccccattagaatgcattgcactgtttgcccatcaaattgcaaacaaaaggtctctttactgctgacatgaatactggtgaaagtgtagtgaggcaggtgtttgcacagattgctggtggcagaaggatttgctcatgcttcctggaaaccagtttggtgacataaatcaaacgctttcaaagtggccatccacttggattctgaaatatcagctctacgactttgtcctaaggaatttgatctgtttggaccgtagtttaaatacaaagatgttcatcttcagtgttactttaaaagccaaagagttggaaatcaccaatcatccagtaacaaagaaggtgctaagttaccaggtgtccccgccccgggctgttatgcaatgatgagaatagcggtttgtggatttgcatggagctagttggtggcagaggcaagctatgctctcagagcatgcctgcattttaaaaggctggaaggaaatacgtccacatgctaacttgcccctggccacgcttttctggttcttatccatgttctgcagtaaacctgttttgctgtcaacaatcaacccagcatcatggcgaaaggcaaatggcctgagggccttctgcccagggttgggcttgcagcctgggtcccttgggctggaccgaggtggatctgggggcctgtgcatctcctggttactcccgggaactgaagggatggccctgctctgcccagatccccctcccagccctgggccagaatcctccttccagaacagcccctgcagacatacttagccattcccagccccagcttcaggaagcctcctgtactttccagaactggtgagcttgactgcagtctgctgtggctggagtttccagctttgtctgtgagatgcactctcccccaaccaggctgctgtgagaccacaagcccccagggatgttcttctgttttgtcttctaaatgttgtgcagattacgatgagtgtgaaaggaaggaggacgactgtgtgccggggacatcctgtcgaaacaccctcgggtctttcacttgtagctgcgagggaggagcccccgacttccctgtggaatattctgagagaccctgtgaaggtaatgtcgtcagagtttcttcttctggaatactgtatcataatcggttttttttaaggacattcacgtgcaaagggcttcttgtccctctgaggtcatatttttatgtcctggggaagtttcctgtgtgt

SEQ ID NO: 27507 - DNA, 2300 bp, Homo sapien
gggacagggcggcctctggcactggatgggtcaaagctgtcagatgaaacccagagtcctggcatggggtgtcaatgtctgggagccgacaaagtgggaaccgggtggacgtcctgagcaggaggctgggacatggaccttggggctgagtaaggagctagccctggggagcagaggccagaaagccccaggggctgagggatgaggtggggaggtggggcataaggtgattccatggtgtggagcctgcttggagcctggagctgggactgagggtggccaggaagctgagggattcacgtggacgcgtcggaggccattgcagagcacaagcttgcctgggaggcacagctcactctgccgagctcattccgccccctcgggggctcttcagatcctccctgggctgaaggagtaacctgcactgtttcaacagctacaaaaccttcctcacccttcagcccctcaaatggcacaacttaagcagaactgcccagaattagttttctccctcaaagcttcttagacggccacctggaggccgagcgttggcagcaggggggtgtctgcaagggggatgggcggtgatcagtggctcctgtggcttctcggcagtttccctggtgagggaggtctggggtgagaggtgcatgtgggccgggccacagcggcatcctcaagcctatgcagggctcttgcagggctgcggggccaagtggaggggctgagggtgcaggacagcctgcctggtgctcagatcgccacccacacagcggcagctccagtggagagacagcgcctcccaggactggggccctgggcagagcctgcagccggcagctccctctgtgtttttctgaaccagaccaatgcttggcttgattattaaatgcagcagggtttggggcatgttgaaagaaaagggaatttgtctctgatgactcacccagtccctgaaatccacaagagctcttgacggtttttgacacttgtcaaaaactaagtttcccagaaagacttatttgtgcagctgccacggaatccccacaggttcaggtgctgcctcctctggtcaatagggaatgagcagaggccgagcccttaggctcttaggcagtttatggttgggagaatcgccaggatctcgatgctgctggggagaggctttagagaagaacccccatccccccagcacctagagccgtggcccacagcagggcgtggggggccggctggggcctgggagctcctcatgctccgctttgtgctcagaacatgacgaacaccgtggtgaggaccacgctgaggaacgacctgtcccaggagggcatcatccaccacctgaagatcctgagccccatctactgcgccttccagaatgacctgctgacatcctccggcttcaccctggagtgggggtaagggagaaatgccccggctgccccacagccacgtgcctccagaccacctgcgctttgagagttctttagggtgtcaaccacttaaggacccttccttgagatggaatatacaaatgggtgtggcctggctgctccccaaattttgttccctcttcccactcagggctagccagagaaggccaaatatgtcccgtggccaatcccatgggatggccccacttccagtgagccactggcaggccgccacccaagcctccatcaggcaccactttttctataatggaccccccaccttccactgagtctccacctatacaactgagggaggcaacccctggaccagccagccctgaataaatggcctccaagtgctctcgtttggggttgagggggtcttctcgttcatttgcacgttcctctggagctgtgttttaggggagaagtgggaatgggaggggccacgataatgcgcctcctgaaacatgcctcctgcaagctgcttcctcttgcagggtttacaccatcatcgaggacctccacggcgctgggaattttgttaccgaaatgcagttgtttatcggagactctcccatacctcagaattatagcgtgtctgccagtgacgatgtcaggatcgaagtggggctctacaggcagaaaagcaacctcaaggtggtcctgacggagtgctgggcaaccccgtctagcaacgcccgggaccccatcaccttcagcttcattaacaacaggtagggctcaggagtgcaggcacccccatccagcaatgcctggggctttattaacaataggtagggctcaagaatgcagacatccccatccagcaatgcccagggcttcattaacaataggtagggctca

SEQ ID NO: 27508 - DNA, 2300 bp, Homo sapien
ctacatagaaattaattcaagatgcatcataaacttaaatctgaaaatgaaaacagtgctgcttctagaagaaagcaaataaatgtattttcatattcttcatttcttcagagatttcttaaagaaaacacacacatactaactataaaagtgattagatttcattaaaactaagaacttctgtcatcaaaaaacaaagacgaaaactgacatcattacaaaattaaatggtcagccgggcgcaggggctcacgcctataatcccaacactttggcaggccgaggcaggtggatcacctgaggtcaggagttcaagaccagcctggccaatatggcaaaaccccatctctactaaaaatacaaaaattagctgggcatggtggagggcacctgtaattccagctacttgggaggctgaggcagtagaattgcttgaacctgggaggcagaggttgcagtgagctgagatcatgccactgcactccagcctgggtgacggagtgagactccgtatcaaaaaaacaaaaacaaaaagcaaaacaaaacctaaatggcaaactacagactgagaaaacatattcaaaatccatctatgtgacagagggcacctatttagaaatattaagcaattctacaaaccaatactaaaatcaaaacaatacaacttaaaaaaaatgaagtggcacatcattaatcagtacagaacagcaaattaaagccttgatgatatgatcatcacattccaatcagagtggctacattttacagaaactgacagtgcaaagtgagggcaagcacgtggagccactggaactctcacattgcaggcaagagtataagtcggtaaaaatttggaaaactggttgatagcatccactagcattaagcacattcttgtcccataacctggcaatttctctggtagatttcactcaacaaaaatgaatgtttgtatccaccaagagacagatacaagaatgctagtggcaactttatttataatagccccaaactgagaacaacccaaatgtccaccaataggagaatgaaaagatactctctcacataaaagagtaaactatggactcaagcactaacgtgcatgaatcacaaaaacatatgaatgaaagaagccagacacaaagtagtaatactgtattccaattatataaagatcaagaataaacaaagctaatctatggtaattgaagccagaataatgtttacctgtagagacagtaattggttaggaaatggaagaggaacatttttacacaatgcaaatggtctatatcaggatctggatggtgaatgtacaggtgcatagacatgtaatattcatcagactttacagaaagatttgtgcactttacttaaaaagcagtccttacaggaaggaaaaaaagggcagcttctggagccacacccacctgttttgactctggaattgggtactttcttgctgtgaccttgagcaagtaaaataatctgtgccttacttccccactgtgaataataacagtgtctggctcatggagctgtgatggggattaagtgagttaatggatagacttctcagcacagagcacctaatacagccttcattccattcgtccttgttaccaggtttctgctaagctcccttccagggctgagatctcagaggcttcaccagctcactttcccccactttgctgcaataatcattggctagaggtattgtgatatgatgtcattaaagttaatctagacgaaaatttgatttacctaaaactattacactgtagacctggaggaatttcagtttttgccgtaattgttttcaatgtgtgttataaaaaataaattccactatgttcacgaatgtacaacttataatctgaccaaaagtgagagatgggtagattttcctacttgggtccttctgtggacaggtactaggtgctgctttacgcccagtgacttgtgagggaacagaactgccctttagtaaccctgctcacttcctgttttctgcagtaacaattacattaggcaatattattacacatggaattgcatcatgctgattttaaaacaatcctccctgtagcattacacagacactgaatcatcatttgtagtttggggggctttacatgcctgcagtggtgaaaactgaaattttgtcccacttaagggagtttcttcttccctttattaattgcaaaataaatatatgtcacttcagagggcagcagctggactacctatgtttgtgggtaagtcactgacaaaatgctttctagtaagaaaatatc

SEQ ID NO: 27509 - DNA, 2300 bp, Homo sapien
gactttttatttggtgccgggaacaatttaagactttgggccctattgagatggaatgaacatatttggcatgtgagaagactgaattctggagggccaggggtggaatgctatggtctgaatgttggggttccccctaaatttatttgttgggacttaatgctcagtgtgattaatactctgatagtactaagaggtgtggcctctggaaggtgattagttcatgaagactttgcctcatgaatagggtggagctctcataagacaggttgaagggcccatctcttcctcttccatcatgtgaggacacagaggcgccatctatgaggaacaggccctcacctgacaccagagatgctggagtttgaccttggacttcccagcttccagtgctatgaacaatacctttctgtagtttacagatttcccagtctacgatatttgttacagcagccagaatagactaagacacacgtacactccctcccttggtcagagaagccaacagggccggggccaggctgaccagaagggagatctccaggcccagcccaaggcaagctcgccacagggatgcgtctcgagcatgagcacctgctgtgttgtcccggcctgggatgacgagggcacggtgttcatccctgtctctccctccctcacatcactcaccactgtcagacaggagagccacaagccctctttcctacttacacttggggcagcatcttctgttcttaactggctgggaacttttatcttcagagtcagagatctgggttgtgaaaagcaggcaagcagacaaacatctctctgcagccttctccccattctcctacccagtttccagaatttgggggaaaaaaatcccataagctgtcatacttcatattgccatcaggcagcagtgggaatggtgcagagaggagctgggcaaaggggcagagggacagctttctttgtttttttgttttcctccatgaaatggggaggtgtcaagtgagcgagatgtccccggccacacagtgaagcacaaggcagccgaagacacagcaggcaggtcaggtctgtgtgcacattggcaggctgcatgcagaccagcctcggcccaggtggagaagcagagggatctgcaggggaaccagggattcagagacctgttgttggggtcctgcagaagatggggcaattcaagtcaccaagccagtctcaccccaatggcctggctggttgcagaaactcaccagggacaaggggtcaccccaccacaggcccacctggacatgtgactcccctgcacccaccctcacaagcaccaagggcaggatcctcacgccagaggccaagtcctcagtgtgcccctttctccccttcatgttcagcctcagcagctggaagtccacagaaataaatcagacacttctaaaatgggacaccatagggaaggccagatggaataagagttctcttcccacagacctagacttccattgactccactcgaagtcaactgggtgatgctgttggctgcaagtcaaggccaacatgggctgtgctaatagatgcagaccctctagagggaaggagcacatcaccctggcctgttctgtcctgatcacactgaataggtgttctttggtggccctgaatttcatgagggacacgaggaactggcacccatcccgagaaggggaaagtgggacaaaagggcgtcttctaggaagccacactggagagactgggggcatctggtccagagaacaagggtctggaaagaatgttgttgccatcattggctggccagggcctactctggggagtgactccatgttgctatggtgtgcagagcagtcagggtgatagggagtccaattggacacaggttcagtttgctaatggtgacaacacttaataatggagtgggttgccagttgaggtagtgatatagtttggctgtgtccccacccaaatctcatcttgaattgtagctcccataattcccacatgttgtaggaaggacctggtcagagatcactgaatcataggggcaggtctttcccatgctattctcatgatagtgaataagtctcatgagatctgatggctttataaaggggagtttccctgcacaagctctctctcttgtctgccgccatgtgagacatgcctttcaccttccgccatgatcatgaggcttccccagccacatggaactgtgagtccgttaaatctctttcctttgtaaattgcccagtctcaggtatgtctttatcggcagcgtgaaaatggactaatacagacag

SEQ ID NO: 27510 - DNA, 2300 bp, Homo sapien
accatccccctggccattcccagcagcccagtaagcactgcctcacacttccagttccggaccagccaggatggccaggctggatgggggccatccaccggctgaagccaattgcctattctcgagctgaaggtgaatcaatcccgcataaatcttcgggcagagaactgggtgggggtagaagagggggaatgtctagaaggaaattctgggcacattcctggaagtgaggaggatggatattggacagaaattatgtcattgcaggcaccctcacttgccctggccacatggacagttcctccccggctgtgttccgtgcctcctctcgtgctccagggcctgtctgttcctggagcgagatgggtcccagggctgggcaccagtccccatctccagccatcaggcactttcctctctgtgttttggcgtaaacactccctaggtttgtggatctgaatcctcttcccaacacactcaagctttgctggcctccctgcagtgtatgtttaaggcaccacacagcctccaaggcctggcacccgggcagtggcacctggtaaacacagcagtcagatttcctcatttcagccaagtgtaaaatcaaggtaatggatctactcttttttttttttttttttttttttttttttgagacggagtctcactctgtcaccccggctggagtgcagtggctcaatctcggctcactgcaagctccgcctcccaggttcatgccattctcctgcctcagcctacatagtagctgggactacaggtgcccgccaccacacctagctaattttttgtatttttagtagagacggggtttcatcatgttagccaggatggtctcgatctcctgacctcccaaagtggtgggattacaggtgtgagccactgcgcccggctggatgactcttgagacaacaccattcagacaaaggcaaggcctcccacttaaactcataaccgtgtctcctttctctccttcgatttgagcggctgaatttggttacagtcatctgacctgtgggtgtgaagtccacctgcctggcataaaaagctgtgcctcctttctaggtgaggagaaagagagagacctggctcatctgaggtgtggttgggaggggggacccaggtgtgctggaaatgaaaagaaatgcattcctgtttttcgtcccaacatgcaaacaactgaacaaaagcattagggcctgagactgggagtaaagaattccttgtcaccatggataccaggaaatggccccacttatatataataagggctttagagatgctggaccatctgatattccagcctggggccacatgggagtgtgccctggtgttattccttatacagttccatgaacatggctctggaaacacctctgtctgcagaaaatgaggcttttctttttttgttcgggggtgaacagagggcagaggcctgggcatcttcactcagcacccctttgtaacccagcacttagcaccatggctggcgcacagcaatgtcacatgtgtgagtgcacacgatgcctcactgccaggggtcaccccacaccggtgctgttgggggcgttggagtggttatctcttctttagtcctcaagctcctacctggcagagagctgcccaacaccgtcggggtggggtgggcgggaagggaagaagcagcagcaagaaagaagccccctggccctcactctccctccctggacgccccctcttcgaccccatcacacagccgcttgaggcttggaggcagtggatttccgagcctgggaaccccggcgtctgtccggtgtccccgcagcctcacccgtgctggcccagcccccgcgagttcgggacccggggtttccggggtggcagggggttcccatgccgcctgcgaggcctcggctcgggccgctcccggaacctgcacttcaggggtcctggtccgccgcccccagcaggagcaaaacaagagcacgcgcacctgccggcccgcccgcccccttggtgccggccaatcgcgcgctcggggcggggtcgggcgcgctggaaccagagccggagccggatcccagccggagcccaagcgcagcccgcaccccgcgcagcggctgagccgggagccagcgcagcctcggccccgcagctcaagcctcgtccccgccgccgccgccgccgccgccgccgccgcccccggggcatggcctgtctgatggccgctttctcggtcggcaccgccatggtgagtgagcgcatccttcgtccgccgggaacggttttattttcaaggagag

SEQ ID NO: 27511 - DNA, 2300 bp, Homo sapien
tctcctgcctcagcctacatagtagctgggactacaggtgcccgccaccacacctagctaattttttgtatttttagtagagacggggtttcatcatgttagccaggatggtctcgatctcctgacctcccaaagtggtgggattacaggtgtgagccactgcgcccggctggatgactcttgagacaacaccattcagacaaaggcaaggcctcccacttaaactcataaccgtgtctcctttctctccttcgatttgagcggctgaatttggttacagtcatctgacctgtgggtgtgaagtccacctgcctggcataaaaagctgtgcctcctttctaggtgaggagaaagagagagacctggctcatctgaggtgtggttgggaggggggacccaggtgtgctggaaatgaaaagaaatgcattcctgtttttcgtcccaacatgcaaacaactgaacaaaagcattagggcctgagactgggagtaaagaattccttgtcaccatggataccaggaaatggccccacttatatataataagggctttagagatgctggaccatctgatattccagcctggggccacatgggagtgtgccctggtgttattccttatacagttccatgaacatggctctggaaacacctctgtctgcagaaaatgaggcttttctttttttgttcgggggtgaacagagggcagaggcctgggcatcttcactcagcacccctttgtaacccagcacttagcaccatggctggcgcacagcaatgtcacatgtgtgagtgcacacgatgcctcactgccaggggtcaccccacaccggtgctgttgggggcgttggagtggttatctcttctttagtcctcaagctcctacctggcagagagctgcccaacaccgtcggggtggggtgggcgggaagggaagaagcagcagcaagaaagaagccccctggccctcactctccctccctggacgccccctcttcgaccccatcacacagccgcttgaggcttggaggcagtggatttccgagcctgggaaccccggcgtctgtccggtgtccccgcagcctcacccgtgctggcccagcccccgcgagttcgggacccggggtttccggggtggcagggggttcccatgccgcctgcgaggcctcggctcgggccgctcccggaacctgcacttcaggggtcctggtccgccgcccccagcaggagcaaaacaagagcacgcgcacctgccggcccgcccgcccccttggtgccggccaatcgcgcgctcggggcggggtcgggcgcgctggaaccagagccggagccggatcccagccggagcccaagcgcagcccgcaccccgcgcagcggctgagccgggagccagcgcagcctcggccccgcagctcaagcctcgtccccgccgccgccgccgccgccgccgccgccgcccccggggcatggcctgtctgatggccgctttctcggtcggcaccgccatggtgagtgagcgcatccttcgtccgccgggaacggttttattttcaaggagagcaggaaacacacaaagactcgcaagctcgacctgacacccctcccaggagcgcgtcctctgggcgctgacccagggcaccctagagtggcgcccggctccgatcgctgcccctgcccctccgccagggccacctggagcctcgggatgccccttgcaccggcagagagcacggactaggtggaggggccgggagtggggcgggggcagcgagttgccctacaagttggaccgatggccttgacctgatggcttctgggcggggggcgtggggagctggggacccggagcgcactggggactggggaggggccgcagcttgggccggagggaagaggggacttgaagaaggggagccccgcgcgcgcggctgtgggcttggggaccggggacttctcgcgccatccccaggaacgccaggcaaggtctgggggaacaaaagaggaagctgcccccagagagccggagcctgcgactgcactcccggggacaccctctcccggacccactcggggaggcggcggcgaaggcccggggagacccgcgaggggcaagcccggattcctgccggccgcctttctgcgcgcgccggagagagagacgcggtggggacagggatgcgcatttcacttccccgagctccggagagggatggcggggtgtcggcgagttcactgctggacacagttactgtaagtgctgtttccaggggtggtcaggaatctccctttctggttttctgg

SEQ ID NO: 27512 - DNA, 2300 bp, Homo sapien
taagcaggcaggaaggagacagctgctggtgctgcttagagttaggcgcagggatgaaacccatgagatgaggaggctggtggaggaaagggactgggggcagtggagggatggagaaatggacagaagtatggatggggaatgctgaatgtgagggagaccccagaaccggatgacacaagaaaacaatccttggctgtggccgggtgaccatgttaaggccattaaagtcatgcttggagaaaccacatagatgcttgcagctttgcctgtcatccagtggacttcagagcacagcatccgttcgaaatccagcggcagattttcatagtctgacaaattaaatcagctgttctcctggcgccagagtgggcttcctgccccacactcactgaggggtggtagggaggggtggcctgtcctttgcacactagtgggcaaatgatactgtcttcattttatgagcagttcttgccccctgtgacttagaatccctcacgtgtgttttgagatccattttgatgttattaagcccaacttcccagaccttcttcctgttcttcttgttggcacaaaagcccccttcctgtttcagaaggtgcaaaaagcaagaggattgatcagcgcgtggctttgccacatgatcacgaaaatggaggcggtcgatgagaaggcccttaggcattagggggaagaaacaagtagagtaaaaaggaaatgtcactggatgtcatagaatatggatttctgtcctttctgccttgagctttctcttggggagggaggaagaggggtctgggagaacaagacagcccgttctgagcagaagcccctttcagctctgggctgagatgaatggggagcgagggggaggggagggagtgtagcgcagctgggctcatcccatcaatgttggcatccaaagaaaaatcacggctttgggtggggaaactgggtcctgctgtgtagttttcagattgaagttgatgtgagacttggagatcatttggcaaccttattggtgctattggcataatttaaataatgggaaggattttattcttaattgttccagccaggtttagaagcctggaaaaagaccagttctgcttttagaagtataaaaataccgcagggatggaaaatgcttcatgcctgacaggcagatgtaaatgatttccagttatatttcagtacctgcgcaggggcagggccccgttgctagtgatctgatgaactagtcagccagtggggcgcggtgtgcagggggcgtgtgtgtgcacacaggatgtatgtacatggtgtgtctgtgcctacatatgatagtgtgtacatggtgtgtctgtgcacgcatgattgtgtgtacatggtgtgtgtgcacatgatgcacatgtgtgtatatgggtagacgtgtatgtgatgtgtgtctgagtgcatggtgtgagtgcacacatgtccatgtgtgggtgtgtgtgcatgcgcgtgtgcctgtgtgcacatggtgtgtgcatggcatgggtgtgtatcatggcctgtgtgtgcacactgtgtgtacagggcagacgcactcactgagggccccttcagttgtaataggcagaaggagcgcacgaggaggctgaaacgccagttagaatttcagctgtgagctcttctcttccccacttagggctgggatgttttcacagaaatcacagagcagctctcagagcccaaactcattgtttctcctggttttgtttgtgttgactttccctttaatccatgctcaagcccctcacctgtttagaggggatgtggcccgactttcaatgaaaatctctccagttctcctgccgtggcctctcgggctcctggggaacagcaccctgagccttctccttcttaactggtgagttctgcagagaatggggctatggttgatagtgtagtctttgggaacttttgttattggacaaatgtccactttgttttctaggacatctctttgtgtcccccagagtgaaccagctggagccagggagcccctagagcagtagcagccattagggggagccactgggagtcaggtgccttgacttggatccaggtgtgcaccctttctttccaagggtctctgggtgaggcccgtgaccttcccaagcctctccctgtcttgtgaaacctgggcgtgatatacctcccttttagggctgctgcgatcatttaggcagattaaacctcataagtggtttcccatacaagaaagatgctagcagtgcaacagacagaacacttacctgcctgccctcccgccagga

SEQ ID NO: 27513 - DNA, 2300 bp, Homo sapien
attcaacttggtcactgtttcttttcactcctagtaagcctccccacagtatcttcacttatgtcctctgtggataaatccagtatttggggaagtttaaaaatatcttcccctcttggggccacagaagggtccaggggatatcctctgcctgggtttctggaatagctggttgtgctccttggacagaccgcgacccagccaagtgccatgcatctgggtttccagggccttttttttttttttttggggacagagtctcgctctgtcaccgaggctggaatgcagtggcacgatctcagctcactgcaacctccgcctcccaggttcaagcgattcttctgcctcagcctcccaagtagctgggactacaggcgcccaccaccatgcccggctgatttgtgtatttttggtagagatggggtttcactatgttggccaggctggtcttgaactcctgacctcgtgatctgcccacctcagcctcccaaagtgctaggattacaggtgtgagccaccgtgcccggcaggggccatttttttttttaaaggcccaactcatggcgactgaaaccacacagacctaactgtgagcagaggcaaccaccagaatcctcccattaagaggagattgaaaatcagtgtgcagctccagttgccagtcatggctggctttatgtgggggactgtttatatttctgcttcctccttgttcgctgcaaaagaagagtccccaggcttcatgtctctcctggcaccctagggggcatcctcagcttgatctgctctgtgctttggtcagtagatgggggttcgccttggttttccacctggagagaccctgacttgggttgggcaaagcttcttccccatggtgtctgagagtggcacgtgaagggcagtgccaaggggttcttagctcagcaaagagaagcaggttacgtttgcagacacatgatctgctccctaaacttctttgtggggaaacagaagcaggaacctgtggggctgttcccattcgtgttccctggtcctgcgtgttctgtgggtaagcagacgccattcccctgggcccagcatccctgggcggtgtgtgccccatggagccctgactgctgatctggcctccaaatggatgttcagatggggcgcagaggacctctgaggagttggcgaacagatgctgcaaagcagtcgtgaagtttttcttgaccctaatgttcactgttccatgtatgccctaagtgcaaactccatgcacaccctcttgattcctgaacagctcctgcgtcttgggtagcccgagtttgacttctcagtaagttcttgagtgaaccccatggccacatgctcgagacccttcactgggaccgcagctcaatggctgcattctccacagatgcgactagggactcctgctgtcctctcccaacctcgccaccgaacctgctgtgaaatgatctattttcacaatcaaattcagttcgattttgattctgagaatttcatgaggccctggagaaatactctgaggctatggtacatgttaccactcaaggtcctgtctcacacggaggagatattggccgcccgttgcggagtccggatcccacatcagacacagttgtgcatgtttatgcttttcatccttgcagccaggcagactgagaaatggcaggcagtgtcacatggcaggagcgtgggcctgaccctgtccagctctggggcctgagacctctttgccccacaccccgcccccctccccgccaccgccctgcatctcaccctctcctctgatcctcacagcaacttctctagctaatgaggtggacagagcttaacctcaccattgtgccagtgaggaaatggaggttgcacgtttgcccaaggccacgggaggcaggagggtggaagcaaggcccgtcctgtgcatggtgatctactctgggttttcccaagcagggccaggagcccagtgctgtgttagcaaacgggatctcaaaaaacacaacaacaacaaaacgcggcatcctgacgtgtcgccctcgtaaattcctgtgctgtaaagactctcctgtggataagttcaagcctcagcagtttaacaggcggtttgtggaattcctaactcgcaccactggttccgcccaggctggtcgccaagcccctgatgcctggggctttcttacctctaaatggcccacatctgacttctctcctgggtacagcagagaattcaactgagatagcaggaagcatcgcacatggactgctctcctgccatcctaccattgttaaag

SEQ ID NO: 27514 - DNA, 2300 bp, Homo sapien
tgagaagtcatttttgcaagccaaaagtcgatcaatcgcattcattttaagaaattatacctttttagtacttgctgaagaatgattcagggtaaatcacatactttgtttagagaggcgaggggtttaaccgagtcacccagctggtctcatacatagacagcacttgtgaaggattgaatgcaggttccaggtggagggaagacgtggacaccatctccactgagccatgcagacatttttaaaagctatacaaaaaattgtgagaagacattggccaactctttcaaagtctttctttttccacgtgcttcttattttaagcgaaatatattgtttgtttcttcctaactttctgactacctttaattttgcctaggttgatttaaacaaacaaacaaacagcttccctttcctcctgtatcacctcagctgcctccactgaacctggaagaatggggcttagggaaattcaggcacgacctttgagggttggctcagcaggagtggccagcagtgaaagatgggctaactgtgcaagaggggaggaggccaacgagatggcatcagaatccaagggcttaggacgaagtcagtagacttcagcatgtggaggcatttgaaacttgatcaaacaacgcacttcgagtggtgggagatttcatctctgggttttgcgacctcacagctgcatcaccgcctcagtgttaggcctgtgtaaactttgcacgttggaaaccgcttctttcctatgactgaatcacataagtcaaatcccgctagggcagaaacaggtgcctatctggaggtcaagtggtctttgaattcacaacaaggctgcctgtgagtttgtcagctctcagaagcagtttgactacatgcagagaaggtgattctggccaaagaagtccacctttaggaaaatgccattgtttactccctctagaatatcattctcctagaatcagggcttccgatggaaaggctgtgtttttgcgggaaaatcagtgaacctttctaagctacatttttcctcatctgtaaatagttacagtacatcatgcccaaggccatgccagctcaaaggtggtgggattccttggcgatgtccctgaagctcttatttcccacttcgaaagaacgaaaagggtctgaattttatttacacatggatttagtttgctaattcttagagattccttttttactgctagatcttttttagtaaacacaattgagatagatattaaagtgtaattttaagtgtgcttgttctatacaaatatggcattgccttccagattaagtttttaaccagagtcaaacttagcctttataaaaagtcctcatttaatttcaaaatagatcttcttgtaagacattgcacatagggaagacctacctaggaatagcctggtgaaatgcagaattggaaaaaggcaaaagtccttgctcatgactcagaactacatcgagtgaggtcagtgttgaaaacgcccattccctccaggtgagccttccccattgtggattagtgttgtggcttcatggccctaataggggtgtgtctgccaggaactgcactgcatggggcccacagccctgcctcagaagcagctttggtctcgtttgctgagaccgcttgctgtgcctcatcaatttcaggaggaaacagtgagatgcctctagattttaaatctggtttcggagagcacctaagccctctgatggaatgactctcgtaggaacttgatgggggtaattctaagggggaagagcttgggaaccatgagggctgttaggctgcaagaagggaatggatatgtgagaccatgtgggtttattttttgaagggtgaactggagtaggtgaggattctgcagttgacgccccaggatggctttgctcagccctcccccgtagactggaggaaagcctaccgccaagggaggagaggatgcatctgtcctaggtgcagccggcctccctcttccaggttcagcaagggtccctggctgggcattttcctcgtaacctttggcagcattggctcaaatgccattgtttagattcccagatatttccccactgctttttgtgttaaggtagtttggtaaaatgccttattccaatggcctaagataatatcaagcaactcactggtttacttttctaaccagctgtggttaagacacacacggcaatgtgctatctttcacatgttggacgttaaacccagaccaactccccaaatctaatttgtttcagtaatttctgaatgcattgaccaagatattcct

SEQ ID NO: 27515 - DNA, 2300 bp, Homo sapien
cggggggactcttcaaggacaagaatgtgtcacctttgttattccttccccagccctaaaccctgggtgtaggcagtaggagctcagtcaacattcactagttaaacggaagcaaaccccagcagggttctcggtgctggccgcagagaagaatcacaggcgacagaaccacctgtcagggcggggcccaggcattgatattctccccactccaggcaattttgagtgcagcaggtggagaccacagcacctgcagaagctccttgcgggggtccttccccagcaggtcatgagggccggaggggcagcagtctgttcctggggtgtttgcaccctcctggaactcagccctgcaccacgacctggcctggcctctgggtactaggagcagtgggaaggcagggagatctcaccagatcccccagggagatctcaccagatcccccagggatttcccctacaatgacctttttaataacatgaaaatcctgctgtccattgatgaacctgggtccgctgtctcccagaaaaagtgagtgccccgaaaacaaggcaggcaacgctctttccttcttcctccttcgctggcctcagcgggagtggcacatcagaggccaggggccctcaaatccatccacaaagggcgtgctgagcgcaagggcggggcctgggagtcacagggcaggacacatcctggtgctcagcacgtacgccatcgagctcccatgggtcactcggggaagggcagtttgtggatgcacccttggaggctcaaggccgccctgcacacaccaccggggaccccagctgcaggctaaatccaagcagccaggcgctcccatttctcggggtgataaaccaagtccacccttcagacagaggctcctggaagggccagtgggggtcatcaaaatgcctccctggaaaagaaacacggagaacacaaaatctaggggcccgttttcctggaatgagattagtctcttgcccactaccagccagtccactgcaggaggttggggggttgggggatgctgcggatgccgagggcggaggcttagggtcctgggagtgggttaaataccagctataccagggacactggagtaacctctgataggcaccggaaatgttgagtcttagtttcttcctctggaaaatggatagaatcatcgctgtctcatctgatatgttgttataaaacaattcctgagatgtagtctttagtttttaaaagagcacgctgggcaaaggtggagagtcagttcctgtttgtgttaaaaatgtggccgagtgcagtggctcatgcctgtaatcctgacactttgggaggccaaggaaggcagatcacttgagtccaggagtctgagaccagcctggccaacatggcgacacctggtctctaaaaaaatacaaaatattagctggacacatgcctgtggcccagctacttaggaggctgaggtgggaggatcacttgagccccgcgagggcgggggtctcagtgagttgagattgtgccactgcactccagcctgggtaacagagcaagaccctgtctccaaaaaaaaaaaacaaaaaaaaaacaaaaaaaaaacaaaacaaacaaacaaacaaaaacaaaccaaaaaaacgtgcttagatccagagagaaaaattctgaaaggatacctaaaaaagtgttcacaatagatcaatagatgcctctggataggaaaggctcttttgtattatttgattttaaaaatcaattatgtgtaccatgtttttactaacatattttcaatcaattcatttcatccacttattaaaatgtagttactaatttttaggggagaaagcaaaaaggaaagacaaggaatctctgtgtttcaggagttgtgagagagccgcagggtcctgactcactcagagctgcctgtctccgaggccgatctgggatgaagcagcctggggctctcttgtcatgggaccaggggtgttctgagggcttctggctgggaggctgagatggaacggacaccacaccctggtcctgccaccccacatggctcctgcacactacaccaggccaggctaggagggcaattgacacacatccgctccccagtagaggacccggaaccagaactggaatccgcccttaccgcttgctgccaaaacagtgggggctgaactgacctctcccctttgggagagaaaaactgtctgggagcttgacaaaggcatgcaggagagaacaggagcagccacagccaggagggagagccttccccaagcaaacaatccagagcagctgt

SEQ ID NO: 27516 - DNA, 2300 bp, Homo sapien
cagtgctgaaattcttaacgaaagggacaggctgcacaaaggtcggcagatgacagcagggcagggactccggacatggcgcccttcccagcctgcatctccaaggaggatggtttttgcatgagggtgaagacttggggctcaaagtcaatgtccagcccccagtctgagcccatgtgatggggacgtggccaccaagtacagttgtggaggttgtgaacagctccactttcaactagcgatgccactctattgcagacgtcccatctcgtgtaatggtttcccaactctgtgggcactcagtgtccctgcgtgggggcctgagcaggattccagggaagcatgcctatgacaacacaggcttccgccagggccaggagagtgagagaggctgagaagtggtctcttttgcatgggtcaggtggtcgcagcaggaatcctgaaggggctgcagtgagcggtgggaagtcgagttgatggggaggaagcagagaggagaggtgggtgggaatatgagagaaaacaatgactcagtcacttatatcatgatggtgactaaagtgacagggatgtagaacaaggaaactgaccttgccagagttttcatggatcgagtccctgtggttgcccagtggtgaacagtcagcagagagcctggaggtacttgacccggacccagaggagccctggaggatggagcctggaggacgggggcctggagaatgagggtctggaggacgagggtctggaggaacaggggcctggaggacgagggtctggaggaagagggcctggaggacaggggcctgaaagatgggggcctggaggatgagggtctggaggatgagggtctggaggagcaggggcctggaggatgagggcctggaggacaagagcctggaggacaggggcctgaaagatgggggcctggaggatggggcctggaggatgggggcctggaggacgggggcctggaggatgatggcctgaaggatgaaacctggaggatggagcctggaggatggagcctggaggatgagggcctagaggatgggggcctggaggacaggggcctagaggatggagccctggagaatgggggcctggaggatggagcctgggggacgagggcctggaggatgggggcctggagtatggggcctgctctccagaccctgaggacagccccgtggtggaccaaggattttgggtttcctgcgtctctgggcccctgactgctcaaccatcagaaacagactggcaaccccctgtcatttccctggcgtggggaacttcgggtcccctctgtccttcccaccacacttttccctctttctttccgggtgtctactctctggcttctgtcttctctgtcaggtccacagaatccttctccagcacatcctaccccaggaaggccatgggctgggtcccaggtgccatctttcagaagatgtagagcattcccatggaacaaaaataacccatttcaggggttggctgaaaatgaacttattaaaacctgcctgtcacaggctactccgctgaccctgtcagcctcatctccatggagagcagcccctcctgctgaagatgggacaaagggcatcgtgctgcggttggggaggctctaaccacagccctgggagcagtctcttacctcctctgagatgcttcccttcctcagggaggggacttttccatgctatctgctggcctgtacattttccccagtaaacttggccctaatattttctaaattcctgtggtccctgcccactctatcaatagaaatgcatagcttatcccttcctgggtgtgaccctgtgtgtgcccagccccagacctgcacgtggccggttttccacgctggcagcctggcatgacccaactctctgtccagggcaggaagaggtatcaccgagcagggagagagtcaccctggcccggaagcctcgcctgcacagggcacagctgcctcttgcctcctcttcgcctccacggtggaagggctggggccacggggcagagaagaaaggttatctctgcttgttggacaaacagaggggagattataaaacatacccggcagtggacaccatgcattctgcaagccaccctggggtgcagctgagctagacatgggacggcgagacgcccagctcctggcagcgctcctcgtcctggggctatgtgccctggcggggagtgagaaaccctgtaagtgaaggagagggtctttttatgtgctttctttatttctcttaaagaaaaaaaaaaagcacaaccataaattaact

SEQ ID NO: 27517 - DNA, 2300 bp, Homo sapien
aggtgtaggtattgcatcaggtattataactaacctagagatggttaaagtgtaggagaggatgcacgtggtttctgcgcactatgtcattttataccagggacttgagcatttgtggattttggcatccctgggtggggggtcctgaaaccagtcccccaggggtactaagggacgactgcattgtattttaagttcattttccctttccctggttaatgaatatttattttgcttttctttccctcctttccttccttccttctttccctgtttccagctgttacaaacaatgctaaaaagaatatctttgcctgtgttttcttctgcccaagtatgaacatgtttctgggattaagagaccaggcctggaaacagaagaatttgctgagctgtaaaatctgtatggcttaaacctcaccgaacactgcccaccttttctccaaatgattgtgcaatttacatcccatttccaagagcccccattttgatccgagaaattagagcagcgaaaaccaccgtcactatgagcaccaccctgggcctggtgcccccgtcctgttttcaataaacttaagctgaccacagaggacaccaggcctcggcccctccctgggtcctgcggtcaggcccctcctggagaccctggcccaggagtggagaccccggtgcaggagtggcagccctggaggaggggctgggtcctgggatggagcgaagaggaacatggccgcccccattctggcccaggctcccctcccagaggggctgcagaaatgtactgactaggtcacccaagaaaagatagtacctttgttaggctagcatgcattttcctcagggcctaatttctcactgaagaagaaaagatttctcctgttgtccatttcttcatgcagctcttcaacagctgtttctcgaatgccaatcaaagccactgttctagggtctggggccacctcaaggcactaggagatgaggacttctgctcccatgcgccctcccgtctgctgcagggaggagtgcaatgaataaataaccaacataatgtgtcagtcacttgttttatccaccaggaggtaataagagctatgaaagagaaagctccgagcaggggaggggagtgaggcatggtacaggagagcaggaggctgtcctctaaaatacaggagtccaggggaccaactgggaaggtgtgggagggggagggagggagccccatagacacaggggagtgaaccacgttcactttgtcagtttttgatggcagctcgtatatactatttttttctccctcctgcccccagcccctcccagaaggagacttaatctgtcgctcaggctggagtgcagtagggtgatctcgactcactgcaacctccgcctcccaggttcaagtgattctcctgacttaacctccagagtagctaggattacaggcacccgccaccatgcctggctaatttttgtattttttttttttgtagagacggggtttcgccatgttggccaggctagtctcaaactcctgactttaagtgatccgcctgctttggcctcccaaagtgttgggattacaggcgtgagccactgcgccaggcctacaatttcattattaaaacaattccactgtaaaagaattagcttaggcctagacggaatgggcttcatgagctccttcccttccccctgcaaggtcacggtggccaccccgtgagccactgttgtcacggccaagcctttttccggccatctctcactatgaatcacttctgcagtgagtacagtatttaccctggcgggagggcctctcagatatgagtaggacctggattaaggtcaggttggaggagactcccatgggaaagagggactttctgaatctcagatccctcagccaagatgacctcaccacatgtcgtctctgtctatcagcaaatccttccatgtagcttgaccatgtctaggaaacacctttgataaaaatcagtggagattattgtctcagaggatccccgggcctccttaggcaaatgttatctaacgctctttaagcaaacagagcctgccctataaaatccggggctcgggcggcctctcatccctgactcggggtcgcctttggagcagagaggaggcaatggccaccatggagaacaaggtgatctgcgccctggtcctggtgtccatgctggccctcggcaccctggccgaggcccagacaggtaaggcgtgcttcttcctgctctgtggggccacagccagctctggcagcctccgccaggagccactgttttaca

SEQ ID NO: 27518 - DNA, 2300 bp, Homo sapien
gaatgcgcaaagagtgactcaaccaaggacataggagatggtcactcactgtgtggctgcagcccagggtgggtggacggggctgtcaggtacaggccagaagcgggggtcatcccagaacacagcaggcctggactgaatgccttgccagggtgagtgaacttcattctcttggcaaaggaagcctttgatgggtttggggggacaaaatgacatcccccatgtacaatccctgtaatattgtgactcgcacatcggttgaatgcttcaaagtgtaaagttaccacgtcgggtctgtctttccaatgtgcttgcagctatgtgagttcagataacctcagagtgagctcgctggaggggcagttccgggaggagtttgtgtccatcgatcacctcttgccagatgacaaggtgactgcattacaccactcagtatatgtgaggtaggtggtcaggcgatgctgttgtctgcacaggtatcgagtcacctgctggatttgtgatgctatgcacaactccacaaggacttaagaggcatgcatgtgttatctcagatggaaggtgggagttggccaccttgatgagactggtggatgcgccaggctgggggtgtgagaacctgagggagtatggcccaataaagaaagggaaggaaatagagtagaagggtaacaatgctgtgagtgtgaccaatgtactgtcatgtgacaggcactctgggtgtgtctggggaatgaaagcaggcaagcaagaaggggggtggggaggaaaagaggaagggagggagggagggaggaaggaagggagggagggaggaagagagggagggtaaaaggaagaaaaacagaaattaagatagaaatttatccttctttgtttacgaagtattttagcattcattatttattttacatgttttccccaacaactcatggggaaggtaaaaccaggtgttcttaaataaccaccaggtaactgaaacttacagggaccacatgccttgccccaggttagacggtgtgtagcagatacagccaagagttctgaatccaattccatattctctccctgacatctaggcccaaaccctaagatgtgcattttctgctctgggaacagtaggcttgttggtctgtccgtcggggatgaataagcaccccgggacccacctgcagtctggagggacagctcatgtgttgggtgctaaatccacagtctggtgacactagctttctcttgcatgatgagctggggctcaaaaggcagaaaacattacaaagattttgggatccctttcccttcactatgagaaaagcacacaccctggtctccacctgtgtgtgggggtgggggtaggagtgtcaattttggggcaatcacactttattgctctggggaaggagtcctctgccagatgtgtgaacccaggctacaaggagtcctagagagcttgccacgctgtcccttgggcactcttgtgtccctaggggccaggaggtggagaacattgggctgaatcgccatgcaatgacagcgtgacatgttgatagaatatatctccttacacatcctttatcactagctatctaaagcttagaaatacagaacggcctgttgtgtacacaatacttcactgttagttgagtgttttacaatgaattgtgtgacctcatcctcatggttttttttttttttgaacatagactaaaattgtaatctatattcaaagagggggaaatagaatttatttttctgttaccctaagattgagtttttaagagtgttcctttcacagatctggggcatttttcacagagcctactttttctccgctttagggagggatgtgcctctggccacgtggttaccttgcagtgcacaggtaagagttccagaaaggcaggggtccagggggagcaagcacatgctaagtcctatctccttgccctcagagtcctctccccccatggggctctgtatcccttcctcctgggtgccaggcgggaactctgtgtacccctacctgctggaggaggggagcagtgtcatcctcacctgtcggcctcacctgtcaggtgggggagacagccagagcaactcattagcagcggacaggaccaaggcccatgatgtcccatcactctgaagagccttgagtccctgactcagttcccacttcctccttacacgtgcacagtgcccactccaggcctcgggcagtgcccctcgttcctggcagaggggagtgttcacaccacaagggtggggtctggagcagtcagggaggtgcgtgcaccagc

SEQ ID NO: 27519 - DNA, 2300 bp, Homo sapien
aatttaaacaaacaaacaaaaatcaacatcttgtccttgcatctcctctgggagatctcagcactacctctgcctgcaagccccccgtgtgggtttcaccccctcctctgcagggaaacagccttggaagttgggatgctacttcccctccatcttagtgtcatagggctgctgaaacaaagtccccaaaactgggtgacttaaaacaacaggaatttattgtctcagttctggaggccagaagtctgaattccaaggtgtcatcaaggccatactccctcttaaacccatagggcaccgtgccctgcctcttcctagctcctggtggtttgccaataatctttggcatttcttggtgtgtagatgcattgttcccatctctgccttcatcttcatgaggctggcttctgcctgtgtctcctcccatcctcttcccttcatgcatgtttgtccctgtgtcctgatttctcctttttgtttttgtgttttggagacggagttttgctcttgttgcccaggctggagtgtagcagtgcgatctcagctcactgccacctctgcctcccaggttcaagcgattctcatgcctcagcctcctgagtagttgggattacaggtgcctgccatcatgcccagctaatttttgtatttttaatagagatggggtttcaccatgttggccaggcttgtcttgaactcctgacttcaggtgatccacccgctttggcttcccaaaatgttgggattacaggagtgagccactgcacccggctgttttccccctttttataagggcaacagccacgttggattagggcccaccctaatgactcattttaactagatgactctgtaaagactctccaggccatctccaaataagatgccattctgaggtactaagagttaagacctcaacgtgtctttctgggggatactattcaacccatagcacatcccctcatcccccatggaataaccgggtcagaggtggagcaggtaggactgaactagagaatgtgccccttggtgggtggccctttccctaattaaggcacctttctttgggctgagacttctctgcaaagaggggagggggaaaggatagttaaatttgtaagtttcatggcactccaagtcaggttctgtggctttctgctcttcctttttctggttttcagatgcagatgctgttgctgcacagatcctgtcactgctgccattgaagttttttccaatcatcgtcattgggatcattgcattgatattagcactggccattggtctgggcagtgagtacaattcattatttagtaggatctcaaatacctagccaagtagttaaactttcatgagcgccccctctcatcccagcattttgctgctgcccagccttaattactggaggcaaacatccttttggtttgctgacttgaagttttatttgcccacatgaatgtaaagtcagtctggggtgccgcaagggctgctggccatgctcatggctttgtcaccaaggaacctgcccggttaggagtggccaaaggcagctgatgaaatagaatcctgcaggtgggagggaggcactgaccggggcagcggggagaagacaaagagacctattcatgcaatgcaggcgcaccagctgtttttacaataaggtgcatgtggcttttgagaaagtgggtcatttggatggagggtctctaatagggaacaatttttctttcaaatacctgaatcacaggtcagttcaattcgccacctgccccactgtgtggtccacacttcgttcactttctgccttcggtaagagaaaccaggaaggccgagcagttctcagtcaggactccttgctcggctggctcagcaggtcggccccccgccatgcagtttctctcttgaccttgagacctccagagtctaaattcaccttgcactgtggttcctgggccaggccacatagcgagataaagtggggcacagcagccccaccccttggaattcaaaacagaaactgggctgcaggaaacaggctgctgacagggacgcaatttcaatacaggtttcattattcacgggccagctccgcactgtgtggcagggggacagttgttagtgttgcactctgaaagagctgttggttaattcctgccttcctcccttttcccagtccacttcgactgctcagggaagtacagatgtcgctcatcctttaagtgtatcgagctgatagctcgatgtgacggagtctcggattgcaaagacggggaggacgagtaccgctgtggtaaggtcat

SEQ ID NO: 27520 - DNA, 2300 bp, Homo sapien
tctaggtatggataatgcagcttcaacaaaccactgagcttgtccaggcctaaaacacagaacttgccacggtctctcatcctccctcactctgcgttcctcacagcctccacatctgcgaagtgcagcttctatttccctgctcttcctccatctcctgctcaccctctcctctgcacactcttttctcctcgcattccatgtcttttcatcatttttgtcttcaaattctcttctttcttaggcagcctcaactgatattgatcatttcattatcacactccttattgccagagggtagaagttgtgagtctccacggtcaggcagggaaagatctttttagctcttccatgacagagctctcggctcaacatgtccaagactaggagaagagaggcaggtgccagtctcatcctgggcaattgtgtgaccctgggcaggcttctctcccctttctggattccattcttccttatttttaacaaagacaacttgggcattcatgtatttttaggattgatgaggtaatttaggtgaaatggcctgctctccccaggagggaagagtgctagtgggaattctcctgctgcccagagaggcttatacttctggccaggcatctggacactccttacatattgtttccaccagatttgcctggttctaggggcaagaactgtaaagggcctgagatgtcaccctacttgcaagccaaaatttagcctgccacagtttcatgggtgctttggaagacacgagagtcctgggtcagagacaaaggactctattcctcacagtgcagcaaggggcacaaatatcctgtttgtgctggctgcctttgccttctcagtcccacagaggcatgtggagcagcctgtgtatgccgcacgtgcaggcagtttgcattgctgctgcatatcccagagttaagggaaccctcatctttacagtggtctgcaagcagacctgtgcaaactttgctctggaggaaggcattatatttgttaaactggacagtaaacaaacctgcctcttgctctggagggagacgctatctgtatcttccaaggctgtttgctctacacacattcttgaagagatgatctggaatgaaagctgtcagtgtctgtgcacagcaattgtggagaatggtgtatcaacatcctgtcctcggctggacatggtggctcacgcttgtaatcccagtactttggagagccaagtggggagaatcacttgagcccaggagtttgacatcagcctgagcaacatagtgagatccccatctctataagaaaaaatttaaacaaacaaacaaaaatcaacatcttgtccttgcatctcctctgggagatctcagcactacctctgcctgcaagccccccgtgtgggtttcaccccctcctctgcagggaaacagccttggaagttgggatgctacttcccctccatcttagtgtcatagggctgctgaaacaaagtccccaaaactgggtgacttaaaacaacaggaatttattgtctcagttctggaggccagaagtctgaattccaaggtgtcatcaaggccatactccctcttaaacccatagggcaccgtgccctgcctcttcctagctcctggtggtttgccaataatctttggcatttcttggtgtgtagatgcattgttcccatctctgccttcatcttcatgaggctggcttctgcctgtgtctcctcccatcctcttcccttcatgcatgtttgtccctgtgtcctgatttctcctttttgtttttgtgttttggagacggagttttgctcttgttgcccaggctggagtgtagcagtgcgatctcagctcactgccacctctgcctcccaggttcaagcgattctcatgcctcagcctcctgagtagttgggattacaggtgcctgccatcatgcccagctaatttttgtatttttaatagagatggggtttcaccatgttggccaggcttgtcttgaactcctgacttcaggtgatccacccgctttggcttcccaaaatgttgggattacaggagtgagccactgcacccggctgttttccccctttttataagggcaacagccacgttggattagggcccaccctaatgactcattttaactagatgactctgtaaagactctccaggccatctccaaataagatgccattctgaggtactaagagttaagacctcaacgtgtctttctgggggatactattcaacccatagcacatcccctcatcccccatggaataaccgggtcagaggtggagcagg

SEQ ID NO: 27521 - DNA, 2300 bp, Homo sapien
gtgtctagagtctggcccatggcagatgcttgctaaatatttgctgaataaatgcatggatttgcgagttgccatccacaatggtaaattcagcccttcaaagatgctcagcgctctggtccccacagcagcggttaaacccctttaagcagtgctgtgtgcagaagcctcttgggatgcagaggcctccgaggaaggaaacatgacgtgtcttttgtggagcgcaggctgtgatgagcatcttcaggctccccatcttttgtctgcaggagtagctgcagaattgaacttgggggctcagttacagggagggacagaaacccccaccagagagtatgtctgccctcttgacggtcacatgctcagcactgggcagagcctaccccttctttcaagtaaaaggagcggctgtgttccgatcactccctgatgcaaagcttctgaaaaggtttgctcaccttactgactaattaaagggaagccacatttttccctccctggtctctgcagccataccaccaagggctatttgataggcccacggcagcttgggttacacagatgcccgcgataatgccatttgctgcgatgattgagtcgacaaggctgagtgacttggggaaaatattccccgattggactaacctgttggcggcctgcttaccatcacacttgtttttataatgaaaaaggaaattatttctgcttttaatgatggcagctccagaaatggtgagtaaaatgggtgtgaggagagaagatgcttctcaacacttctcagtgttgtacagcttgccaaccacagcctgtttgggaggggatgttctcacccaggttccatctttcagaagccatttgcccacttattctttttatatggataaacgatgtaatttgctacatgctgataataaacagaggtatcagcaagaatgaaagccagaaaatggcccaacatgaacttcttgcttttctaagttactctttcaagctcttcttgcgatagaaatgaaatgaacatttttggcacagaactcttgtttagattttactatgatcttgggaaacacgggttgcttcaaatggcttactagatccctttggaatttcaaacgttacaacaggtagtcacaaagggaatgaaagcggatgatctgagtgtctgtgctgatgtgcctgctggagcccctgtggattttagcccttggaggaagcaggttcccagagcagccatgcctgatatctgggagagggaactagaatttaattgggaatcttctgctatttccctgcttcctccgccctctcagagttacagggaatgacttagaaaggtctctggtctccttggcattgtgataggtggaattctttcgtaggaaacacagccccggggttattttgatgcaagccgttggtccaaagccactccccactttgctatgtgggggaaggaccgggcaccggacggctcgggtactttcgttcttaattaggtcatgcccgtgtgagccaggaaagggctgtgtttatgggaagccagtaacactgtggcctactatctcttccgtggtgccatctacatttttgggactcgggaattatgtgagtaccgaaactacttatgcttatggtaggtgtaccacacgcacagggaaagaattgcgtttatgtgggacaggtgaaaacaatcgcaaaaaagcaatggaaagggctttgagagtaatttatcttctgaacaatagcaatatggcaacttctaaatggtgagagggagtccctctaaagcaatcgatttgaagattggttggacaaacaatgggaaagtcattgtcttagcagaattaagttcatactttttttttttttttttttttgctaattctagaagcttttctgttatctgctgtagctcagacgaaaatgcattctcaccagatgactgtttttggttaatcgatactgaatgcgctttgtgtggactgtcgaatttcaaagatttaccgtatgaccaagatgcacctgatgctacaagtataaataggggaacaaatgctttctgttcttcctcggctaaggaggtagaggtggaggcggagccggatgtcagaggtcctgaaatagtcaccatgggggaaaatgatccgcctgctgttgaagcccccttctcattccgatcgctttttggccttgatgatttgaaaataagtcctgttgcaccaggtaagtggacccaggtgaggactctgtgatttctgcccataccctcatgtaggtgaccaatgtgactgactgtccct

SEQ ID NO: 27522 - DNA, 2300 bp, Homo sapien
ctgggacggagaaagtaagactgtcttaatcaaggactgcctggacgcatctctcaggcgtttgccgtcagcacatcctgccaattctgccttcaaaatcaacctcaggcagccagtcctcaccgtcatcaccactcgtgccgagtcatggcccttgtggcccatgaggtgcagcctccttgtggctgtccttgtgtccccccatccttaccccactctatgccctgcctgtcaacccaaatttgccccattgagatcgcccaaggctttccacacatcaaaggcaaaccagagcccttcccatgcccctgggccttgggatctgccatcggctattccctgttccctgctttctaggctcacggcccctcttggggttcctcaaacactccagcgtggcccctattccaggctttggagctggtggtcgccctccttggaggaatttcacaagactcacttcactggtcaccaaggtctctactaaaacatcatcaaggtccctgctgaaacaacactctccctagaggccgtcctgtaccactctgccctcatctctctcagaccctccccggcctaatctcttcctagcgcttaacatctggggccccatgggagcactttgtttttcttgctggctgcactgtgtctagagtctggcccatggcagatgcttgctaaatatttgctgaataaatgcatggatttgcgagttgccatccacaatggtaaattcagcccttcaaagatgctcagcgctctggtccccacagcagcggttaaacccctttaagcagtgctgtgtgcagaagcctcttgggatgcagaggcctccgaggaaggaaacatgacgtgtcttttgtggagcgcaggctgtgatgagcatcttcaggctccccatcttttgtctgcaggagtagctgcagaattgaacttgggggctcagttacagggagggacagaaacccccaccagagagtatgtctgccctcttgacggtcacatgctcagcactgggcagagcctaccccttctttcaagtaaaaggagcggctgtgttccgatcactccctgatgcaaagcttctgaaaaggtttgctcaccttactgactaattaaagggaagccacatttttccctccctggtctctgcagccataccaccaagggctatttgataggcccacggcagcttgggttacacagatgcccgcgataatgccatttgctgcgatgattgagtcgacaaggctgagtgacttggggaaaatattccccgattggactaacctgttggcggcctgcttaccatcacacttgtttttataatgaaaaaggaaattatttctgcttttaatgatggcagctccagaaatggtgagtaaaatgggtgtgaggagagaagatgcttctcaacacttctcagtgttgtacagcttgccaaccacagcctgtttgggaggggatgttctcacccaggttccatctttcagaagccatttgcccacttattctttttatatggataaacgatgtaatttgctacatgctgataataaacagaggtatcagcaagaatgaaagccagaaaatggcccaacatgaacttcttgcttttctaagttactctttcaagctcttcttgcgatagaaatgaaatgaacatttttggcacagaactcttgtttagattttactatgatcttgggaaacacgggttgcttcaaatggcttactagatccctttggaatttcaaacgttacaacaggtagtcacaaagggaatgaaagcggatgatctgagtgtctgtgctgatgtgcctgctggagcccctgtggattttagcccttggaggaagcaggttcccagagcagccatgcctgatatctgggagagggaactagaatttaattgggaatcttctgctatttccctgcttcctccgccctctcagagttacagggaatgacttagaaaggtctctggtctccttggcattgtgataggtggaattctttcgtaggaaacacagccccggggttattttgatgcaagccgttggtccaaagccactccccactttgctatgtgggggaaggaccgggcaccggacggctcgggtactttcgttcttaattaggtcatgcccgtgtgagccaggaaagggctgtgtttatgggaagccagtaacactgtggcctactatctcttccgtggtgccatctacatttttgggactcgggaattatgtgagtaccgaaactacttatgcttatggtaggtgtaccacacgcacagg

SEQ ID NO: 27523 - DNA, 2300 bp, Homo sapien
gcccatcagggaagagtctaccagtttcctccctcacttactgaagagaatgtgcctgtaactcaagctgtttgcaaatcgttactaaagcttcatggggctcccaggagacatcaggataggataaggcgctcatgccctgaaaccaagtctgctcatggcactggctgcgtaactatcacgcgctgggccccagataagcttatttgtttggttcctcaaaattttagtttgagctcagtggaattgatttgtcggtaaactttctgagaggatattttacagcaaggaagaccagccacccttgtagggcctctccctgctaccccgtggggagctggcttgacctttgacctacatctgacacacgtgttaacatgccctcgtagttggttattgtatgtcgatttggtgttatttgtccccccagggtttatgatcagctcttctatgcagacagagcccctgtcacacacacatggctgtgctgggcacggcggggtcttaggagtgaaagtgcattccagactctgtcccgccagagctgtactccagcggggagcatctcctataacacacaggtaaaagcaaagaaagaatgacatgttaaatttcctgtcattgcctttgagggcaaacattcgttgagggaccagaaagagtagtcaggaaataggtgaaggagagatgtgtgagcttgaaggagaccatagatcacacccaaaggcactgacaggtgtgtgggcaggtacctactgggacggagaaagtaagactgtcttaatcaaggactgcctggacgcatctctcaggcgtttgccgtcagcacatcctgccaattctgccttcaaaatcaacctcaggcagccagtcctcaccgtcatcaccactcgtgccgagtcatggcccttgtggcccatgaggtgcagcctccttgtggctgtccttgtgtccccccatccttaccccactctatgccctgcctgtcaacccaaatttgccccattgagatcgcccaaggctttccacacatcaaaggcaaaccagagcccttcccatgcccctgggccttgggatctgccatcggctattccctgttccctgctttctaggctcacggcccctcttggggttcctcaaacactccagcgtggcccctattccaggctttggagctggtggtcgccctccttggaggaatttcacaagactcacttcactggtcaccaaggtctctactaaaacatcatcaaggtccctgctgaaacaacactctccctagaggccgtcctgtaccactctgccctcatctctctcagaccctccccggcctaatctcttcctagcgcttaacatctggggccccatgggagcactttgtttttcttgctggctgcactgtgtctagagtctggcccatggcagatgcttgctaaatatttgctgaataaatgcatggatttgcgagttgccatccacaatggtaaattcagcccttcaaagatgctcagcgctctggtccccacagcagcggttaaacccctttaagcagtgctgtgtgcagaagcctcttgggatgcagaggcctccgaggaaggaaacatgacgtgtcttttgtggagcgcaggctgtgatgagcatcttcaggctccccatcttttgtctgcaggagtagctgcagaattgaacttgggggctcagttacagggagggacagaaacccccaccagagagtatgtctgccctcttgacggtcacatgctcagcactgggcagagcctaccccttctttcaagtaaaaggagcggctgtgttccgatcactccctgatgcaaagcttctgaaaaggtttgctcaccttactgactaattaaagggaagccacatttttccctccctggtctctgcagccataccaccaagggctatttgataggcccacggcagcttgggttacacagatgcccgcgataatgccatttgctgcgatgattgagtcgacaaggctgagtgacttggggaaaatattccccgattggactaacctgttggcggcctgcttaccatcacacttgtttttataatgaaaaaggaaattatttctgcttttaatgatggcagctccagaaatggtgagtaaaatgggtgtgaggagagaagatgcttctcaacacttctcagtgttgtacagcttgccaaccacagcctgtttgggaggggatgttctcacccaggttccatctttcagaagccatttgcccacttattctttttatatggataaacgatgtaatttgcta

SEQ ID NO: 27524 - DNA, 2300 bp, Homo sapien
ccatatacagtcacttgatttacaataagcctcctactgcaattcactgggcaaaggatagccctttcaatgcggaagtagatgaaagtttacccctacctcacaccatacacagaatgaattcaaatggatcatagagctaaatatgaagagcaaaagtagcaaaacttctagaacaaaacatagatgatcttcatcgatgttggattaacaacaatctcttgaacaggatgcagaaaactctaaccagagttcccacaaattgataagaaaagcaaacaccctagtgaaaaaaaaaaaagagcagaatatctgaacaggaacttccccagagaggatattcaaatgggcaataagcctgtgaaatggtgcccaatatcattatccctcagggaaatacaaatgggaaccacagggagatacaactacacaccacccccaccacagagtggctaaaattagggactgataatattaagtgtgcatgaggatatagagctttgtacaactgcttggcagttcctaatggagtttcacgtgctctgtgatccaacaaccccactcctagatgcacacctaacagaaatgcatgcacaaggcactcaaagacacatacaagaacgtcctcagcaacattagttacaatagcaaaacaaccgaaaacttcctgaatgcatatcaacagagaaatggataaatgaattatgttatatttattttatttatttatttttgagctggagtctcactctgtcccaggctggagtgcagtgatgcaatctttgctcactgtaacctccacctcctgggttcaaatgattctcctgcttcaccctcctgagtagctgggattacaggcatgcaccaccatgcccaactaatttttgtattttttagtagagacagggtttcaacatgttggccaggctggtctcgaactcctgacctcaggtgatccaccccccccttggcctcccaaagtcccaaagtgctgggattacaggcgtgagccaccacgcctggctggtatatttattaatcaaatactacacagcaataacagtgaactaactgtggctacaagcaataatgtggataaattttacaggcataatttgaggaaaaagaaatgagatatgatagagaatatgctatatggttctatttacataaggctcaaccacaggcacaattcatatacaagtgatacagcagtttactttctgggggagggaggagataactggaggaggctgagctgggggcagaggtgcatctgaggttctgagaatgttccagagcaggctatctccaccttggcactagtgaaattttgttggggagactgtcctgggcactgtgacattcccggcctctacccactagtgccggtaccacgatgtccaccccacccaccaccacccccgcctcattttggaaacaaaaatgtctccagacatttccaaatgtccccttgggtggaggaggtacaaaattcccctggttgccctgtttgattttgggtcgtgggggaattaggggtgtgggctcatttatggaaattccttgagctatacacatatgattcatcaacttttctgtacacatataaagcttttaaagtttttaaaataaaaaaacaagtcaatgaatgactgaaagaaccagtaagttttccagcaatccgagacaatagatagagtggggtttaatgtcttgttcacagacaaggagactgggatccagggtgggtcagggcagggggccagcaggatccaggagggaactcattccctgacttctcctccgcttccttcccccatgctctcacgcattcttgctcccgaatactagccaagtccctacagaggctgatcccgtgcaggggctcggttggacctttagcctcaaactcccgtggtggaaacagttaggattggtggacgctgcacccagcatcctgcaaacagaattctgaaaactgatatctcatgcaaacaggatatcaacttttgtcagaaagatcaaaaagagcttgaggtttttcttcacagcctcagccttgcctctccccctcttgctttatctcctcatttctgtgtgcaggcgagcttcttggcctaagggcaggaagagatggcagcgggggagacgcagctctacgccaaggtctccaacaagctcaagagccgcagcagcccctcgctcctggagcccctcctggccatgggcttcccggtgcacaccgcgtgagtactgcccagagaccccggggcccagccagtaaggctggtgccaga

SEQ ID NO: 27525 - DNA, 2300 bp, Homo sapien
tcccagctaatttcaaaatttttttgtagagacaaggtctcactatattgccctggctggtctcaaagtcctggactcaagcgatccttggcctcccaaagtgctggaattacaggtatgagccaccatgcctgctcaattatgtgtctatcttaaaagtaaataaataaaaaatgtgatcaaagcttgcaattttcctatccttcagaaaataaatgttccttagcacctaatacatgggtatagagtgaatatagtaaataataaaatgctgaaagcatccagtaatgatttaacatgggtatctcataacatcacactgtatttcttaaatatacataataaaatttattaaaaattaaaattaagaaattgaattggatgtatatagacttattataacacaagtactgacacactacattgaggacttcagaaataaacgtctgtgcaattcttgcccttttctagcactgtttggaccactaattcctgcctagaatataaggtaaaaatctgcgacctcacagatttgtttcagggttagtttacatcaaaatgtacaaaagtcccctccttctatccaagaggcttcccaatacacccaacactgagccgctggggtggctgaataagacagaaatcctttaaaatgaccccaaatgtgatctgaacctaaaaattataggcactaaaaagttacaaatcagtggggccatttgaggagacaaactagaaatcttgctggtcaagtgttgcaggttgggttcacctagaaacagaccctgaacaagtgatttttttttttttttgagacagagtcgctctgttgcccaggctggagtgcagtggcgtgatctcggctcactgcaacctctgcctcccgggttcaagccattctcctgcctcagcctcccgagtagctgggattacaggtgcccgccaccatgcccggctaattttttgtattttagtagagacagggtttcaccgtgttgcccaggctggtctcaaactcctgagctcaggcaatctgcccacctcggcctcccaaagtgctgggattacaggtgtgagccaccgcgcctggcctgatttttttaagtgctctcctgggagaaagtagtaaagagggcagggaagtagacatgaaagggcaggcagctaaggaaggatgcctttgcaggtgaagtcccagacttggcctaatccaacagggactctgggggcatcaatcgcactgcagactttgtcctgcttcttgcactagctactggctgtctggccggatgtgaatttcaggcacttctggctctccatactgggcaggtagttccagcgcacagaggtgatagcttgagtagcaaatcaggcggaagctgggagatgagtgcccagagctagcaaaaaggtctgggcaggcactgacagcaccactgcagagtcgctagatttttcagttaattctgaaagtacctcaactctgtactgtgcatgcagaccatagtggctgaggttccctatctgtcagccatggagaggtcactctctggagtagggaggaactactctctgggtgatagaaatattcccacacagaacccagctcacaggctggatgtgccctctttctcctctctgctgcctaactcaggaaataactccaaagacctgggtcagttcagatggggactgaagaaagcacatgtgaggatacgcctataaggtaatatcttcaggaaccctctcctgagcccagggcctcctcagcatttcttggaggctgccaggaagcaactatcctccatgcatctaaatgccgggggagcaaatctcagctacagaaatgacttattcaagggcagtatggcagcgtgggatgatctgctcatccgagaaaactgcctcgatgggaattaacacagggaggaggaaacttccaaagccttccgctgggaaatctttgcctttaatgggaggcaggatgggggtgggggaagaacgaggcggcatgtggtaaccagacgtcacagcgtttcacttttcaccatcaacttccaggacgcacgcaggtgtgtctggcgtggccttcgtccctgccggggatcctggggagctgtggctcagacctctggtttctgcgcctcctcactctccaaacccaacctcgaggttcccccgccgctgcgcaccctgggaagccctttctcaccaggagctctcaccccaatatcattctctccctcctcctccaactcctccgagcccaggtccgacatggtctcgccccagcctggatc

SEQ ID NO: 27526 - DNA, 2300 bp, Homo sapien
ggagggacaatatagaggttacagtcattggctacagatgacaacatacaggctaaaatgttttctgcatatgcacaagacaatcagtgaaacgtcatgattcagaaacaaatcagtatccttttcagtgtcagtagtttacgtattaattagtacatcaacagtctgaggaactcatgatacgatttgagagattcacagtaagattgtttgctcaagtacaggatgtaaaacacgagtcataagaccttctccaggtagttaaaatatagtttattcttttaagtgtagggatgcatgacttaactcatgcctggcatggccttaggtcctgtttgtaagttggtatcttactgccacagcgtccattctgtcagtcttatgatctctattttaacattaatgcttgttagttgttgtgtctaaactgcacaagggtattagtgaggcatgttcgacctcccttcccatcatggctgagaacgcagtttttaaggtttctggggccctcttggccaagaggggtccattcagttggctgtggtggggcttaggaggttatttttagtttataaccccctataactccctttccttagatgttcaatggaggaatgatagtgaggatttaataagataactcataaaattcttaaaacagtgcccacacacagtgtcagaacttagtaaacactggttactgtcattgttaggacaaatttgaaagctaaatttctgacattttaaatgtaaaaaacgagtatttatttgcatatacttatgttaccattctagatttctaacatttaaaatgcttctggcattttattataaaaataggacatgcttaattgtagtaactgggtaactgccaatatgtagagaagaaaataataatcatctgttatccctaactccccacttttccccataagaaaagctgttaaattttggtgtttacaacatttttatctttgcatctaaaaaacgacataattttggaatctcgtgtgttgttgtaacttgtgtatttattcagtaagtaatatatttgggcctgatgatgggttatggttgtaacctttcatattagcattgggaagaatctctaggggatgtgtgctctggaagatcagcagcttattcaccgcgtggatttggcttctgggattctcccatcaagaccaaatcctatagttattcagtcactcctccccagctcctgcagcaacaacaaataacacagctttgcagtctgggatgatggcagaggaaatgggagatgtgaggggccttcggcaggcggagtgcgtcaggtaaagcagatttccaagcctgcacgtgtacatgcgtgtgcgtctgtgattgtgtgggtgtgtgacagtgtaggggagccaggagcgagaggagaggacggcgatcgtaggggacacctgagagtcagaggcccgagggggctgggactcatgtcgaggtcggggaaggatgtaaaacccggacggacatcactgtaggccgcacctgctgagaggccagagctgcctccttgagagtgaagttgtttacagacaagagaagagatcttggcggacacatcacagctagccgcgaatcccgaagggtcagcagagcctagaaaggtaagtgggggtgggcagcatccccggaggggcctgcgaggcctgggggcggaagggagcgggcagtgcccgcactgggcaggggtgaaaccctctcgagagttggcccggacgcgtttcccgcgtccttcctcttgagggcccagtacccaggtggctcctcgttgtggcgtcacagaacagccgacaaaagtgatggatttcaggggccagcgacggcgaggtccaggtcagagagccggtgggcagccaggcacagaacccgctcaggccctgcccagtccccgccccctcgcttcccgagcagtgattggccgaagcggcccctcgttgctatgacggcaccagagtgctgccactggctccacctcgtcccttccgccccgcccctccgtattcccgggcggtgattggtcgaggtgcccttcccgttgctatgacagtacgcaaaggctgccagtggctcctcccgcttcgtccgcgtcgcctgtccccgctccccatcttccgggctgggagggaggcgggaccggccgcgtctccatggcgacgcgggacgcggcggtggaggcggttgctacccacctgctagaggcgctgcggctgtgatccaggctggggcgagaccatgtcggacctgggctcggaggagttggagga

SEQ ID NO: 27527 - DNA, 2300 bp, Homo sapien
agtggggagttagggataacagatgattattattttcttctctacatattggcagttacccagttactacaattaagcatgtcctatttttataataaaatgccagaagcattttaaatgttagaaatctagaatggtaacataagtatatgcaaataaatactcgttttttacatttaaaatgtcagaaatttagctttcaaatttgtcctaacaatgacagtaaccagtgtttactaagttctgacactgtgtgtgggcactgttttaagaattttatgagttatcttattaaatcctcactatcattcctccattgaacatctaaggaaagggagttatagggggttataaactaaaaataacctcctaagccccaccacagccaactgaatggacccctcttggccaagagggccccagaaaccttaaaaactgcgttctcagccatgatgggaagggaggtcgaacatgcctcactaatacccttgtgcagtttagacacaacaactaacaagcattaatgttaaaatagagatcataagactgacagaatggacgctgtggcagtaagataccaacttacaaacaggacctaaggccatgccaggcatgagttaagtcatgcatccctacacttaaaagaataaactatattttaactacctggagaaggtcttatgactcgtgttttacatcctgtacttgagcaaacaatcttactgtgaatctctcaaatcgtatcatgagttcctcagactgttgatgtactaattaatacgtaaactactgacactgaaaaggatactgatttgtttctgaatcatgacgtttcactgattgtcttgtgcatatgcagaaaacattttagcctgtatgttgtcatctgtagccaatgactgtaacctctatattgtccctccaatgaaaaaagacaactgcaatatgaggagtccccttcccattcctcaactttcttataaaagcactgcaacttgtaacagactttggaacacacccaactttgttggtgtgtcttccccattcaatcttcaaatttggctttcaataagcctttatcaatttccgcctcaacagccttaactttggtcgacagcagttaagatccttacccaagatcatacagctagtgggattcaaatcaagccagctgacccaagagcaactgttgcccatcactatactgcctcccagatctgtgatataaagaaataactatagttttctggcagtgactaaaccatctaccaagcagaggaccactagttcaaatgccttggattgcaaacaccagagagtggcttaagcaaaccacatggttaagcaaaccctgttctggatcacatcattagcagctagacgtctagctatagctattaaatcctaaggtttacaatttgatttctatcccatacgaattagccagggtcttccctcccaaatctttcagtcaatctatagtaatttcaccacactgtgggtttggcaattatccaaataattgacaccaaaggcaagaaggggtgaacaacaggatgggcctcccggcatctcctgcagcagcacctggactggattctaaattcctccttccagaaagaagctgcatcccagcccagatccagctgagagccacagctgccaagaggcagtcggagctctgggcacctctctgtgcacccaggaagccccaggaggacttcatcaagccaagtcgatgcctcactcagagccccaggatccctgactcctaaccccacagtgacctggaaatgcctggtgatgccagaagcagcgctttccaattctgaaggccctcaaaatgcttgttcagcccaccttcctcctttcctggggcgtgggagtggtggggagatgagaggcagaaagatgaggacatcatcaggaggtttttccttactggaaaatgagaggaaatcctctttcactacttaaaaatcaaaaggggctgtccatattcctctggcaggggtctcccatcatcccccgcgaggcattcccattatcccctgcggagctttcccatcatccacagaggcccttcccataacccccaagtgggaagttcgcgcaagtgcggctctgcagggaggagggagggccgaggggaaggccctcgagagagtggagggcaacagtggccacggttcctctgtacttcgtttcttccgtaagaaatgatcttcttgtccttcttaagtataaatggagcgatccatttccttttacccattaaccccttcaaaaagaagaaaaac

SEQ ID NO: 27528 - DNA, 2300 bp, Homo sapien
caaaacaaaccaacaaacaaacaaaaaagaaaaatatgcatgacctcacttatttttggaatctgaaaaacttgaactcagagaagcagagcatataataatggtggttaccaggggcagtaggtgggagaaatggggagtcgctggccaaagagtacaaagtttcacttaggaaagatgagtaagttctggagggctaatgtacagctctaatgtatagttagtaataatacattgtatacttgaaatttgcaagaagaatagatcttaaatattctcaccaccaaaaaaaaaaaaataatgtgaggtgattggatatactagcttgactgtggcaataattttacaatgtattcatatatcaaaacatcacatcctatactacaaattatgtaatttttatttgtcagttatacgtcagtacaactgggtgggggggagggggggtgggaagaagctgtctccatatgaggccgaggtgtcctatatatcctgagcttgtattatcgcctttcaagtgtaaaacctgtaggtgatgggatgcccgaaaggtttgaaaatcaggaatgacaagatcagattttgctttaggagggcaacttgaggcagcttaaagagtggattgcaggaggtagaacttggaagtgagaacgctgttgcacaagtgcagtgagagaggggtagcctcgagccgaaccaatggcaagggccagggctggggagaccattggagagaggggtgggagccacactgggctatcaccgggaatggagagctagaaaagagaggagaaagcactggcacagggggcctgcggagagaaagaaggtctgaagaaaacctggccaaaaggagaagactggagccctgggccatcccgcttgcggaatgaggggccggcgggcttcctggggctgaaccctgcgtggcaaagaagtgggcaggttttctttctgcctgcagaaggcttctcaaatgcctaacaaagtgatggatttcacgcagcccagctcagcaaagagagacacagacatcagagtgttctagaaacaaagcagggccccagggggaaactgcgaggcctagcagggcaggggagccaaacacagggaagaatgccttctccattctccagagggaagctcaacgtgcctggggaagggtgcgaggggcactggcctgttgggacatttacagccaggcctcgggttggttttatccttaaacattgttttatccgggggcaggctttttccccggaaaatttccgctctgcctcactttgctcttccccgaggagtgggctgggagccccctctgctctgaagccatcctgggggtccactgtgggtgttcggcagtagcttctaggggactggccaggcccctccctggggctgcctaaggagaagagttgtttctggggtgacgtgggagcctgtgtgccagggcactggcccgcaagggtaagaacccggcgggctcccgcagcctaacagggagctgcctctgtcacgtgcctgcgaggtgggacacaagttggcttacaagttggttcgacatagccaaatccgcgtgccgcatttccacgctatggagtgctagtcttcatgattgtgccccttgacatgacacaataggaatagaagccgggaggccaagcaaaggccctctttgggggtgggggcgcggcggcatgtgaccctcgccgcctgtggggaagacctgccttgaggacagagcgccaggggtgcagaggccgcctgggactgcccggaggccggtggggagcgcgccagcgaaagcccgtgcgccctcggagccggggaaggcgcgggccatgacccgggttcgcccgcaaaggccgggcagtgccgcaaggcgtgggggcgcccccgcccggtggccccggggctggtgcgaccctgggcacgccggggccggggccggagccgggggtcgcggcggccggggagggggaggagccgcgcggctccgccggcgccccgcgggccagggaaagtgaaagggcggcggggcctcccgcgcgccgctccaggaagtcgcgagcaggaagcgcccgcggcggccgggccgggctgggctgcggagcgcgggcctcggcggcgcaggtgaggcgcggggccggggccggaccgggaggcggggaccccccgcccccccgcccgcacctgcggggcagccggcgctcaggcgccgcagccgctcagcacctgcggcgccctcagggagccgggcgcggggccctgcgcactcggagctcggctcctctccttcc

SEQ ID NO: 27529 - DNA, 2300 bp, Homo sapien
ctcagatattgtgctaatagcaacagaaaatgggctagaacatccctatactgcctttaaaaaaaaacctggctggactgacacaatagcagtttttaatcagccaatcacacgtcctatgacccatataatattcaccacctgccttggtcagttcaaagtgggatcaagaatgggctgggctggcagcacaggccaggcaccgttgtgagcttctacatacattaactcaatctttgccccaatcctatgacataagaactattatttcctccatgttgcaaaggggaaactgaggcccaaagaggtatagtaacttgctcaaggccacatcctagcaggtggtagagctggggttcagatcccagctggtgtctctctggagttccctgcccaccacgcagagctgcctctgctgtactcagagctgggactcagatccgagccggtctctctctggagttccccacccgccatgcatggctgcctctgctgtgctcagagttctggggccaagctgggcatccaggtagagctgttcagcacatcctgtgtcaactgtttcgatcatcaggtgaaattcgttatttggggcatataaacagatggcaacctctgaaccacaggagaggttgggctctgctgaacaggaaactagtcctctgttcctgaatgaccacgtcccaggattggcaggattcatggtaggtcctaaacttcagggccaggaaagctgagggcagcctgtgtcaattggcacagtgcccgggacacggaaatcctctgcctcgaggtcctgtgttgtgggcacagcacacgcacttgctctctcctaagcttggcctcgtctttgggaagggaacagcagggaagccagtggcaagcgggggcctcaatcccgcgcgcctgtgcacttcagcatagcggatgtcttctctgcacggaggggccaggtaaccaggaagggtctggaaaactgaaggagacctacctgaggtacatccccacggcataggcgcacaggaaggagtagtccagggccccaagcagctgctgatagttgttcttatctatatgaatttgaaaaccagcaggacaagctcagtattgtttagtttatgttctagagcacggctataaaacacaaagcatctgttcccgaaatcggggtgtacttagtgaaacgcgtggttttccacatagaaaacaaggcggtgcattttctgttcagtttcttgcaaaggaaaatgaagtcaccgcagtttcaaataatcactaaatataatacaggcgtcattcagatgagataaaatccccattgtgcatggtggctgcacatttgattgatgccttttcttttacgtgtccactggcttttctgcagcacacctgcctaggccagcacccacaccagcgcctcgtgtctctctcttcttctcacccacagaactatgccctgcaagtccaaaatacaaaatgcaaatgatcttcagcacatttccccataaagagaaccttctttcaggaggaacagctctgcgcacaggcactgtggacaccgtggcggtgaagtcatgtgctttttggtaggagagggctgtcatggaaatgcagttacatctgggaacagcattactgctgctaaagtgattaatagcaaggctggaaggacagccgcttcggctcctggacggaccgataatcgacttaccaaacggtgcccagccacagtcggtctcattgtcagggagctggtggggggcagcggacccagacttcctgttctggctgctgaacctgacgtcagcttcatcccaagcagtgcagtacttgtggagctcaccctgggacgtgatgggagggcagaagcagggagaggaagtgccctcagtgaggctcagcatggggcacagagaggaacagtcacccctcctctcccagcagcctgcccagggcacctgcaccctgcattctaagagggacacaaggcgctgctggcggtgtgtctgcaggacccacaagaatgcctgctggtgacgtttcagcaggactctccagcaaccccactcctgagcacgtgacgaacataagccatcttcatatgccaccagaagacgagcctcgggagcagttttagttctaagagctccaagctgaaagccgactgcctgtcatccttgaccacctgtccacaaggaagaaggggtacattttcctagattcacacaactgaatgctacacacccgtgaaaaagaacaagttacaggtccaggcaacaatgaggatgaacctcacaaac

SEQ ID NO: 27530 - DNA, 2300 bp, Homo sapien
atgtttcagaagccccgcagtggctgcagctatagattatcagaaaacgtgccagtgaaatagtaacatgccccccccatgtcatgtgtgaacacaggacagacaagaggagatgaacagtgcttaagggaaggagccgttgagtggggaaattggaaccctggctgagaggaagcggggatggtccaggagcacgtggagggctcttcgccccgggagccagagagagcgagaggaaggagaagacacacgctgggccgtcagggaggggcagaatccggcaatgtctcaaagaggaggcctttgagaatgggggaggctgaggagcacagaccacctattctggggatgcagatcccaccagaggaggatgctggcagcacgaggctggagactgaataccctgggagggaagttgaggaggcggtctggggactgtcccacagcctagcagggacagggcctgccccaagggccagtgactggggaggcagcaaggagcacccttggatcctgaggttccttccctgccttgtgacccccgcctcactttggccagtgagctgcacacagctgggccttctttctcccttcttcccctgtggttgcaaaaggggtgacgttctcaggacttgagtcttgaactgctgacatttccagtctgtttgaaaaaagcaaaattttctgtccatgccattgatgattcggaacggctgggtttgacccacagccccagatgccgtgcagtttcctctcccacacccggctggctcagtccaccttaaagcccagaacctgtacaaaacctcatggagggcaccctgagctggtgccgggaggcctctgtgtcctcatctgcagttctaaagccgtgtgacaggatgatcgagcatccaggcgccttccacacctccacttctgtcctgtgttaatctaactttatggcggaggggcccctgggggggtctctgaaccaaaggtgggataattagactgagcagaggaaagccacggtttttggttaagagtgttttcatcctttctgtgttacttgttttttaaatctgagttaactactaattgctcctcggtataaatcaagcttatgaagccagagtcccgtgcacgggtcctgttctgccatggtgtgtcgctgcgatgcgtgaaggagatcctcactgtttcacactccgttgtcatttcaatagatcaccttgatgccaaaaaggcgggggagctctccaccctgtttgacgtgggcggaatctttggtgagttcattaagacttgttctgctgcaacaataatttcgcaaggcgcatgatctctgagttgattcactgctcaggggaacagggttccccaaggtctcatatcccctgagtgggcccagcccaagagggtcaggccgtcacctgggggtggttttattgtctcccgtccctccccagggccctgactctgcacttgaacagcttccctcagaaatagcatgccagctggactcaggggctcatgcctgttatccagcactgtgggatgctgagttgggaggatcgcttgaggtcttcttgttatgaagaccaacccaggcaacataacaagacccctctctacaaaaaaaaaaaaaaaagcatagctgggtgtggtggctcgagcctgtggttccagccttgggaggctaggatgggagaatggcttgagtctgggaggttgaggctgcagtgagccatgatcatgccattgtgctccagcctgggtgacagagtgagaccccatctcaaaactaaaacaaaaaaagcagcagcatgtctcctgggcaggtgacagactggccaccttagtaccttgataggtaaaggggcttcgaggctggcctaaaacctgaacctgcagatgtctccaagactctcacatctgaccacaaccaatggaggcctgtggggaggtcagggctgtgagaaggctgcctgcccgtgatgcatggagagaggggcttgggaaaggaggaggccgttctccgagctcctgcagttctgcttcctccccgtgggctcatgccctgggacgtcagtgcctgaagcccgcctctccgttgcaggtgggatcctggcaggtgtgatctcagaccgactggagaaaagggcctccacctgcggcctgatgctgctgctcgcggcccccacggtcagccgtgctgccttccctgggccccaaagcctgcagacagtcccccactgtcctcctcgccagccagcatccttccatctggcccgtgctccactttcctgacaagcccg

SEQ ID NO: 27531 - DNA, 926 bp, Homo sapien
cgtgtggtgtgtgtgtgtatgtggtgtgtggtgtgtgtggtgtgtggtgtgtgtggtgtgtggtatgtgtgtggtgtgtgtgtatgtggtgtgtggtgtgcgcgtagtgtgtgtggtgtttgatgtgtgtgtggtgtgtggtgtgtgtgtactgtgtgtggtgtgtggtgtatgtggtgtgtgtatgtggtgtgtggcgtgtgatgtgtgtgtagtgtgtgtgtggtgtgtgatgtatgtgtggtgtgtgtgtggtgtgtagtgtgtggtgtgtggtgcgtgtggtgtgtgtatgtggtgtgtggtgtgtgtggtgtgtgtggtgtgtggtatgtgtgtggtgtgtgtgtatgtggtgtgtggtgtgcgtgtagtgtgtgtggtgtttgatgtgtgtgtggtgtgtggtgtgtgtgtactgtgtgtggtgtgtggtgtatgtggtatgtggtgtgtgtatgtggtgtgtggtgtgtgatgtgtgtgtagtgtgtgtgtggtgtgtgatgtatgtgtggtgtgtgtgtgtactgcgtgtgactacgtgcagccccaagccccgaggcgcatctgatggggcaggaacgggctgcaggttgccttgctcggctctgctcccagcgtcctccatgttctgagccactcattaatcagcttcctcatctgaaattgcgaaatcccctaaagctcaggtcctgtgacaacaggtacgggccagcattgggacaggctttgcctgtaagagggctggtctggggggacatctgaacccaattcaggaacacctcacaggtctgccagcagggctagacccggggtgagatccagggcaacagggtctgcctgggaagctcagctccggcactgcctggggcgtctctgcctacacaggaccattcctctcgcctggactcctcttggagttt

SEQ ID NO: 27532 - DNA, 2300 bp, Homo sapien
gttcactactgaattcccagtgcccagaacagcacccaacacgcagtaatgagattgttgacgaatggaagaccgcactgctccatggggatctgggagaggaaagggttcctctctaggcagctgctgaggcctcatcgatccagtatctacacaggggtccagtccagctcctaaaagtgcaaagtaattatagatgcgattattctcctgagcacagaatcagccaggcagtgtgaggggccagcctgcactggtgctggacgcacacagagtctcagagccacaccctccaccctcctggggaactgccctgcagaaccaccccccatgggcgggcactcgtccttctggggctcttggaggaaatggttacagaagactaggccagatgacaataagggatggagaataactaagtgccaagccaatgagccatctgctggtaagaactccatgccaggcagcacaggcggtcccaacagcacgatctctggattagcccaaatagcatcggaacatttgacaacaaattgaactactagtaatagtgctcacttcaatgagccggggacacagtatccccatggcgagtcagctggcccgctgtaaccacccagctgggtctccccaccccaaaggcctccaggctgtccccttctcatcctgtcacttgaaaagcacaactcatggtgccaaagctctgacacggactccactggagctgtgggcagggggtgccaaggtaccgagttccaagccgttgttatttgagagcgtgccccccgccatgagagcaggtggggggacataaagtgacacaggatggactggccaaaggctgaggacgatcacttacctcacaggatgatgccacccccacggacaggcaaggagctctcaccttccccaggaccccagctgccaccagagctccagatggccctgggggtgtctgtaaagcctgtgaccgtccaccaggtggagaccaggctggccaggggagggagaggaagtgaccactggccctggcactggctggccggctccagcaggcccgaaggggagggaggagcctgggtgcaccagactctctcaataagcagcacccagacacttaacagatggaaagcggtggcttggaactcacttccaacgaaacaatagcacatgctccggctggctttgacacttgcttccaaaggcgacctgcacccagggccaggaccacggcatctgagcctcctcccccagccgccaaccccattcccaatggaggagcccaggagaactgggggcggccaaggcagcccttccctgctccgcagatccagaggatgcccacagcccccttcccctcccgcctttcccacactccctgtagcaattcacacaagcggggaggggacgaaactgctgaatccagcagatagcttgtggcggggtaatcctcggtccggccccatacaggacagaaataaaatcgccatttcagctccgggcgcagctggaggaggctgacgccccctagttaggggaaggctgtgggtgaccgagaaggaacttttcccgttttctattcaaatgaaatgagggtggcggtcgcagcagggagagaggagcgaggggagttttcccggcggggctggggggtccacagcggcgcggccacgctcagcccagcgctggcttaggagggacgggctgcgtggggaggcgacggctccgggccgaaggggtcgctcagggctctgcacagctgtccagggggcatcgggagataggcagccgaccgggggctggagtcaagggaagaagaaagagggggaagggaggtgcagggagtgaagaggaggggagagaggagagacgggggagggaggggggaggggggagggggaggggcgggcgggcggccgggaggaggagcgcgcgagccggagtcggagcccgagcccgagcgcgagccgagcggaggagaccctgcggcgcgcggcggcggctcccgggcgtcccgggcccggtggcggcgcggctgtggttggctgagcgccgcgggccgccccccgcccgccccctcccctgctcccctcccccgcctcccgcggcggctggcgtcgggaaagtacagtaaaaagtccgagtgcagccgccgggcgcaggatgggatccggctcctccagctaccggcccaaggccatctacctggacatcgatggacgcattcagaaggtagcccctcccccacccagacaccccctcctccccccgggtgacagcgccggggccgggcgcggcgg

SEQ ID NO: 27533 - DNA, 2300 bp, Homo sapien
agctcaaaaagaaatattttcacttgagggtgcaacttatttgtcttgaacccatccctgactgcctgtctcccccctcaccctgaccacatctccccaaatcccgaagctggtcacgcaacgggagcattggccctgaacagaaacccgcagtacccctgaaaactcggtctagaaacaactaaaagaagaaccacagcattttattccgtttgctttagattctctgccaatttttttttttttttgagatggagtctcgctctgtcgcccaggctagagtgcagtggcgtgatctcggctcactgcaacctccgcctcccaggttcaaggaattctcctgcctcagcctccggagtagctgggactacaggcgcctgccaccaggcccggctaattttttatttttagtagagacggggtttcagcaccttgaccaggctggtctcgaactcctgaccatgtgatccgcccgcctcagcctcccaaagtgctgggattataggcgtgagccaccacgcccagccttttttttttttttaattttaaattgtggtaaaatatatgaacaataaaccctccctccccatccccctcccccagcccctgacccccactgtacattccgctttctatctccatgaaactgctgagtgcggggacctcacagaagtggaatcacacaggatcgccctgctgtgcctggcctccttcactcggatcatgccctcaggtgcatccatgttgtagcacgtgtccgaatttcctgcctttttaaggccgagcggtattccattgtgtgcgtggaccacattttgtgtttccattcaaaacggatgaatcgatgaaactgcctgatatttttaaagcctcagtcattttcattcttagttcttcagtttgcaaagggccggcctgttgtgatgggtttattgttgcatcttctgaaaaactttgtgagttcccgaaggcctctccacgtcttgagtcatggctgtgctgctttgcgaagctgtgtgcatgtctgtggtgtagcctgtgtacagcctgtgatgcgtcgcagcggaagggtagggggctgcccagggaagacagatgcgccaggttccgctccacggagctcagctaccagccctggtggagagcgcagatggggccgatttgtcatttgtctgcgcttgagcccagcagctgtgtggcctccctggggcaagtcattcaccctctctgtgcctcagtgtctctgtgaagtggggggaagtttttggaagattaagtgggctaatacgcgtcaaatgctagaacacactggcacttggtaaatgctatataagtgttatcatttttgtttgtttattatttatttatccatgtcatggatttaaggcagtctaatctcagtgcctggtggagacccgggcgccacccccccaggttgtcaagtggtccctgtgcctcccactatcgtccccagcacggtgccgtgtccgggcgtgcgtgaagggccagctcacctcacagctctgcttcccaggttagctcccatccaccctccccctacctgtttcctcaccgaaggaaggggcagaaagatgccctccatgccccttccgactgttgcagagggatggaggactatggtacatacacacatatacacgcacacacccaccacacacacacaccatgcacatgcacatcacacacacgcacacaccatgcacacacaccacacacgtacacaccatgcacatcacacacaagcacaccacacacaccaagcacacgcacatcatacacatgcacacacaccacacacaccacacaccacacacacgcacatcccacaccatgcacacacacaccacgcacacgcactgcacacacatgcacacaccatgcacacgcacatcacacacttgtacacaccaggcacatcacacacaagaacgcacaccacacacaaggacacacaccacacacacacaccaagcacacacacaccacacacacgcacacacacgcacacacccaccacacaccacacacatgcacatcacacacgtacacaccacacacagcacacacaaaaacacaccacacacaccatgcacatgcacatcacacacatgcacaccacgcacacgcacatcacatgcacacgccacgcgcctcacacacaagaacacacaccacacacacgcacaccacacacacgcacatatcacacacatgcacatcacatacatgcacacaccacacttacacacatgcacatcacacacaagaatgcacaccac

SEQ ID NO: 27534 - DNA, 2300 bp, Homo sapien
atgagatacttgaagacccggtgccaagcgacagtgttgaccccaggtggtcagtcctgcctggccccttccgagggatgcgccttcaccataaccatgtcacggacaggcgtgtgggcaagggggcatcgctgtatttttcacaactctttccactgaacacgacaatgacatttttcaccacccgtatgcatcaaccaaatgaaaagatgagcctgtgacattcccgtgcgtagagttacagcttttcttttcaaaacgaaccttcagtttggagccgaagcggaagcacgtggcgtctgacgtctccagggagacccgccgccctcgctgccgcctcaccgcgcttctgttttgcaggtaatcttcagcaagtactgcaactccagcgacatcatggacctgttctgcatcgccaccggcctgcctcggtgagtgcgcgctgcgggctctgcccggtgacgccacgcggcctcctcgccttttcgggatggctgggaggggcgggaagaggcgctgaagggcccgaggcaccggccttctacaaggggctcttcgaaatcaatcaatgcgcagaatcccgagggaggctcagccgccctccgggcctctctgcctccacaggtgatggctgtgtccacaaggaggaaaccgtcgggctgaattaaacagaaccgccctcctaagagtgtgggtttttctgccgggcgtggtgtctcacacctgtaatcccaacactttgagaggccgaggtgggcagatcacctgaggtcaggagttcgagaccagcctggccaacatggtgaaatcttgtctctactaaaaatacaaaaattagccgggcgtggtggcgagcacctgtcatcccagctgcttgggaggctgaggcaggagaatggcttgaaccctggaggcagaggttgtagtgagctgagatcatgccattgcactccagcctgggcaacagagcgagactccgcctcaaaataaataaataaataaaaaagagtgtgggttttttcctctcacttcttcattcacttttggagaaagcggggtggttgtgtgtgtttggtccccagccccacatcaccccataggtgccttttctacccagggggcttgacccagatcaacactgggtgaaaggctgacttcagaaatgggttgaaaagaccagtgatctgccttatcgagtcctcagagtcccacaggagttaatgtcctaaatcaacagtgtgttcgagccagtgaattttctaattatcagcaaactttccaaatgtaaagggtgagcaggagtagctttggctcaaggattaactttaaagttaggacggaggtggagaagggcaattgaagtttctcacagacaggtgagaaaagggagatgaaagtacacgtctgaaagtgcagcaaatggcagttttagccgcaaaaatagcccatggtctggggcatctttgggcaccatatatgaagcaatgtgccaataaataaatatatatacacagtattccgtatagcagccctgggatttgagtatcacctctatttcacagattttaacaatttacaactgaagatcagagattaacttggtcgaggtaacacatcttgcaagaggccccaaaacatgtgaggttggaggaagactcatcctaagcatttaaaactattttgtaggagagacttgcgcagttcagacggactcccaaaggcactggaagcggaaagacaaactatgagttcgtcatctgctgatataaatgttagttcctattttaccacagttttttaaaaaaaatctcccaactcaataaagtagacttgctccaattcccattttaaagtatttcagcatctacacgcacttaggattatacgcagctgtttaatttcatttacaatcggagtctcaatgccctggggacggcctcccacccttcccatcccaccacaccttggtcaggctggtcctgggactgtcctggttgtctcagggctctggccccatgtgtacattcaagtgtacatcccagagcacactatgggcgaaaacacgggcttgggtgtgttttccaggaacacgaccatctccctgctgaccaccgacgacgccatggtctccatcgaccccaccatgcccgcgaattcagaacggtaagaggctccggccgcgctcctcggggtgtgcctggcacttctctccatgacatgggaggctttctgtgattttgtaaatgtgctactgcagaaaggtgtgaattgacagcagagatggagagcgagggtaggag

SEQ ID NO: 27535 - DNA, 2300 bp, Homo sapien
gctgcttctggccgccagctcctccctcatcttcttaatgtcactcttgcatttctcaatctccaccacttttagtccttccactggtgacagagagagagacagcaagggggttaccacggacgaatgtggaggatctctcaaggctggtaactaagggctccctgtggctcccagggaggaatatacctcagtgcagaggtccccacacctgccctggctgccgatactcaggttttgcctgcacttccgcgcttagctcagccacaactgactctatcctcgcaggcatgtgccgtggccaccgctgcactaccgcatccatccgggcagttttcagaaggcagaagctcctccccactctccactccctgaatctcaactctggcacccactttttgctccatacccctaagcaccagctgaggacatgggacaaaggcgtcttttatcccaaaaagaaaagggggcacatgtggtgccagagcattaaaatgcagtgaacggcaaagcgttttcagcaaggattacgatctcattatgggaaaagcttttcattggaacgtccttccagagcagtttcaccaggagaaagtgttgacttaaaacagaagagaaataaataggcaaagttgaggatcagcagaacttggacttgatcacattcctggagttgaaactgccttggccaaattatgactgagacagtgaaagagatctaacttagcgggctccatcttgcttcgaacctccaagctgtctgtgttcattccttggctgaactaactttgggagaaacttcatttgtagtttatagtttagacaaagactgtaacagccctttcccaaagcagacctgcttcttgcctggggacgagactaacagccacaggattagaaattacagtttaagagtcacgcagctggagactacgagattctgaccctccctaaattgctcctaagatcagcgcttgagatattttggagaccctgcagttgatggatcagctggcaccacccagatagataaactggctcgtctggtcttctggccccagtcaggaactgactcagtgcaagaagacagctgcagccaggcacagtggctcacgcctgtaatcccagcactttgggaggctgaggtgggcagatcacgaggtcaggagttcaagaccagcctggccaatatagtgaaaccctgtctctactaaaaatacaaaaattagccgggcatggtgtgccagtgcctgtagtcccagctactcgggaggctgaggcaggagaatagcttgaacccgggaggcggaggttgcagtgagccgagatcacgccactgtactctggcctgggggacagagtgagactctgtctcaaaaaaaaaaaaaaaaaaaaaaaaaagcagacagcttcaactccctatgatttcctccctgaccaatcaatcagcattcctggctcactggcttcccaccacccactaagttatccttaaaaactctgcgccccgaatgctcggggagactgatttgaggaataataaaactctggtctcccgcacagccggcactgggtgaatggctctttctccattgcagttcccctgtcttgatgaatgagctctgtttaggtagcaggcagggtgaaccccttgggcagttacagagtcccactgcaaaggtgtacctcaacagttaggatactatttttcaaccaaaaacaaactggagcttatgcctccgagcgagcgttaaacttcaagatatttacccttggctgactgcacgtttaccccagaaaagctgccatgaagcaagcagctttgcacggcttttcaattagagttggttcataaaccaattgaaataaaaaagattagctttgttactttgtaatcacaccttagtttttatgcaaaaggatactcccacgataccactctattccccttttcatgaagtttggctctgaataactgctaaaaataaaaagcaaatgttttctaaaggaaaaaccaagcaactcagagcctttggctagtttgtaacaactccttcccaccccaaaggaagtactgcagctccggaaagaaactctcccagtacagtggcccagggcagactagctggaatcagcctcccgggtgggtttcgaggcgtttccagggtcaggggtcaagtaggggcatgttcccgggacactgcttctttctgccagaaggacgaagaatctggagagtgcaatatttggatctggtcctgctgatgtgtttctgtgctacagaaaccttctccacccct

SEQ ID NO: 27536 - DNA, 2300 bp, Homo sapien
aggtggagatcttgaatcatgggggcagttttccccatactgttctcgtgatagtgagtaagtctcacgagatctgatggttttataaatgggggattgtcttttgcctgccgccatttaagtgactttctccttctctgccattctccatgattgtgaggcctccgcagccatgtggaactgtgagtcccttaagactctttttctttataagttacccagtctcaggtatgtctttattaacagtgtgagaacagactaataagctgggcaacatagcaagacctcgtcgctacaaaaaaaaggtgttaaaattcctatttgctgaaaaatacaagaatggggaattttttgtttcatctcattggctaatagaccccctcttttcacaccccaaaaaatgaaaaagttccctcattgcagacctcggcctcagctgttttcaacgcaccaaaatctaaggacgttttcctgcttgtcagcaacacagaaaatgcacaaggctcctcagcaagctcacctgtgctctttgacaagctcggccgcagcgatgtctctgcaaagggcagaaagtgggctcttgcctcttggcacccctgaggccaggctgctgacacctggggcactgccctctcctaagtgaacctcttttcatgtgcatggtctcccagcaggagaaaaactgcagcaccagccagaaaagcaaagctccagcctccactccccagctcagttcacccaagagcagcaggcggccagtcccaggggctgcactgctgcaaacctgctcaaaacctccagccgccacgtggcaacttgctccccagctctgagagtgcaggaccggggcgcagagacgacagaagaggctttaaatatgcagaatgactgtctaggtcaacgcacaaaaggaaagggccccaggtgtgggagatgcaaggggtgagagggaaagctcagaagagacgtgttggagctgctggcctgcagcagctcccagggtccctgcacagctgctgagattgggcagagcaagtacacagcaagtagacaccgcagacagttagagcacactgactcctgctcccagcctgtgggcaaccgccgcacctcagcatcatgtagaaaaatcaccatccccaaagtcattttgacctcagcctgctgggaggaagagccaagccaggggccactgatggcaaagcacctgcgtggaaactggcactcgctgtcttttctgccaccttctaccagggaaccctttgagcacgggccactgtgactggggaggtggggcttgccccacgaagctgggggatctgtgtctccataatagaaaggccacctctctgtcctctgatcacagagtggattcacagctgctctcggggctggcaggtgggcaaggcagacagctcccggcagctggactcagcctctgggtggcatctcccacggcccgtggctcctgcccagcagatctcaagggcactccaggagaccgatgagggttccagtgcttccaagaagtatctagctgcctgtgtgtgagaatgcagagatgcccaagacaggagccttggcctctggcagatctagggatgccaggaattttggagtgtgagtggcaaagagggacaactaaagggacacacatgaaaacagcccactcggccccacaaaactgcatctggccacgcatgaggcacctggcactcagagaacgtcagggcgcctaaaagtgatcacctccctcccttccagcaggggcgcccccacttttctccgagtggtttggcccagtgtcctgcccatcacaaaccagacagaggacatgacttcaggctgctgtgtcctcccatgtgttagggcctccgagggcccagggctgtggcccgtgagcgtggcctgcctctatcctccgagggcccagggctgtggcccgtgagcgtggcctgcctctatcctccgagggcccagggctgtggcccgtgagcatggcccgcctctatcaagtgcagagctggaaggctgcaggagcctcccccgtcatctcatgagtcccccactcacgaccatgcagcccactcagaccacgacctgccgccacatgcgggaactgctggctccctcgtgcccgcccggggctgaggactgcacgtgcagccacagatgcatccggccctcctgccccacagcctctatgaaggccacataaatggcaccaagtgtctctgtctgccgatcagcatcccctcttggcttcacagcagacgcatctgcctttcaggactgccttg

SEQ ID NO: 27537 - DNA, 2300 bp, Homo sapien
cattgatctggaaacagtgctgtctgcaaagctgaggcccactcctctctgctggggatcaggggtttcagaaggcaggggccatgctgggccactgtcctgtacaagcagcctggcctccttcacgctgccagggcatctggcgcagggcatgctttctcattcatagtctgctttgaaagtcttggttttaggagaggttcaggttggtcttgctggcatcttcacctaaaatagggtctggcagacaggcccatgcgctgcatcctgcccacggcctgatagatggcctgtgaatggcttttttacattttaaaagtggttgaaaacaaattaaaaatatatttcatgacatgaaaatcatgaaattcacatttcattatctgagaataaacttttatggatgcagccatgcctgtctgtccatgtcttatctgtgtctgctttgtgctacggctgcagagtggagtggctgggactgagacggaacgccctcctcacggggccgcgtctctccaccaggaccgcggggctactctgaggctctgcttcttccccagcggggttggcttcctgctattcctcagcatcctgccttggtcctgagttggtccctctgccaagagccgtttctgtgtctcagtggatggcgcagctgccttcttgctggtaccttgactgatagactggttcctgttcacctgcccgaagtcatcccagaaatacctcttacagttgcatgggttgaacccagctccgcgtgtatttagagttttgtctcttgccccttcacccagaacagcagcacccaccaccttcccgtcccctgtgactgcctcgcaactgggtctgttctgtgagatgtcgccaccctgtttgccatctgggaggatctcactccttcaatttaatctgctctcttccgttatttttttagtttctatgtattttacttttaggacattccttggactttgttctacctctttaattgatgaagaaaatttggtcattgtatctggtttttttttttgagacagagtctcgctctgttgcccaggctggagtgcggtggcacaatctcggctcactgcaacctccacctcactgcaacctccgcctcccgggttcaagcgattctcctacctcagcctcccgagtagctggattacaggctcctgccaccacgcctggctaatttttgtatttttagtagagatggggttttgccatgtttgccaggctggtctccaactcctgacctcaggtgatcctctcgcctcgcactcccaaagtgctgggattataggtgtcagccactgcacccaatctattgtatttaattctaagcactttcttccagacggtctcactctgtcacccaggctgaagtgcagtggtgtgatctcagctcacagcagcctcaacctcccaggctcaagcagtcctcccaccttggcctcccagagtgctgggattacaggcacgagccattatgcccagcccgtctttcttcattttgattacagtgtgcgtactgtacatccgagaagtgcatgtgaaatgctggaactgggatttcagcaactgaatgcacgtgtgtgactacccacgagaagcaggacacttagcacctgctgagaagcccccacgcccatgttcccttctaggcactgcacaggcatgctggccggcctgacctcagtttccctcttgctgtggccgcttctgctccactctctgtgaggctcatccaccttgttgcctgtggttgtggattgttcattctcagtgctctgtatgccaagtactccattgtgtgaaaatcccacagcacgttcattctattatcaatgggcatttgggtagtttccacagtttggctgttaggaatagtgcagtgatgaacatgctggcacctgtcttctgttttttttttatttttagagacagggtcttgctctgttacccaggctggagtgcagtggtgtgaccttggctcgctgggcctcctgggctcaagcgatcctcccacctcagtctcctgagtagctgggactgcaggtgtgtgcctgcgtgctggctaatttttgtagtttttgtagagatggtgtcttgctctgctgcccaggctggtctcgaacttctggcctcaagcagtcctcctgccttagtttcccaaagcactgggattacaggtgtgagccactgcccccggccagcacccgtcttctggaacatttgtaagcatttctgttgggtgtgtacttgcgcgtggaattgctggctctcagttatgc

SEQ ID NO: 27538 - DNA, 2300 bp, Homo sapien
cggaagccccacaaccatgtgctaacctgtgtgtttggtttgtgcaggacggcaccctgaggctctgggagtacaggagcggccgccagctgcactgctgtcacctggccagtctgcaggagctggtggacccccaggccccccaggtagctgcttctgttcactcctgggcgactgagtgcttgtagacaccggcagtcgcctgacttgagtggaaaagtcacttcgccgttggaaacgtttgctctcaatgccagacttcctcctgtgtgagggaaatctcgtatttcaaattctgaaggtggctcgtcatgtcagtgggaaataatttgtctccctgttgcatgcaaacagttaatgtacaggaaggcctctaatcctgctctgaagtggaaggaatggaggtgcttgagcatgcacctttgtgggtctgccagccaggtggggcaggggtggggccaggcccactccagcattctccggccagcttggagcaatctcatgacaccctgaaagcccaggccttggcaaagtttcccgccaaacggtctgttccatttcctagagaactgtgtggtgtggcctctgccccctgccaggcagctgtgtaagagaggaccaggccttttccttcatgcttcacgtggactcaggttcctggaagtttccttcatttaaaaaaaattttttttttttttttgagatggagtcccactcttgcccaggctggagtgcagtggtgctatctcgactcacagcaacctccgcctcaggctcctgagtagctgggattaaaggcgtgagccactgtgcacggcctcttcttcatttttaatatttcctctgccaggaactgtgggagctcacagggcagttgtatgtgtagctctcatctcttcctttcccctgtgtcctccgctccctcttctcctcactgtctgacctatcttgttggctttggaggctgtcgcaggccctgcagggagtgccagaaccactggggggcttttgtcatctgcttgggaaacagggaatcagctaccctcctttccccactgattccagaatgttccagtgctgtttcctcttccttgatatgtgggggcgtgagcgtccttcggtcttgctcttgttggatcagagcgcccggcgtcgggcccctgcaggtggcgtgaagttaatgggcttcttctccttttagaagtttgccgcgtccaggattgcattctggtgccaggagaactgcgtggcgctcctgtgcgacgggtaagctgcggcggcacctctatggcctccggttctgcagacctgcagggggaagagttagcgggttggccactggcccacgtcctcaatgaagaggtcctgaacggtggtggtattggtctagcacctccctctgagaatgtcacttttgatgactgctgctgcatgagggtgagggctcctctcagccagcgctcttcaacctgacgttgaactcccctggcgtaaagagcaccagcagcctctgcctggccttctgagatgacagactttcccctgggccagtcgtggtggcatcacctcactcccggctcggggctggtcggatgggaaccccctggggttggcggtgctgacaaggtgggtttaggggtggagtgcagttctgctgcttcttcccgagtgacttgtgtgtgtcaggaaaggtattctatttggtgctttcggcacttttcatcttgtccttatgacagcctggggaggtctcttagctcgttctggaagtacgcaggtgtgagaggagagctgcgcctgagcccagggcctgcgtcctcctgccctgcctgcctgtaccgtgctggttagctattgctgcaccacgagccactccagagcttaggacttaaaaaagtgtacgtcaccccatggtttccccggcgccggcatttgggagtggcgcagctggggctttcagcgtaggctctcctgaggtggcaccggcgagggctgcaccgtctggggtgctggctgcagagcggagcccgtgggcctgcagtcctagtaatcatgctctctttcttcgtggcaagcactcctgtggtctacatcttccagctggacgcccgcagacagcagttggtgtacaggcagcagctggcgttccagcaccaagtgtgggacgtggctttcgaggagacccaggggctgtgggtgctccaggactgccaggaagcccccctggtgctctacaggcctgtgggcgaccagtggcaggtgagactcggcaccttccagatgtcctatgccctgccttt

SEQ ID NO: 27539 - DNA, 2300 bp, Homo sapien
agttgtatacttgacaagaaaactgtctagatacaatatttcagggaacagttaacaaactttatttgcttaatctcttattggagtacgtcatactgcatagttctgtgggaaaaaaaagttcagtaaaacaaatgagggataaatactcaacaggaattaatatgctattcttttaggcaccacaaaatctatgcgacatggttataagaaattacgggccgggcgcggtggttcacgcctgtaatcccagcactttgggaggccgagatgggcggatcacgaggtcaggagatcgagaccagcctggctaacacagtgaaacccccatctccactaaaaatataaaaaattagccaggcatggtggcaggcgcctgcagtcccaactactcgggaggctgaggcaggagaatggcgtgaacccgggaggcggagcttgcagtgagccaagatcgcgccactgcactccagcctgggcgacaaagcgagactcctcaaaaaaaaaaaaaaagaaaaaaaagaaattatgttctgatactgttgagcgttcagtgggattctgtatacaaatttcaaagagccattactatttagaaacatatctcacctacctgaaagtgttcccatgaccccaggcacttaccaacataagaatcacccattttccatactgaacctaaacttcggtttatcccatcctcaccccctggcacgtatcttgtacatatttatagcctttaaagcgagtgcaccaaaaaactttccatatggaaccgtggacttgtcttccaagtcagaaactccaccagccactagaatttcctcaaaatgcaaagactgaaggtaagcaaatcatgtctaatatatccacagctcactctggcagatattagaccgtgagtctctaaaacaaaatcatctgggatatgtgacgggtttctgagtacaatttttgtgagacctaacttaacatcgaattggctttctaaaaccaaacgaacaaaaaatatacagtatatctgacagacacgtcgtccgtttcaaatatgaaatcacaaataacctgggaaaggaaacgaggggctgaaactgacagcactactaattgctccgagagtcctgagttaggactgttccatcaacaaacatttactaagttaaaaatcccctgcgtcgtcctagcactggcgatacactaaggaaggagaataaaattacggaaagcaaaacccgagccgtgcgaagggccactagggaggtgcgcactgcgagctccacgtgcacccttgggttgggtaagtgtcggagatgacttggagccctaaggagcaattaaggccaggtgagtggatgcaggccgggaagagggaacagacaaccctgcaaaaagagggagcgcgcttggaggtcagtgagctcgcagtgagtaagcccctcccttctcaccagggagacccgagacccgcttcttcccagttctgcagagcgtgttcggccgggccttgctgactggtcagcgtcgccccacgtgctctacctacccggtccccgccggcgccgcggagaccggaagcgacccggcggcgctaaccgggcaagaacaccgcagaccagccatctagtgcaaggagcgcgccggagccggggagcggacgccgagagcggacggcgaaagcggaccctccaggcgcagagacgcggccaggccgagactgcggcggaggactcgtgggctggagcggagttccccggggtcaccccagagtgggtgcgaccaggcggtgcgggagaagcggggtcgccaggacccgacgcgcgcccgcagcctggtctccctgttccaagaccaaggccccctcacctgcttgctatggaggtggccaggaatcggctgccgccccgcaccaccaacgtctgcccgcacaacgccagtcccacagagcccgccatgtacccgcccgcctcaccgccatacacatgtgccagcccagagcctcttcctgtccgcaccggtcggtgacgccaggcgcagacgccgagagatgacgtataccccacgtaccgcgcatgctcaaggacgagcctgccttgagcatgcgtgaaaggtgctgtgaccgccctccgggttgtggctggtggccttcggtgtttcgggtttggcagttcactcaccaaggtgatctgatggagtgcacttcgcacgattccaagtacttgcctaatgttcatcctttcctctagacggggtagggctggttctggatctttttccgcggtagctggagagacgtaggacct

SEQ ID NO: 27540 - DNA, 2300 bp, Homo sapien
ctttgggttgaagctggggaaagtattattagacccaatagttggtaacaagttctcaaagtaagtcataacctgggccaaagatcaaattcagagtggcgctaataaaatatggccttaagaataatgctgaagtcaaggtgatctcaatgatttaaatgttaacaagtggctgggcgcggtggctcacgcctgtaatcccagcactttgggaggccgaggcaggcggatcacaaggtcaggagatccagaacatcctggctaacatggtgaaaccccgtctccactgaaaaatacaaaaaattagccaggcgtggtggcgggcgcctgtagtcccagctactcaggaggctgaggcaggagaatggcgtgaactcgggaggtggaggttgcacttcagcctgggcgacagagcgagactccgtctaaaaaaaaaaaaaagactagtgggagtggcttcttgggcatggagagcacctgaatcagattcttgagaagcccataaagcttttaagggacttgtagtgaacaaagcaccaccagctgccaaaatgtggacagaacagtttagagtgaaaaaaggtctgtgggctcacaatttgctaatgacaggaaggaggttgagaaagtttctcaaagggcacattcttcaacatggccaagaaggtgctggaaaaggagggacacccaagagggcagaggcaagagctgtgctgagatacagcctggggagatactcccaggaagcagaactcgggcctggttaagacttcttattcttgtagggcctgaaaacatcttccagtaggatttcagaattgctttggaccagtgattactgtgtctcctcctcttctcattttcacatgcaagtatttattgtggttatctggtcccggctcaccatcatatattgcgtgcacgggagagaaaattaatctttttagtttgtaagtctctggatcaagaggagctgcaccggacaagccaatctaaaacagaccgtgagatcctagattttgtgcctgatgctgggattgtaagaggcttttggggatcttgggatgaacactggaaactaaccatagtttgggttgaaaatatcactacagttcggagattttaaggcatctgtggcttgtctaagtgcaaagattcagtaggcttacttctagcgacctcagacttgacgccacccgagacaccctcacccatgaccacatcttggacattttttttttttttgagagagagtctcgctctgtcgccctggctggagtgcagcgggggcgatctcgactcactgcaacctccgcctcccgggttcaggcaattcttctgtctcagcctcccaagtagttggggctacagtcgcacgccaccacgcccaacaaatttttgtacttttagtagaaacggggtttcaccatattggtcaggctgctctcgaactgctgacttcatgtgagccacggcccccggttcattcacttcttgaaggatcatttaccaggcatctagtagccatcatcaggtcctacgtctctccagctaccgcggaaaaagatccagaaccagccctaccccgtctagaggaaaggatgaacattaggcaagtacttggaatcgtgcgaagtgcactccatcagatcaccttggtgagtgaactgccaaacccgaaacaccgaaggccaccagccacaacccggagggcggtcacagcacctttcacgcatgctcaaggcaggctcgtccttgagcatgcgcggtacgtggggtatacgtcatctctcggcgtctgcgcctggcgtcaccgaccggtgcggacaggaagaggctctgggctggcacatgtgtatggcggtgaggcgggcgggtacatggcgggctctgtgggactggcgttgtgcgggcagacgttggtggtgcggggcggcagccgattcctggccacctccatagcaagcaggtgagggggccttggtcttggaacagggagaccaggctgcgggcgcgcgtcgggtcctggcgaccccgcttctcccgcaccgcctggtcgcacccactctggggtgaccccggggaactccgctccagcccacgagtcctccgccgcagtctcggcctggccgcgtctctgcgcctggagggtccgctttcgccgtccgctctcggcgtccgctccccggctccggcgcgctccttgcactagatggctggtctgcggtgttcttgcccggttagcgccgccgggtcgcttccggtctccgcggcgccggcggggaccgggtaggtagagc

SEQ ID NO: 27541 - DNA, 2300 bp, Homo sapien
gcagtggggaaactggtagtgaacactggaacaatggtgaggaaaactacgggaggtggacaaatggtgaacaactctatgtcacggtgaaggatttgtaaaattgttgcccttcagtaagatgggcagagaaaaaggcaactactgaactctgggacttgaaaaagatcatatcagtataatgttgagattaacctgtgtttcttttgcttgaatatgttgagacacttatagaaaagagtgtggttaaaaacaaacaaacaaacaaactggccagcagaatttagagcacactttgggttgaagctggggaaagtattattagacccaatagttggtaacaagttctcaaagtaagtcataacctgggccaaagatcaaattcagagtggcgctaataaaatatggccttaagaataatgctgaagtcaaggtgatctcaatgatttaaatgttaacaagtggctgggcgcggtggctcacgcctgtaatcccagcactttgggaggccgaggcaggcggatcacaaggtcaggagatccagaacatcctggctaacatggtgaaaccccgtctccactgaaaaatacaaaaaattagccaggcgtggtggcgggcgcctgtagtcccagctactcaggaggctgaggcaggagaatggcgtgaactcgggaggtggaggttgcacttcagcctgggcgacagagcgagactccgtctaaaaaaaaaaaaaagactagtgggagtggcttcttgggcatggagagcacctgaatcagattcttgagaagcccataaagcttttaagggacttgtagtgaacaaagcaccaccagctgccaaaatgtggacagaacagtttagagtgaaaaaaggtctgtgggctcacaatttgctaatgacaggaaggaggttgagaaagtttctcaaagggcacattcttcaacatggccaagaaggtgctggaaaaggagggacacccaagagggcagaggcaagagctgtgctgagatacagcctggggagatactcccaggaagcagaactcgggcctggttaagacttcttattcttgtagggcctgaaaacatcttccagtaggatttcagaattgctttggaccagtgattactgtgtctcctcctcttctcattttcacatgcaagtatttattgtggttatctggtcccggctcaccatcatatattgcgtgcacgggagagaaaattaatctttttagtttgtaagtctctggatcaagaggagctgcaccggacaagccaatctaaaacagaccgtgagatcctagattttgtgcctgatgctgggattgtaagaggcttttggggatcttgggatgaacactggaaactaaccatagtttgggttgaaaatatcactacagttcggagattttaaggcatctgtggcttgtctaagtgcaaagattcagtaggcttacttctagcgacctcagacttgacgccacccgagacaccctcacccatgaccacatcttggacattttttttttttttgagagagagtctcgctctgtcgccctggctggagtgcagcgggggcgatctcgactcactgcaacctccgcctcccgggttcaggcaattcttctgtctcagcctcccaagtagttggggctacagtcgcacgccaccacgcccaacaaatttttgtacttttagtagaaacggggtttcaccatattggtcaggctgctctcgaactgctgacttcatgtgagccacggcccccggttcattcacttcttgaaggatcatttaccaggcatctagtagccatcatcaggtcctacgtctctccagctaccgcggaaaaagatccagaaccagccctaccccgtctagaggaaaggatgaacattaggcaagtacttggaatcgtgcgaagtgcactccatcagatcaccttggtgagtgaactgccaaacccgaaacaccgaaggccaccagccacaacccggagggcggtcacagcacctttcacgcatgctcaaggcaggctcgtccttgagcatgcgcggtacgtggggtatacgtcatctctcggcgtctgcgcctggcgtcaccgaccggtgcggacaggaagaggctctgggctggcacatgtgtatggcggtgaggcgggcgggtacatggcgggctctgtgggactggcgttgtgcgggcagacgttggtggtgcggggcggcagccgattcctggccacctccatagcaagcaggtgagggggccttggtcttggaacagggagaccaggct

SEQ ID NO: 27542 - DNA, 2300 bp, Homo sapien
caaaaattagatgggcatggtggcggcgcctgtaatcccagctactggggaggctgaggcaagagaatcacttgaacccaggaggcggaggttgcagtaagccgagattgcccctgcgccactgcactctagcctgggcaacagagtgagattctgtctcaaaaaaaaaaaaaaaatcaagatggttcatgccccctcaaccataggtaccccacctttaccaacctggccggtgaccacgccagaggaggtcttttctttttgtttcttcttgagtgttgcaactccagcaagatgtcaacatctgccgcatgtgcccgctggtggtggtgtggaagtggggagctccaggtccatgaaggagggtgacgtggatcttccaattccagatcaggatccccaaatttgttactaagctgtgaattattaagcacacctcacaaaggcgagcatgaccttttccctggacacaacagaatgagcctagtggtgaagaaaaaaaaaatctggccgggtgtagtggctcacgcctgtaaccccagcactttgggaggccgaggcgggcgatcatttgaggtcaggagttcgagaccagtctggccaacatggtgaaaccccgtcgctactaaaaatacaaaaattagccgggcgtggtggctcatgcctgttgtcccagctactcaggaggctgagggaggagaatcgcttgaacctaggaagtggagcttgcagtgagcctagattgtgccactgtactccagcctgggcaacagagcaagactctgtctcaaaaaaaaaaatttaggccaggcacagtggctcacacctgtaatcccagggctttgggaggccgagacgggtggatcacgaggtcaggagatggagaccatcctggctaacacggtgaaaccctgtctctactaaaaattacaaaaatttagccgggcgtggtggcgggtgcctgtagtcccagctactcgggaggctgaggcaagagaatggcgtgaacccgggaggcggagcttgcaatgagccaagatggcgccactgcacgccagcctgggctacagagcaagactccgtctcaaaaaaaaaaaaaaaatttaaacaaaaaaaaaatcttttggcatttttttttctccctttagggacaaaggatcccttctcatgattatcctaagatctaaggttattctttttgcctcccagggtggatggtggcagatgcccttgcatttacttgatagcagactcctctttgataaaggcctttgataaaggcctcattccgccagtttatcttgccacctcaatgaatcgctagctgtgtcaggaatccctacacaatccatttaaatgactgtggcagggcctcttcccctgtggaagctgaaggtggcacgtccatctccgatgaaatgcgaatggggctctgggcacgcggcggaaggcagagaagaggcagagaaagaagctaataactaattacaccgactccacaattacgactaacgttggggacgaactctttgctaaataaacatttaggtgaaacaaagcttccatttccaatcggcctaactctggtattagcgttggcaggggccatgcaggaggggcagtgagcagtggtggccgcgttgccgacagagggtgagggagctgggcgcgtggtgtgggcgccgaggtcccgagctgaagagctttaaaacctctcaaaacacagaactatcaatcaagtaggaccagactgtgcccccagggaaggtcgcagatttaaggctgcgaggacaagggcaaagaagtgcgaagcgttcgggtggacatgcaagccggcccagcgcagacgcctgagaggggtgcccagcagcccccgcaggtctccgccgcgcccccgccacagcgcccaggcgcccgcagggcacagggatcggcaccagccggtgacgtgtccctcacgctgctgcctgtgattggtggtcccgatccggggcgtggccccaagggaggcacttagccctactggggatgcgcgcgcagacccacggcctctgctccgcccccagctggcctgtaattggcgcagtcggcccaaggggcggctgttcaggcgcgggtgcgcgcgcagctgctgtggccctgcttggtgcgcccgctgtcaccgccatggctgccccgtgtttgctgcggcaaggacgagccggggcgctgaaggtaaaggaggagccagcctgggctggctgcgcggccccgagcctacgtaggggatggggtgagggggcgcggtgctggtcaggtcc

SEQ ID NO: 27543 - DNA, 2300 bp, Homo sapien
caccaccacgcccggctaattttttgtttttagtagagatggggtttcaccatgttggccaggctggtctcaaactccggacctcaggtgatcggcccgcctcggcctcccaaagtgctggggttacaggcgtgagccaccacggccggcctcacacatactgattgatgtctcatgtctccctgaagtgtatgaaagcaagctgtgcccgaccaccttgggcacacgccctcgggtcctcctgaggctgtcacaggcgcgtctgtaaactcggcaaaataaactttccacattggctgagaggtgtcttggaagctttgggctcacacactggctgcctgtgtcagtcccccagcgaggcacagccgtccccagcttgtctataaccccagatttgtcccgcccacagtattccctaggtgaaaagatagcccagagcgttctgtgctctgctaggcttgcacagagagacctgagctcgggacttcactcgtgccctccacccatgcccagcgcaattgtttagccatgtagtccctgaatacctgcttcactcattacaatcacgtttctaaatttgtggaatttgtgatacaaagaacaagccaataaatcgcttatgtattttaatgtaaattgttggcgaggaatttagcaactgcctcttttttcctttaaaaatccacttgttggccgggcgcggtgactcacgcctgtaatcccagcacttcggcaggagaggcgggcggatcacgaggtcaggaaattgagaccctcctggctaacacagtgaaaccccgtctctactaaaaatacaaaaaaattagccgggcgtggtggcgggtgcctgtagtcccagctactcgggaggctgaggcaggagaatggcgggaacccgggaggcggagcttgcagtgagccgagatcgcgccactgcactccagcctgggcgacagagcgagactccgtctcaaaaaaaaaaaaaaaaaaaaaaaccaagaaacaaaaaacaaaaaacccacttgtgggcaggtgcggatggctcatgcctataatttcagctctttgggaggccaaggcaggccagatcatttgaggtcatttgaggtcatttgaggtcaggagtttgagaccagcctggccaacatggctaaaccccatctctaccaaaaaaaaaaaaaaaaaaaaaaaaaaaaaaattagctgggcgtgatggcgtgcacatgtaatcccaggtactcaggaggctgaggcaggacaatcgcttgaacccgggagatggaggttgcactgagccaagatggcaccactgcagtccagcctgggcaatagagttagactctgtctcagaattaaaaaaaaaaatcccacttgaggccaggcacaatggctcacgcctgtaatcccagcgctttgggaggccgaggcagatgggttacttgaggccaggagtttgatgccattttgggtgcggatgtggaaaatctgagacaggtttttttttttgagatggaggctcgctctgtcgtccaggctggagtgcggtggcgcgatctccgctcactgcaagctctgcctcccgggttcaggccattctcctggctcagcctcccaagtagctgggactacaggcgcctgcaaccatgcccggctaattttttgtatttttagtagagacggggtttcaccgtgttagccaggacggtctcgatctcctgacctcgtgatctgcccgcctgggcctcccaaagtgctgggattacaggtgtgagccaccgtgcccggctgagacaggtctcttgttaatttagaaagtttattttgccaaggttgggcagggacctgtgacaccgcctcaggaagtcctgattgaaagattctcccaggggcctgaaagcttgagggaatgagtaactcctcctcctcaggcccagtcccaacgctcaaacttgcaccagcagcaagatagcagaggcaggaaaagagctggctggaagacacatactctctgaagatcaagggggaggccgtccgcgtactacatagcagtcacgtcaggctgggacaattcctgtttacagagaactataaaagccctgccccctcctcacttggggctgatgccattctaggcctcagtctgtctgcatccaggtgcttattaaaacagtgtgttgctccacaccgcctcgtgttgtctgttggcgcgctctccgggttccaaccaatgcaagagccttggggctggccctgaaacctgcgaggggcttccgtccacgtccccagtggacctaccaccc

SEQ ID NO: 27544 - DNA, 2300 bp, Homo sapien
acaccttgtgatattattcgtaatatcctagcaggatgttactactaatgtcacaatacgtatataccctctgatattattcattatatcctcacggattattactcctatgtcacacggggtgtactccctgtgatattattcggaatatcttagggggattttgcttttaatgtcacagggggtgtacacattgtgatattactcgtgatgttctagaaagatgttactcctaatgtcacagggggtgtacaccctgtgatattacacaggctaaccccctgtgacattattcgtaatattttagcaggatgatactcctaaagtcacaggaggtgtacgcccagtgatattattcagaatattccagggggatgttactcctaatgtcacaggtgtgtataccctgtgatattattcacaatatactagcgggatatgactactaatgtcaccatgtgtgtacaccttctgatattattcataatatcctgggaggatgttactcctaacatcacaggggtgtacaccctgtgttattattagtaatattctaaggggatttaacttttaaaatcacagggggtgtcaaccctgggatcttattcgtaatatcctaggaagatgttactcttaatgtcacatggggtatacagcctgggttattatttggaatatcctaaagggatgttatcttaatgtcatggggtgtgtacactccttgatattattcataatatcctaaggaggtattactttaaaaatcacagtgggtgtgcacacgtggtgtacatccgtgatattattcacaatatctgactgaggtatgacttttaatatcacagtgggtgtacaccctgtgatattatttgtaataccctagggagatgcgattcctaatgttacagtgggtgtacactctgtgatattatttgtaatgtcctaggaagatattactcctaataccaaagtgggtgtacaccatgtgtgtacactctgtgatataatccgtaatatcccagagagatattgttcccaatatcacagtgggtgttcaccctgtgatattattcataatatcctagagagatattattcctagtattacagcatgtgtacaccatgggtgaacaccctgtgatgttattcataatatcctagggggatattacccttaatatcacagtgggtgtacaccatgtgtttctattttgtgatgctattcatatgttagaaagttattagtcctagtgccacagtgggagtataccatgtgtgtaccctctgtgatgttatttgtaatatcctagggagatagttctcataacatcaccatgggtgtacatcatgtatgtacaccctgtgctgttattggttatgtcctgggtagatattactcctaatatcaccatgggtgcacaccatgggtgtacattctgtgatgttattcgtaatatcctagggaaatatcactccttatgtcatagtgggtgtacagcctgtgatattattggtaatgtccttgggatgtatttctcttgttatcgcagtgggtgtacaccctgtaatagtatttgtaatatcctagggagatattactgtataccctgtgatattgtttgtgacattttaggtagctgtttctcctaaagtcagagtgggtgtacaccctgtaatattcttcctaatatcacagtgggtgtacaccatgtgtggtattttttctaatatccagtgggggagaggatgatattgcttccaatatcacagaaggtgtacacccccctgtgatatggttcctaatatccagggaaggacaggatgacattattcccaatatcactggggggtgtaccaccccccgccgggatgttgttcttaatatccgggggtggagagaatgatattactcccaatatcacaggaagtgtacacaacctctgtttgatattgttggtaatattccggggggcagaggatgatattacctccaatatcgcagggtgtgtaaacaccctctgtgatattgttcctaatggcctgtgaaagagaaaatattactcccattatcgcacgggtgttcacccctgatgacattgttttctaatatccagggaaggagagtatgatattattcccaatatcacagggggtgtacacctttttgtgacattgagtctaatatccagggaaacagaggatgatattactcccaatgtcgcagagggtagacacccccctgggatattgttcctaatatcccaatggagagaggatgatattactcccaatatcaaagg

SEQ ID NO: 27545 - DNA, 2300 bp, Homo sapien
ctagaatccgttcctgaattatattggttatttcttgatcacgtgctaaacaaggggtggattattcatgagttttctgggaaagtggtggggaattcccagaacttaggcttcctcttccatttatttatttatttattggagatggagtcttgctcgttgcccaggctggagtgcaatggcgtgatctcggctcactgcaacctttgcttcccaggttcaagcgattctcctgcctcagcctcccaagtagctgggactacaggtgtatgccaccacgcctgcttaattttttggtatttttagtagagatggggtttcaccatattggccatgctggtctcaactcctgacctcaagtaatctgcccgccttggcctccccaaagtgctgggattactggcgtgagccactgcgcccgaccccttttaggcaatgtagggtatcttccaaacgttgccatggcatttgaaaactgtcatggcgctggcgagagtgtgttttaccaagctcatatattataattagtgtataatcagcagtgaggaaggccacaggtcactttccccgccatcttggttttggtgggatttggccggcttctttactgcatcctgttttatcagcaggatccttgtgacctgtgtcttgttccgacctcctatctcatccgattactaagaacgccttaactcctggggggtgcggcccagcaggtctcagcttcagtttacccagcccatgtggagtctctctgttccaacacctattgacacttgcatctggatcttgcactaggctctgcagattatgctcagtcttgaatactgagctttttttgtccccttgaacttccctccttgggcaagtatctcagggcctccctcttgcccaccctgctgcttcccatctttctgaaagaggcggctctgcagctgcacagcacttggccaagacctcctggcggtgtggagctctgaagacacaggagggatgtcctccgagctgttcatgcctagacctacccccaggctccctctagcaatcagctccagtcctgggcctgtctgccttccgggaggagtgggggcccacagagctgcccttcccgcgctgtgtatggactcaaggcactgatggccttcggtgggccactgcataaatggatgtttctgcagtattgaaggccagtcaggcaaaccgtgtgctttcctacgcagtggggaatgtgtcgccctttccttacatcttggagaccaaagccaccatctgcacttgtgggtacattgtggcagtggtcggttagggtggtctttcaaagcagtttgaaatgcagacacttgtgggcgtcccctaaggcaggtgccctttacctggaggccgcattggtcacctagacccgcaaggctcacctgggccggaaggtgtggtcaagcgaggccaagtagcccagaggccacccctaagcacctgtggacatcatgagtccttgctggggtcctcacagagggaagacagcccccagggtaaagcctcaggtgctaagcactcgcgctgccgcagggggggaggcacgtgagcatccactgtgccgcccaggacgggcccacccgggctccagagcctggggaggaaggctgcgaggctcccacgggcttacattcaaaccgggcacacacagaacggaggccttcggctacgggacgcccggcggtggggttacggatggtacagccctccctccccgcctgctcgaggcaaatggtttcgcccggctacacacacctctcctgggcggcaaccgagggcgcggagggggcaagacgtgcgctgaggccacgcccctactgcatagtcataaggcgggaggctctgccttcggggcggggcagacagctcctcgcgctcgggcgcggccggttgggggcacggcctagctccgggtgcgggcggggctggaggcggggccggccaccgcccggttcccgccctcgctctcctcccccagcgatcaggccccgccccgcgcccgccgccgcgcagggaggggcggggcccgtctccggcaggccccgccccctctctgaatattgatgcggcgcgcgtcggcgtcgccctcctcccattgagcgaggctgtgtcgcgtggcccagcgtcggcgtgacggttggacgcgggcgcggcactgcgggtcccgattgctgcagccgcttgtcagtgtgatgaagattggcacccaggtaagctgtcactcaaccgctccgccgccgccgccgccgctctcgccgccgccgtcccta

SEQ ID NO: 27546 - DNA, 2300 bp, Homo sapien
tgggggtgtctgagaagcatctcaaacttaaaatgtcccaacatgccctcccctcccaggccacagaagctgctcccattgactgtggccccactcttgtacccattgaccgtacctcctctcttgtactcattgactgtgccccctcccttgtatccacaactttgccccctcccttttaccccattgactgtgcctcctgtgccctttgactgcacccccttagtggctccagaatgacgctgttgagggtgagtcccagctcagcctctggccatcgtggtggctgaggccacattgctcaggcttctaaggtgtaagtggcatcacagcagtgcctcccacggattttgtgagggcagattgcactaagatggctcaatgtgctcaagaggcgacctggctgctgccacggctgctgctgttctcactggactccttgttcctttttctttcatttgtttgtttttggagatggagtctcgctctgtcacccaggctggagtgcagtggcacgatcttggctcactgcaacctctgcctcctgggttcaagcgattctgctgcctcagcctcctgagtagctgggactataggcgcatgccaccatgcccggctaatttttgtatttttagtagagacagggtttcactatgttggccaggctggtcccaaactcctgaccttgtgatccacccgcctgcacctcccaaagtgctgtgattacaggcgtgagccactgcccggctccttgttcctttgaactgtctcgctcaggacaggacggtagtccttctgcatcctgcaagacttggacaggatttctttccatttaacactgtctcctaaagtgctgctttccttggggaactttgctgttcttgctagtccagaacaagtggcacaactgcccttgacctccacatgaccttctcagggcagcccagactctaaatgtctgtgacctgcaccagcagcagcaaggccatgccggccgtggtccagcccggctgctctcccccactctgcagtgtttttccacacccatgctgcaggtgctggttgcgttcctgctccatccttcagtgcggaagtggcattttgcggttttctgttgtcatgaagcaagtgcgccacacttgcctgtcttatgtgcgtgtgtatatgagcatgcccatctcagtctccctgagcgcctcttttccacccgtctcaggcctctgtgttagctgttccctctctctgaaacaccaaactccctgatctcagcctgtctctccagtctcgacgtaacagcatcttcccagcgaggcctgctctgaccacacggcccgggaaagcagcccaggccccctctcacttcaccctgtgcccattcttgaccctgtgtattgtgtctctcccttgcctggtttgtgtcaggaaggcagaggccctgcctgtcctgctcactgccgcaccccaggcccagcatgctgcctggcatgggcaggcattgacttgatattagctgggcaatgaatgacagtgactgaaaatgtaatagcaagtcagggcctagcacaggaaaataagtgattgctatgtaagtgaagggttgctaagtaggatttgggtcataacatactgttaaggataatttttttgttctctacatgtaaaaatatgtatttttaaaaattggatgtcatgggctgggtgtggtggctcatgcctgtaatcccagcactttgggaggccgaggcgggtggatctcctgaggtcgggagttcgagaccagcctgaccaacatggagaaaccccgtctctactaaaaacacaaaattatccaggcatggtggcacatgactgtaatcccagctactagggaggctgaggcaggagaaacacttgaacctgggaggcggaggttgaggtgagccgagatcgcgccattgcactccagcctgggcaacaagagtgaaactcggtctcaaaaaaaaaaaatttgatgttatggaatgagggagacaaaaaatgctctacaactattaactgatgcttttctggttttgttctccagacaccattcgcttttcacccaagatgatttgatgtcttataaaactctgatgaaccatgatggctacacagacattaagtatagacagctatcaagatgggcaacaggtgagcttgaacttgattctgcattctaattacaaatcaacctggcactcaagcatgaacattgctttgtatacttgcaattcaattgccatgaggttgcatgctcagtgttagtgtattatgcatttatt

SEQ ID NO: 27547 - DNA, 2300 bp, Homo sapien
atgctcagtggggctggcgggcagttttgctgtctgcaaaacgtgttggaactggaaagtctgcagacgtgccgatcccagggggagaggctggggtgagacctctggggtcctaccgcctagacacggggtccaccatgaggctgttcaccctcttggtcacgtgggagcggctcccacgctgacgggctgtggtggggtcctgctcaggtggtggacaagtggttcaagagcaacgatgaggaggcgttcacctttgcccgcatgctgatcgcgcaagaggggctgctgtgcggtgagtgggtggcgggcacgggggtatggggaaggcagagatggctagggggcactggggatggctgggggcgcaccctcagtcagccaccgacctgcatgtgtaagacagcagttctgaggagtgtcactgcggcggccacgagcctcaggtgttgtctgcctgcccagtgtggtcacctgctcaggtgagggcaggaggccatggggcggggcttcgagctgccttccagaatgtgtttctagaacaaggctgaagctctcatggcacttattgtttctaatcaagtccaccagggcccctggggcggtggctctgcattgacggggcccatggccgggactgggtgctgcgagcaccctggagcagctggggaggggactggagcctgaggctgtccagctcgaccccgctcaccttcctcctaccccgtgcccctctgcccacctgcttgggggtggacagaccaggtggccgctggcaatgccactgactagccacacaggcagcagaggccctgtagggaccacagttgatctagacctctggggactcggagagcacacaccagcttctaaaacgcaggcagggacatgtgaggtttctacatgtgcattccgtgtgtcatgtcactttgggggtggtgacagggaaagtggaaggaaaccagccctcagcatggccaagtcccccgttagctgagccccaaactagagattggaagaaagtcttgattgaaaaaccatttcccagccaggcgcgttggctcatgcctataatcccagcactttgggaggtcgaggcgggtggatcacctgaggtcaggagttcaagaccagcctggccaacagggagaaaccccgtctctactaaaaataccaaaaaaaaaaaaaaaagtagccgatgtaatggtgcatgcctgtaatcccagctactcgggaggctgaggcaagagaattgcttgaacctgggaggtggaggttgcagtgagccgagatcacgccattgcactccagcctgggtgataagagcaaaaactccatctcaaaaaaaaaaaaaagaaaagaaaagcattttccagatgaatctgtcacgaaaggtgacttggtgcccataatcgttgggctctccctgtctcagtctccctgctccccatgttggtggagaaacaagcccctgcctttggggctggaaagcaggtccatgggccccgttacagaggagggtgcctctcttcctgtgggggctcctactgcagacttagaccttcccgactgctgtgtgcaccctcaaactaagcccagagaagacgcctctgactctgacttcagggctcctagggacagctggtgtcactgtgagccttggtctcttgtttataaagcagagcccagtgtgcagtcaggcagcctgcaggcgtggtgctgggggctccgtcctcgtagcatcgctggctctaggctcagggccaggaggtttgccaggggccgcagccccactgcaggcatttccctggcaccagtgcccaccccagctcattatgaagccccgagtggacacagaaactccatggtgcacaaggaagaagccgatgctcacggagaagtggggtcctcccagcccctctccccgaggcaacccctcttgacggatccttcggagtgtgtctgacatgctcccatgcgtgcacgtgcacaattcatgcatacgtgtgcacccacgcacgctcaccctggcgcgtctgactcgtggccctctctgcaggtggcagtgctggcagcacggtggcggtggccgtgaaggccgcgcaggagctgcaggagggccagcgctgcgtggtcattctgcccgactcagtgcggaactacatgtaagacacggcttccctcccaggtccctgctcctctccatcctgccacccttccctggatgcctctcacgcctcacctgagaaccggcagccagaactgggaggggaggaggccagcggggccctgtgagcacc

SEQ ID NO: 27548 - DNA, 2300 bp, Homo sapien
aggaggccaagcagatgtgtgggcagccaggaggatgggctcttgctgccaagacaaacccaagagagcagtgggtgagaggcccggtgaggtcgggagtggctgctggagggtggagtgggcagggaagacaggcccgattcctgagggctccgtgagctcctaactctagggcatgagaaggagacgatgccctccaggttgtaaatggcgttgcacctgcacctcacatactggcctcattcatcctccgaagacacccccatcctgagacgcagagccgacgccgcttgtctccagtcggagggcccctgagaatagtggcgttgcggggaggtgctgcagaggtgggtcaggagttggaggttcattctaggacagtggcgtgtcctcccaggagcctcttgggctgtggaagtgggagtccttgagataaggggctccagggctatccctgcaagtcacatcctttttcttgctaagcgctctgggcctggccctgatcacctctgcaaacttctcaggtaacttcacagccaccgaggcccagtgctgagtcagcacacctgctgcagggaggcgggactcttcccgcctggctggccagatgcccgaactgaattaatgaactaatccccggcgctgtcaccctggggcttggctttccacctggccctggctctctacacctgccaagcctggttcccttctgccgagaactgcttctgagggaacctccctggcccctgtacagtttggggacctggcaggactgccttctgctccccgggaagggtgcgattggattccagctgctcttgttggcgcctgttttggccttcagggtagctctccctgcaaatgtggcactccctccatggcacaggacctctgggagctgggttcaccccaggtctaagggtcgcctcctggggggcaggacccaaggaccctggctgttcagcaggtgactgtgctgaagagggggcccagggttagccacggggtgtcatcggagctgcaaggcccagggaggggttgcgggtctggagaccgctgtaagccatgcgtgttcccagatgagtatgtggtgagcttggtgcagatagatagggggtgtcatcagcatctccctgggggaggatggcaggggcatgagggccatttaggaaaccacctggaccagggtttgagggtttacacagccagatgctgcagggcagggcatcacgagcctggccgacagcgcctctgccggggctctgagtctgccacgtgcctgacattttctgtgcagggctagacatcccgcctgcgctttgcagccattgtccctggtctaaggagtctctgccctgacacttttttgcttcctatggtcacatgctgagagatgaaaggaaatgtcatctccagtaaagcctttctgaaaaggtggacctaaacctttgttttggagtcagtatttgcttattttaacttttttatttggaaataatttactactcacaataagtggcaaaaataatagatcctttgtacccttctcccagcttcccactaacaacatctgccacgactgtaggttcattttcaaacctgggaagctggcattggtgcaaataaaccacaggcatgatttgctttttatagatttgtatgtctaagcatgtgtgtgtatgtgtgtttcaggcgtgtgtgtgggatgtgtgttaggtgtatctgtgtacagatttgtgtaaccaccacccagataaagccagttctttttttttttttttttttttttttccagttcttcgagtgttgatttgtgtaagacaatgtctgccagggctggtactattttttttttttttcctgaataattgtggactcctctgtttcagggcaaaatctccaaaaatcttgccagatattctgaagaaaatcggggacacccctatggtcagaatcaacaagattgggaagaagttcggcctgaagtgtgagctctgtgagtgccctggctttggagaggggcttcctccatctacactgggctccgtgggcctggggggtcctggggggtcctgggatggatcccttaggcaaggccctgggatcagaaaactcgctggttaatgagtggccaagaacatatcagcttaagtttgggaaaaacacacaacagggcattgtgtcagagggtgaccaaagtgactccccagcagatggaccagggaacgaacaggtgacctttgaactgaggccggagtggaagcagcgagggtgtgaagggccgggtgagggtcaaaggc

SEQ ID NO: 27549 - DNA, 2300 bp, Homo sapien
acaagttagagaaaccagatagactgagtgacagattcatacacacctgcacacgtgtgtgtgtgtgtgtgtgtgtgtgtgtgtgtgtggagagacagagagggagcaaatgtagtaaaaacttaacatttgaaataacaatgagtttctgataatagaagcaaaaaaaattaatatttggaaaatctggatgagggaatatgacattctgtatggttcttgccacttttctaatctaaaattacgttaaaatttctaaaaaattaaaaagtatttgggctgtgtaacaaattactgcaaacttgagtggtttaaaacaacacacattgggctgggcgcggtggctcactcctgtgagcctagcacttttgggaggccgaggcggatggatcacctgatgttaggggttcgagaccagcttggtcaacatgatgaaaccccgtctctactaaaaatacaaaaattagcctggcatggtggtgcgtgcctgtaatcccagctactcgggtggctgaggcaggagaatcgcttgaacccgggaggctgaggctgcagtgagccaagatctcaccattgcactccagcctgtgtgacacagactctgtctcaaacaacaacaacaaaaacaacaccgtttatcatctttctctcccgcaggctggctgaaggctctgagggaggccctggccacctttcccagccctgtggaggccgccagccatccctgccatttctcgtctggtggcagcacatctcatctctgccgccatctccacatggcctttttctctccgcgtgtctgtgtccacgtctctcttcttataaagactggacaggatttttttttttttttttttttttttttttttttctggagacagtctcgctcagtcgcacaggctggaggacagtggcgcgatcccggcctccaatgccaccttccagagccttcatgatgtaactccatccctgtcccctccccacatcgccggctttattgttcttcgtgtcagttcctgccagtggacatttaattctaattcacgtctcactccctcccctactgtgagccccacgtggcagagaccgcggcggagctgcgcgggccggaggaggctgcggagcatcgctctgacctgagccggggacgctgcggaggcgcagcacgttcctctgcccagagctgatgggcaccgtccgtgtctttcgctgcaggtccggggggagactcgggggcctgggatcccccatttagccatagggcggggggatcaggttcagcctctgaaagtccagagcacgatgtttgggaaacggccccgcccgcggcctccgggacctggcgaaggagccccgcggggcgcccctgctaccaccctgcgcggagtcggccccgtccccgagagcgcccggcagcccctggccgtgggccgcaccggagccgcgcaaggcgactgttctgcgcctcggctcggggttcggacccggctctgggcgcggtcacgcggggcgctgcgcacggcgtccggcggccacagagcgcggccatcgagtcccgccccggcgcggcgccccctcccgggcccgcgacacacgccctcggggtcggtcctcgaggacgcgcagggccccccacccaccaggacgcacgtttcaagctcatcagtaaaggttccttaaattcccgaagggcaagaagttaaccaagtaaaacagcatcggaacaccaggtagaagacaccaccggggtccgcgggtgggggtggctggaacccggggcgggcgggctcaggcgaagaggaaggcgggggagggggcggcgacccgggtctgcggttgaatcaacagggcgtgggaatggggcgggcggactggggtgggggcatgccggggtcccggggagggcgggggtcgggcaggccggagggtcccaggctgcggcggggtggggaaggggtgggggggaggggcccgggctgggtggggtggaggaggggctgggggggcgggtgctctgccacgagacattggccggcgccggcctccgcccccgcctctccgccaatcaccgcccgcctgctcccctcgccgtgggtccccgcgaggccgccaccccggggtcgccgtctccgcctcgccgcagtcggggcagccgctcgcccctcttttccatgtatccgtccaggtgagatccggccccaccgagactcgctcccctctctggacagaggatctcaactgggtcccggtttccctctccgcgcctccgcccagagttgcatcatctgcaccgaaaggcg

SEQ ID NO: 27550 - DNA, 2300 bp, Homo sapien
aggatggtctcaatctcttgacctcgtgatgcgcccgcctcagcctcccaaagtgctgggattacaggtgtgagccacagctcagcaaccattttaataaaaatcaattcagacaaaatcatcagtaagtgttaaaactagagagtgggctggctgcagtggcttacccctgtaatcccagcactttgggaggccgaggcaggtggatcacctgaggccacgagttcgagaccagcctgtccaacatggtgaaaccccgtctctacttaaaaaaaaatacaaaaaatagccaggtgtggtggcaggcacccgtaatcccagctacttgggaggctgaggcagaagaatcgcttgaacccgggagagggaggttgcagtgagccgaaatcacaccactgcactccagcgtgggggggaggttgcagtgagctgaaatcacaccactgcactccagcgtgggtgacagagaaagattctgtctcaaaaagaaacaaaacaaaacaaaataacaagttagagaaaccagatagactgagtgacagattcatacacacctgcacacgtgtgtgtgtgtgtgtgtgtgtgtgtgtgtgtgtggagagacagagagggagcaaatgtagtaaaaacttaacatttgaaataacaatgagtttctgataatagaagcaaaaaaaattaatatttggaaaatctggatgagggaatatgacattctgtatggttcttgccacttttctaatctaaaattacgttaaaatttctaaaaaattaaaaagtatttgggctgtgtaacaaattactgcaaacttgagtggtttaaaacaacacacattgggctgggcgcggtggctcactcctgtgagcctagcacttttgggaggccgaggcggatggatcacctgatgttaggggttcgagaccagcttggtcaacatgatgaaaccccgtctctactaaaaatacaaaaattagcctggcatggtggtgcgtgcctgtaatcccagctactcgggtggctgaggcaggagaatcgcttgaacccgggaggctgaggctgcagtgagccaagatctcaccattgcactccagcctgtgtgacacagactctgtctcaaacaacaacaacaaaaacaacaccgtttatcatctttctctcccgcaggctggctgaaggctctgagggaggccctggccacctttcccagccctgtggaggccgccagccatccctgccatttctcgtctggtggcagcacatctcatctctgccgccatctccacatggcctttttctctccgcgtgtctgtgtccacgtctctcttcttataaagactggacaggatttttttttttttttttttttttttttttttttctggagacagtctcgctcagtcgcacaggctggaggacagtggcgcgatcccggcctccaatgccaccttccagagccttcatgatgtaactccatccctgtcccctccccacatcgccggctttattgttcttcgtgtcagttcctgccagtggacatttaattctaattcacgtctcactccctcccctactgtgagccccacgtggcagagaccgcggcggagctgcgcgggccggaggaggctgcggagcatcgctctgacctgagccggggacgctgcggaggcgcagcacgttcctctgcccagagctgatgggcaccgtccgtgtctttcgctgcaggtccggggggagactcgggggcctgggatcccccatttagccatagggcggggggatcaggttcagcctctgaaagtccagagcacgatgtttgggaaacggccccgcccgcggcctccgggacctggcgaaggagccccgcggggcgcccctgctaccaccctgcgcggagtcggccccgtccccgagagcgcccggcagcccctggccgtgggccgcaccggagccgcgcaaggcgactgttctgcgcctcggctcggggttcggacccggctctgggcgcggtcacgcggggcgctgcgcacggcgtccggcggccacagagcgcggccatcgagtcccgccccggcgcggcgccccctcccgggcccgcgacacacgccctcggggtcggtcctcgaggacgcgcagggccccccacccaccaggacgcacgtttcaagctcatcagtaaaggttccttaaattcccgaagggcaagaagttaaccaagtaaaacagcatcggaacaccaggtagaagacaccaccggggtccgcgggtgggggtggctggaacccggggcgggcgggctcag

SEQ ID NO: 27551 - DNA, 2300 bp, Homo sapien
cttttctcaggaaaaatgggtggatggtactggtggccctgcctggtctgatcatctaccctggttctagtaaccagattaattccttgtaatagagctgtggatttcagttcagttcccacgcacagaccttacctctgctttctccgaccacttctcccccaccccaggtacttcacagctgagagcctcttgccagcttccaactctccagcagtctttgttcccagaccgtgtcctgaggctgcactttctggacatgcccacctgctggactggcatctgtcttgtcacttctctggcctcacctctgcgaaaggaacacaaaagtcaggaccccagttcactctgtcaaaaggaaaagaatgagctgaaagctgagtcatgtaagcagctgcctttcctttcgttcctaagcagacggctacagatagaaggttcaacatccgcttctcttatgtaaagtgctgatttgctgaggagtgagctgtacacagtcgactgttcccaacctgcttcttttctcttgcaacgtgtggattaccacactgttccgctttcccctccagcccacttttcccctttaaatactgaagccctcaaagtcatctttggagaaaggcacagaccacagactgtttctgtgataccgtgttttttttcctcccaggcattgtccttaaccttggcaaaataaacttctaaattgattgagccctgtctcaagatactttttggtttaaacctctgaggccctactgtttctaatacaggtttccagtttgctcatctttcccaggtaggaagatgctctgttgccaagagaaatgcaattctaacacgcaaatccgcccaaacactagagctcagcattcagctctagccgagctaagaggatcccatggtcctgccccacagtctggggctcatcttgtggaggaggtaagtaaaataggccctgtctctctgacttctacctaatcagagttgatagttgcgttggaaattaggtaaatcgcaggtgagttgatgaatgtgggaaaccagatgaaaatggctgcttgatggggttaaaacgcaggagaggaatagaacccttccaacggaatggttccagccttgtgacatgaggagactgaaagggtatcccagaggcaggtcactggccttccagctccacctgtgggtggccttggccaggcaactgcaagagtgcagggccccggggaggtcgcacctggcaagcgctgagggagggtaaagcggagaggggtgtgagaagagaaaaacaacacagagcgtccgagctatgtgaggcgtgcgaggttaatccggcccggagagacaggtctatgcggcttcagcggtccccacccatgcctggcaattgtttaaaggcactattgctccggacccgctgccttcacccatgaacttcctttcctggaattatgatataaagaacaacgtacagccaattaatagcttgttattttcatgtaaattcttggtgagctatttaagaactgcccccctcttaagctttataaacccacttgtcactgttgcaaatcctatgttcagggcaacttgaagctatgctcccgggttgcaatcttcaaacttggcccaaataacctctctacttatatcaagtttgcctcagctttttttttcttctaggtcgacggttcccgccccgcaagggtgcagggaaggggacgcccgcacttcctagtgctcccttagctggggtcgagctgagcgccccccaccgagccccaggcggctctgtggagaagcccctcggccccgggttcggtctgcactgccagcccccagtccccggcgcgcaggatccagcagggccagcgccgggcgggcgagaaggcgagagagctagggccgggcggggagggcaccggcagggggcgcgggttcccaggaccgaaaaggcggagcctcccacgcgcactacgtgctccctacgcgcatgcgtcccgcccacgcgcaggcagcacctcgcctgactgggtagcgctgccacgtcggggcggggaagagcgtcgtcgcgtccgggtgacgtctcccgagggcgtcggcagggtcggcggcgtcggcagcagtgtcgacggcagcggcggcggcgggtgggaaatggcggagtatctggcctccatcttcggcaccgagaaagacaagtgagtgggagccccccgccgggggttgggcgcgatcggggcgcagggtggttgaggcggtgggagggcgaccggggaggcccaggcgggccggcgcgg

SEQ ID NO: 27552 - DNA, 2300 bp, Homo sapien
tgttgacccccagactggaaaggtggctttaaacccccttcccttcttccaagccaagtgacctgggcgtgcggcttaaccttctaagctcccatttcctggtctatgaagcgggaatgatgctgggacctgcttcacagggtggctctgaggacccacaggcagagaggtctggtgtaggctttcgggggaagcacccatcactctcccagcgtttcctatctgcaccttaatttggcaccccagggaatcgctcctctggaattgtaaccttgcagggcaaaagctatcatttcaagattttttgggatcctgtgtccccggacagtgctgtaaatgtaggaggaagggtgctgctcatgggtgctgctcatgatggaggtgccccgtggagcacgcctcggagccccccctttcatccctgatcccatctgggatgtgtcaggtctgatccgcatacactggggcatctgacatttcatggccttctgagcccatgggctggagatgaatttgcaaagcccgggagtgtcctgggtgtgtgttcactccacacgcacgaatctgttagaggctgagtaggaactaggaggccaaagagaaccaggcaacttcccacagcctggaccgtacactagaaaagctagcctgggagagggggcatggcctcttcccaggctggcaggggggatgtgggggaggaccatgctccccagggccagtttaccaaaatatcaaaataccaaaatatcaaaagacttaaaactaggagtgagccaggtgcagtggctcacgcctgtaatcctacactttgagaggccaaggcaggtgggtcacctgaggtcaagagtttgagaccagcctggccaacacggtgaaaccctgtctctactaaaaatacaaaaataataataataataataataataataattagccaggtgtggtggcaggcacctgcagtctcagctactcaggaggctgaggtgggagaattgtttgaacctgggaggcagaggttgcagtgagctgagatcgcgccactatatgatctgggcgccactctgggtgacacagcaagactccatctcaaaaacaaacaaacaaaaccgggagtgcctggacacttagtgagaactggacaggggccatgggtcgaggagcaaaataatcaccaggacttgtggataacaggatcatgtgggtggtgggtccgcatgggtgacagggacgtggggacatgtcgccaccctgacaggagcagcccaactcaacagccacggcaggtcatgccacggaggctcgaggcgttacgtggggatgttacatcaaggcattacatcattacgagatgtaacgctcgaggcgttacatcgaggggacgatggccatggggctgggcgtccagggtgggccgcagagggaagctcaccacgtggtgctctcatctgcccacagcccagcccgtcttcctgttggaggcatgtgacccctggaggacaagcatgaaacgccatagggctcccccaggtgctggaattatggcaccttgcagcttcttctccacgagttttaacaagcatgcgtacttttgtaagtggtgagtgtaacggaggttcacagatgcactccgctttggaaaccagtgcactcttgcccaggcccggtgagactctgaggacgatgtgtctaacctctgtgtctaacgggggtgtgtgctctccctcctctggcgaccatgaggaccaccccggcaggacaaggtgtgcagagaactagcatggtccctggcacgtagcccctgcccagtgactggcagatgagaagctccattgtcgccccaggcgagtatggggcacaggcgcctccttgggttgtctgccctcccgggagccccagggtgcccaggcgggcctcagctgagtccaggcctcggggacagtccgtgcagcccctcctggggctgggggcgggcacttgtcccagccacgtttctgctgactgagcagccttcttcatgagctcacgcctttccagagaaatcccttaatgcctccattctgctggtggcatatatagggagggctcggccttggctccacactgcgctgcccagaggccccgctgactcctgccagcctccaggtccccgtggtaccaaagctgaacatggacgtgaccatccagcacccctggttcaagcgcaccctggggcccttctaccccagccggctgttcgaccagtttttcggcgagggcctttttgagtatgacctgctgcccttcctgtcgtccaccat

SEQ ID NO: 27553 - DNA, 2300 bp, Homo sapien
acagaaatgcagcagcaagaagcccgaggcctccaggaggagctgcgggctggccccacccacaagcagctgcgggctcacagtcacggtcctctgaggacaggcttgtgcttcccactccccggtgagcgggcaccacggatgtcagtgccgtgactggcctttgtgctttggataaactccatgtggaatggaaggaaagatgggagcattctagaacctgagcattttgtagcaagagcactgttctcaccgctgatttccaatgtccagggcagaaagatgaagagatatcgttttcccttaaatgggagtgaaggacagaggcagcgtggtggccggtgatggacagacccgtgtctgctggcaggacaccccggccgcctccgtctcatggatagagcaagcagttttctctatgacgtggcttctttaggaggcagctcggctgcccagatccctccttattttttagttctcaagccctgtagggtgttttcggtcgcagttgtttgggctgtggtcctgaccctcctgagttccagtggctctgttcaggagagctgcctggggccgggacttctgaaacacacactgagccacaggccggcccggcggcttgggttcaccgccgcctctttgtgtgtgatgtcctgggataggcccgtgcacgttcagatgacactgtacatataaataacttgtagccgagaacaggatggggcggggaggaggggagggcagaacgtaccacagcagcagaagtcactgtggatgccttcgtaagttgcatggaaggtttttaaacctagccctgccgagcagccctctcctggtccgggagaacgatggggagagagctggcgttcagctttcatcactggagccgttccttcttccggccccccgagggcctgtccatgatcacactttgtcttgtttcgggggtggcccctgtgaccccttagaggtgcaaatccaaggcagtagaagccgcctgccaggccagtgcccgccactgcttaattcaggcggaatcacggctcagagggttccctccactttccaagggaaacatgtccacggggtatctcttcctgcgtattttctcacgacccttccttacatccaaggccacgtctctcgacacgttgtcccccctctgccgtcacacatggcgtaatccgcgccccccctaccccccacatcagctgctcagcgagccgcactcacagtcacaggccccgccggcggcaaccccacctcctcccgcccaggcaggaaacgctcagcagcaccatctgcttggctcctcagccagccgcgctccgggagccctgggggcgaggcggccgtggcgtcctccacgtctgtgtctccccgcacgtcagccgccccacgctgtctctggaagcttccggagtacccaggccttctgcactccacgcactgcatgtgcgcctgagccgctgtctcgattttacaaaacggaatctagcagtccatgcactcagggaggcggctggcaggattttctggcaaactaagggtgttctttcctggccaaaggaaaagtcttttggaaaatgaataatctcttcctaatttgcttgactaggaagatgggtttttgcacagtgggtttgttgaagggaggcagctcttgaaattttgttcataatccgacatgacaagggtgaccgtataatctaccgacccatctgagccccttgagaagaaaggagaaggttgttaatacacgcactgggaccacaggcatcactgggcctgtcctgggcaaactgatttatgatggccgccgttgaccttcgctgtggtcagcctaagtgacctcagcgtgcacctgccatgatttcctggaatcactctctgggttccaggcttctaggcctgtggttttggggctggtttctctgaattctcagatcctggtcagaagtttgtgggcagattggtgtctgatgaatgagggccgctcattcaagaaaccagcgtagcaaatgggaggtggtgcagggtctctctgcgaagcgctcaagcccacttccctgcccccacgtgtcctgattttactttgaaatttccagtggatgcaatagtgccgaccatgtgcacatggggtcaggatctcaggcccgccagctggactacagcaagtacccatggtctcagggaaaaggtcccctgctgcaggctgtgggggacctcggctctcacagtggctatgcctgagaaagcccctccagactcgccaacctggcccgcgcgtcctgtccgga

SEQ ID NO: 27554 - DNA, 2300 bp, Homo sapien
tgtgcttcgcctctttctgctgtaaaaatgcccctttgagtcagtttctagccggttacactgtagtatcagacacaggatctcatgtcccaccttccccagggtttcctgctcgagcggcatgtcggctgtgcctcttccttctggaaccagggtggaggtgcagcccctgcctgtggggcatggtcctcatggccgctggagcaagcctggtggagcccagccatggctctgaggcttccactggggcagggctatgtcatgtgccccatttcatctgccaaagcctccacgtggtccccgctgaccatcagcagggctggaaagtccatcctcttactggggggagaccaagagccccggccaccacagccggattgtgcaaccccattttcccttaagagcaatcagcctgttgaaactagagatggaattagcaccttagagctaagggcaacacagaagtggggaagggtgaaccttgagggtgtgtcctcagcggtgggtttgtctctcccaggcaaggcgctctgcctgcggctcagcccggctgaacgggtgctgggcctgtcccttcccagggcccagcagctgagctggaggacgaagcccgggtggacgctccacaccatggcctccagggagtgttcccgacctggaggaggcaggtgggctcccccttgaccaggatgcagatgacccccttgtgccacctgcacgatgcgccctaaggggcagggccactcctcgtctgccttcctctcctgcaggtcaccggggtggccctggtggagactgacctggagggagccaggctcccagtgcctctctctgacccagctgcaggaggggcgcctggtggcttgcgtgctgtgcccttgaggatcatctgtaaccagcaccagccccaccctgccctccggacaggacgcgcgggccaggttggcgagtctggaggggctttctcaggcatagccactgtgagagccgaggtcccccacagcctgcagcaggggaccttttccctgagaccatgggtacttgctgtagtccagctggcgggcctgagatcctgaccccatgtgcacatggtcggcactattgcatccactggaaatttcaaagtaaaatcaggacacgtgggggcagggaagtgggcttgagcgcttcgcagagagaccctgcaccacctcccatttgctacgctggtttcttgaatgagcggccctcattcatcagacaccaatctgcccacaaacttctgaccaggatctgagaattcagagaaaccagccccaaaaccacaggcctagaagcctggaacccagagagtgattccaggaaatcatggcaggtgcacgctgaggtcacttaggctgaccacagcgaaggtcaacggcggccatcataaatcagtttgcccaggacaggcccagtgatgcctgtggtcccagtgcgtgtattaacaaccttctcctttcttctcaaggggctcagatgggtcggtagattatacggtcacccttgtcatgtcggattatgaacaaaatttcaagagctgcctcccttcaacaaacccactgtgcaaaaacccatcttcctagtcaagcaaattaggaagagattattcattttccaaaagacttttcctttggccaggaaagaacacccttagtttgccagaaaatcctgccagccgcctccctgagtgcatggactgctagattccgttttgtaaaatcgagacagcggctcaggcgcacatgcagtgcgtggagtgcagaaggcctgggtactccggaagcttccagagacagcgtggggcggctgacgtgcggggagacacagacgtggaggacgccacggccgcctcgcccccagggctcccggagcgcggctggctgaggagccaagcagatggtgctgctgagcgtttcctgcctgggcgggaggaggtggggttgccgccggcggggcctgtgactgtgagtgcggctcgctgagcagctgatgtggggggtagggggggcgcggattacgccatgtgtgacggcagaggggggacaacgtgtcgagagacgtggccttggatgtaaggaagggtcgtgagaaaatacgcaggaagagataccccgtggacatgtttcccttggaaagtggagggaaccctctgagccgtgattccgcctgaattaagcagtggcgggcactggcctggcaggcggcttctactgccttggatttgcacctctaaggggtcacaggggccacccccgaaacaagacaaagtgtgatcatgg

SEQ ID NO: 27555 - DNA, 2300 bp, Homo sapien
tcccgagaagggttccaagttttgtgccaactcccctgaattctcgttcccccttctgtgaagtagtgttatttaacacaaggaaaactgaccctaggctcgatccagaatctaactcccaaatgggtcctcaggcttaaaaaataccttcgcccacagcctctgtctcccctgaagaaaacgttttccgttcggatgaggcatcggccacgggcaagcaagtggtcccgcgcccccgtcccctacccaggcggccggcctggctccgtcaccgcccgcagcgtccgcccggggcccgcgcgggaagagggtcccagccccacatgctgcgggggcagccccgggacgcgcagacgccagcgccgctgagggccggggccgggaccggccgcgcggcgggggcttccagagcggccggtcacgcttccttaggtttcaagtttctaacttgctgaacatttcagattttaacagcaaaagcggctgacgtccccgcgggcaagcggcctctcggggtctgcagcgccccagggcatccgcgccgccagccccacgcgcgagcccgcgaggcccccgggcccccgcacgtcccgaggctctgagtctggacgaacgcaggccgcgtggaggggccggcgacccctgcccgagagccgtcccctcctggagggagcgagcacaaggcgcccgcgggacccggcccgagtgcccgagcgtggaggggcgggcgcgccctcggcggtggggccgcccgcagtgcccccagcgcccgggagggggcgcccggcggagcgcaggcgggcgggcctcgggcggcgggcgcccctgacgtcaccggcccgcggtcgccagggcaacggcctcatcccgcgcgcgtcagagccgccagtctcttggcaaccgcccgatctcccgctctccctccgcccggcgctcggccgcgcgtcgctctggcgtcaaagcgacgtcaatgggcggcccccgcccgggcggcgggggcggggcagggggcggggactacggggggcgggccggggcgggccggggcggggccgggcgccgcgtgcggcggagcgcggcggctccgggctgacatgcggcgcggccccggaggcagcagcagcggcggcggcagccggagcagtaggcacccgagcagcgccagcggccgagcgggcggcttcctggcctgggcgctccggtggcggcggaggtgaggcggcggcagcggcggcagcggcggcagcggcgggctccgggcgggcggaggtggccgccgtgggggctccgcgcgggcgccgggccggggctcggggttgcagccaccgcgcagggtccctggccttgcgcgcgcggggttcgcgggcggggttggcggcctggccgccctcgggctcccctttgttggggggccggggtaggagtgagtccgcggggctcaggggctggggagccgggggtcaggttggagccgaccgcgggcggagataccgggtgtggggggcgggtccgcgatccccgaggtgcctgggatgtcgggggtggggaccggacggatcgcgggcggcgggggcagggtgtgggagcggggcaggggacggtcctgggatccggatcgagccgacctcgggtggcagggccaggtgtgggagcgggtccgcgcccagaggtgctaaaggggtcgagggtggggacggaaccgacagcgggcggcgggaggcgagtgtggaatcccggctcagggggtcccgggatcgggacggaaccggactcgggcggcaggggcctctatgagagcgggtccgtgcgccccgcggggctcaagagggtcgggggtccgggtggagcgggcggcgggggcgggtccacacctcccacggggctggaggggcccgtggatagagtgggggcgacaggcgtgggagcaggtccctgcgtcccgtggggactgggggctccgcgggcacggatggagccgaccgcgggcggcgggggcgctggtgggctctgagctctgtgcggccccgcaggtgcgcgcggagccatggttatcatgtcggagttcagcgcggaccccgcgggccagggtcagggccagcagaagcccctccgggtgggtttttacgacatcgagcggaccctgggcaaaggcaacttcgcggtggtgaagctggcgcggcatcgagtcaccaaaacgcaggtgcgtgggggcggtgggacccagccggcggggcctccccactggacccggggcgacccgacctttggcgggtggaccccatgcagattcactgctccag

SEQ ID NO: 27556 - DNA, 2300 bp, Homo sapien
cagggaagggaaaacaggatggccatggttggcacagggctgttctgggttttggaagctcagggctgggtcagggtgaaaggtcaagtgcacctgagtttggggacctgttctgcggaggcagttttggctgcagtttttatttggtgctgatgcaatgtttccaaacagccagccaggtgtttgcaaatacctaagaccttttggaagactctggctagggtgggaggggtggggaagcctgcttcctggatgcggggggcagtatttcaagtcacaggctgagggactgaatggtgagtgtgatcaggggcctggtttctcccccaccccgccttttatctttgttcttttttgagacagggccttgttctcttgctcaggctggagtgcagtggtgcaatgacagctcactgcagcctcaacctcccaggctcacgccatcctcccacctcaggctcccaagtagccggccccacaggcgtgtgccaccacacctggctattttaaaagtattttatagaggtgaggtcttgctatgttaaccaagccggtctcaaactcctgagctcaactgatcctcctgcctcagcctcccaaagcactgggattacaggcgggagacacgacgtccagccttgtttttgtttagttctcctaggagcggattaacagggtgttgggacctccaaaaggaaaaaaggcagttgtacactgttcagctgaaaggaactaaaaatattcccccgtattcttggtatataaacctgggacaaagaaaaacactctgaacgattaaggaaaactttgggactcttcatttccttgaaagcctttgaaaaccaactgactcccaaacaacccgtgtgtgtgtgtgtgtgtgtgtgtgtgtgtgtgtgtgtgtggcgattgggaaatctgtggtcagaccctcgggcgaatgaggagaagctcatcctcgtttctccgggccctcctcccaggcgtccgtccaggcaggaaagcctcccgagaagggttccaagttttgtgccaactcccctgaattctcgttcccccttctgtgaagtagtgttatttaacacaaggaaaactgaccctaggctcgatccagaatctaactcccaaatgggtcctcaggcttaaaaaataccttcgcccacagcctctgtctcccctgaagaaaacgttttccgttcggatgaggcatcggccacgggcaagcaagtggtcccgcgcccccgtcccctacccaggcggccggcctggctccgtcaccgcccgcagcgtccgcccggggcccgcgcgggaagagggtcccagccccacatgctgcgggggcagccccgggacgcgcagacgccagcgccgctgagggccggggccgggaccggccgcgcggcgggggcttccagagcggccggtcacgcttccttaggtttcaagtttctaacttgctgaacatttcagattttaacagcaaaagcggctgacgtccccgcgggcaagcggcctctcggggtctgcagcgccccagggcatccgcgccgccagccccacgcgcgagcccgcgaggcccccgggcccccgcacgtcccgaggctctgagtctggacgaacgcaggccgcgtggaggggccggcgacccctgcccgagagccgtcccctcctggagggagcgagcacaaggcgcccgcgggacccggcccgagtgcccgagcgtggaggggcgggcgcgccctcggcggtggggccgcccgcagtgcccccagcgcccgggagggggcgcccggcggagcgcaggcgggcgggcctcgggcggcgggcgcccctgacgtcaccggcccgcggtcgccagggcaacggcctcatcccgcgcgcgtcagagccgccagtctcttggcaaccgcccgatctcccgctctccctccgcccggcgctcggccgcgcgtcgctctggcgtcaaagcgacgtcaatgggcggcccccgcccgggcggcgggggcggggcagggggcggggactacggggggcgggccggggcgggccggggcggggccgggcgccgcgtgcggcggagcgcggcggctccgggctgacatgcggcgcggccccggaggcagcagcagcggcggcggcagccggagcagtaggcacccgagcagcgccagcggccgagcgggcggcttcctggcctgggcgctccggtggcggcggaggtgaggcggcggcagcggcggcagcggcggcagcggcgggctccgggcgggcggaggtggccgccgtgggggctccgcgcg

SEQ ID NO: 27557 - DNA, 2300 bp, Homo sapien
tccgggcaggacgtgtctggcaggccagaggcggctcctgtgtgcgcggaacagccgcttttacaggggcgtcggctcgtggcgctggcagggcttctgtcgcaccagccctcggcccgcggcaaatgccgaatgccggtgctgggaacggaagtgggaaatgacggggggtgcaggggagcggccctgactgggactgtacggggacgcatgggggtgcgggcacttgagggaggaagcagcagagggaggtgtgtggatgtgtgtgtgtgcgtgactggggtgtgagcgtgcccactgtgggtgtgcccgtgtgtgtggctgtgaggcgtgagtgcaggcgtgaagtgtctgggagtgggagcgggcatgagtgtgtgccacgggcctgctgttgggtccttggaggccacggttgcccctgaagggactgcaagctcttttttgatttgtagttatttgagaagtctatacaggaagaaaattaaaccgcatttactaaatacaataaaattacaggaagacagaattgtccccaaattacaaacatgtggcccgagttgctccacgacagctcagccccagaccatgcagtggagatggcagccccgagccccgggcccatctcctgctccccactgaggtgacacaggacccctgtaaggcaggaccccagagccccgcacaggagggggggctgtgtggggggagggacccctgcctgctgtccctgcccagcctgcggtcccgcccccaccaggcagcggaccctggactgctcatgatcacggcctcacctggaaagctgctatgggctggtctgagcctcttccctctttccgggaaatctgaggcccaccagcagcgggcagcaggtcatgggtatggtcgcggacttggaggcccaggaaggccaccaaggagcaggaagggccgtgtcctgggatcagagtctaggccagagacccttcccaaggctgtcacccaggagggagatgatgggaagtgacagtggggcccaggctggaagtgagaggggccgggcctgtggcggagtaagagctggcttggagtgggcagaggccaaggcagccgggtgggcaccagacttgggagatgctcggcctcgcaccgagaaagggggggcgctggggccaagtgcccactgcccggagagcagggctgggtcctcaagggccccctgcttttggatgttgtgcagccactgaagctgaagcccagtcgccccggctccacggtccagactcccagcaggtggccacccctgaccacctactctgaaatccaggcacatcctggcaccacccggccaagagcccacatggccccggggcattcatctcactgggcaggggcagcctccgacctcatcccagctcagtaggtgctcgcggtgccctcctaaacgccagccatgagcttgagcgaacgccagtgtgtcgtgaggctgagcacagcctggcccctccactccggctcctggtggctgtctgctgtgtcccctatcggggaagaggtttctctttggcccaagcccacctgcccctgcctgagggagccctcagccactacgctcagcccgtcagaaacctgagagctcatgtccacgacagggccagccagtggggagaggacccggggctcccttggaggcagggcactgctcgttcccgcggccgctcggccccgcccgctccctccaccccgatttcccacagggcttgcaggcatcgccccaaacagactctgtcacccaagccatgtgcctgggcctgcctttgggtgtggatggggggtgcctggcggggggtgcctggcggggagtgctctgagtgcaggagcggacacccaggctgcccgaggagggcagggcgtgaggactgggacagccgcacccctgctgcttggcacgacccagtgaaggaatgacgtccgcaagggccacgtgagcttggggcgggcggtgccggtggagggagaggcagaggctgtcagcctctccccacccctgcctcacgtggccacgcccgacgtcaccgtgtctttctttgtgagagctgagtccaccgaccccaccttgtttagattaggttggaagtcacctgggctgagctgatggctgattccgtcagcaaaaagaactgtggaacatactggcacttgggccggtgtgaagccacccccctgccatgaaaaatggctcttccctgccacagccggcccagcgggagccaggtcagggcctggagacacagcgccccccaccggagccactgccc

SEQ ID NO: 27558 - DNA, 2300 bp, Homo sapien
atgaaggcgcttgtccttcacaccaggcgctgtggtccagcctgacagcccaggacgatcacgctgccaggtcttgacctgattatatctgcaaagacccttttttcaaataaggtcatctttacaggttctgggacacagacagatctttctgtggggacaccattcaacaaagaggggaagccacagccagacccccctccgctcaaaggcttgctgtttcctatgttgcccgccacactccgtgtctatagagctgggacagtggcagtgcccacctcagaggtcaccgtgcagattaaattcatccctagacacgaagtgctgggtgcaggcacagagaactggaaggaaaggtttcctgtgaccgtgtgctccttctgccctcggctcggggtctctgctgtgctcggcgtgggtggtgatgaggatgtcactgggtgcacagctggccccgcaagctgcccggaccccaggcctcccctctttccagccaggatgttgtgtgctcacagcctctcagggccacaggtgcagtgactgctgctgctgtgtgcttatttgctgcagagactccactggggccaggctgagcaggactccccagacatatccagaggtccttcgagagggccgcatggcaggcacagggttgaggggcctggtggcatggccacggctcacctgggagcgcaggtgggaagcccccacacctagcagagtgcagctccttcccgcacagccacctgcgctccttggcctgaccccgtagggctctcaataagaaacgggggcttcccctcctccagtctcaccctcagtctccacgttgtctccacctagcacctcctcctctgatgcgtcacagtcacaggtcctggtgaggagggagccacgccaagcacagcggctggaacaggggcaagtgggtgcccaccccgaagtgcaggcaatgaacttgtgctgtagcccatggtgagctgtggggctgtttgtgactgcagcgtagccaagcccatcccgcctgatgcggcctcttcatccagagtgggggtgacgtgccagcccccacctcaccggaatgctgggaggagcgtctccacggaaggagctcactttgtcagctgtaatgtgctgtgactatcgtgtgagttcccgggtcactgtaacaagtcccacagcctgggggcttcaacagagagagcctgaatggctctctcaccattcaggaggtggaatccagggtcagggtgcggctccgctggctcctgaggcctctctccttggctctgtctcctgctactgtcctcacaaggccatccctctgtgtgggtctgtgtcctcatctcctctccgtataaggacaccaggcagattgggccagggccaccccaccagcctcatgttaccttaaccacctctgtgaggaccccatctccaagtaaggtcccttgcggaggcattggggcttagggctgcagcatacagatctgggggagacacacggcccctaacagtatcaagggtgggtgggccctcataggataggacagccgcccagtggggagacacgtggcccctaacagtatcgagggtgggtggacccccataggataggacagccgcccaggggggagacacgtggctcataacagtattgagggtgggtagagcccgataggataggacagcctccgggggagacacgcggcccatgacagtctcgagggtgggtggacccccacaggacagccgccggacatttcctcctctgctagtctgaaaatcacactgtcttaggcagacagggaagaatcaacatttccatgccaggcagaggcccccggagcgcaaaggaccagaggatcaaagagcaaacgtcaccctcagggtctaacgtgcaggtggcaggaccccggcccttcctgtgtatctgattgtgggttttgtctctgccacgtgcagggatgggtgcagactccgtccaaggtcttggcaggaagagaaaactgccactgcagaggggctggctgaggggctgggatggggtccccggggcgcggagctgcacaccagcccctcgcacctaggcagaaggtccattgccctctgccccgcagcctgcccgttcccaggccagcgagggcgctcccaggccggtctgcagccagaacacagcccgttccatgtgcttgtcctcgggacacattaggaatgaacccaggcctcagtcctggcctcctcctcaaggctgggtgctcagacgtccccctcagcccctttctctagaccttccggct

SEQ ID NO: 27559 - DNA, 2300 bp, Homo sapien
cggtctaggccctcaaccttctctttttagaacagtgccccccattgtggaaatcctcggttcagccactgggaactccccagttttgagggcaggtgttggcagtttcatttggtccaacaccaattccacgttcctgtgcccccttcaacagtctgcgcagcctcccagtggcgcagcctccccgtgactcagcctcctggtgacacggccttgctagccgccatcctgtaccgggcccaggtgacaccgtgggacgtctgttatttaggtgcccctggcccctgccacggggtttcccactttgggggccttgcatctgtgtggcttcttccttgctctcagtggtcacctggttgtcggtggcccgcgtccatcagcccatcatcattccgacttgctgttttgatcgtcggccggaaagccagacagctggccttgctggaccatgtctgcaatgggaattttgaggccgagagggagggcttcaggggcccctgggagtgcaacacgtaaatgggggcttgcacacggggtcgggtggggggctcttgctccgatgttccgggatcttttttgccccttgtagacccacaggtgtgtgtgcaggagccctgaggaggccagaggaggccagagaagggtgagcagaggtccgagggcactgcggtgaggccaggctgcagatggagctggggctcgagctcaggagctggtcttccctgctggggccgcgacgcctgccgctttcctgccggctctctgggtcaaggcctggaaaggctttcttctcgggcttctcatcagcttattggcccatttaggtaatggcacttcctgtccattaacctcagccacactgagatcagctctccacactcacttggcaggaggcttgcaggagctttcctatttggagagtaaaaagagcatggcctctgcagcagccaggaagtggaaagccctggcttcctggttccagagaacaaacaggggatgcggctcccagatgcagccaaaagtgctctggggacggggacagtcggccgggtcctgtcgcaagcggctgccctgttgcactgatgtcctggcccctgagaacacatcagtagggcctggccggaccctgggccgatgccactcttaggggtgagatggggagcctggcccaggctgagacccccaccctccacccaaaacgtgtccgggcctccaggccgtgcagagcacactggaggctcaagacggcacctcttctgtgggactgggccacagcctgtctgatgcctcacttctctgactcttggaggcatggtgctggcctgtctgtgagccccagaccccctcgtagagctcgctccagggccaggcccagcccccttaccgcctctcagccaggctcagctagtggccggctctgccatggggaaggcccggtgtctctctctctctgcctctcccaggctgctgcagcatggccccaagcctgggcgccagtaacagcctcgtccctccagcctgtacaatggctcagcgctacctggggactccctccagccaggccagacatgctgggcagtcagggtccctgggagccccttgacagcgactgacggcaggtgggggataagtagccaagtgtctcctgccggcgggggcaactctgcaggtgtctctgcagcctccccagtaccccatgggtgcctgccccctgagtcccccagggggcacctgcccctttgtcctgacccctgctccttccctctcttctcctggggtggccaggggtcacatgccatgtaaccctgaatcctgtcccagcctctgcccctgaggaacccgcccagcaagccatccaccctcactaaagtccaggccgtcttccatggtcccctcaccaccttgttctttctggccccagaggccatcaccatccagggcacaagggggcctgccccttggccaggtggctgcctgtcctctgaccctgggttgtcgacagggggaggggagagctggaaaccggggtcaggaggatgccagcaggtccgtcactccctgcctggatccggccaagtgcgggggaccttggccagcatcctagagagctggcgcacctcctgggcctgacgcgggcttcctggattgcataaaggctccttctccttacatagccagggcaaaggtgcatgacaactctgagcaagtcaaaacaaccgtcagcagcgggaaacctcgatgaacaaacaccgggagagtggtgagtagctgccaggaaagccccagcctccggcaggaaa

SEQ ID NO: 27560 - DNA, 2300 bp, Homo sapien
taaggtttgagagggctgactccaattttgaaagatgttctactgtggaaaaaatgctatcaaacagcatcacatgctactgagaaatcttacatgaaaggaagaattaatcaatgtggcaaacttcattgttccttattttaagaaattggcacagccaccccaaccttcagtaactaccaccctgatcagttagcagtcatcaatatcacggcaagaccctctaccagcaaaaaattgtaacttgctgaaggctcagatgatcattagcatttttagcaataatgaattttctaattaaagtttgtacattttttagacataatgctattgtacatacaacagactacagtatagtgtaaacataatttgtatatgcactgggaaaccaaaaacattcatgtgactcatgtattattgcagtatttgctttactgcagtggtctggaagcaaacaggcaacatctctcaggtgcgcctgcacttactcgtgacaattccagccagagcgaaaacaaactgactttcatccgaatccagctcctggacatcaccgtctaacgacttcacaaaactctccattgtttgaccagtgatgctgaaaaacttcaaagctttatcctgaaagtttgaaaatcagagtgtcatatctttttacagacactagtgtgaaaacattttaaaagtgcaggatacagaagattctagttttaattgtagaatattgtaaaatctattccctcattaaaagttcccattaaaagaacagagaaagcagcttgaggcatgcaggagcaacaaaaactaccctgaagattggtggactcttcacacgcataaatatgatataggacaaatgtacatgatgatgaaagtaaatgggaagaattcactcaaaatgtaataaaaatatactagaaaaacatgctgcctatttgctctgggcattaaaccagaggtgttcaaacctttagcataacttttttcaaaaaaaaaaatcttaatgaaaacatgtaaaagaggtaaagactggctcctctggtagtttaaatcttcatcacttggcaaaaagcatttccaagtttgaacctttgagttacttcctttggggtgctagagttctgaagaagaattttaaaaccaatgtacattttaacccagttaaaaaattggaaatatttgcatttacaaatgatataagaaaacttcatggatgatcaaataatctaaaactgggttgtggtgatggttaatgcaactctaaaaatttgctaaaaaccactaaattgtacatttacaatcttacagtatgtaaattaaacctaataaagctcaacaaacttttaaaaacacatttagtctttccacctaaagtcaaacacaactgttatttctattagcagtaactaatttctcactggtttcctgccacacgtccccctcttcaccttcatttccagtcatgatcacgccatgctcccagagtcaaacaccgatcttttttggctcctcttgtcccctccaggtgcccactctgcccggccatcgcatctgcctcaactgccacagctctcatacatgttccttctttcccatctcccctgcagagggccgagctcactccagccagaccagctagaatgaccacctcatcagtcatcctgtgtagacgcgatgtgccacaactccacctcctaatccatcctcacccactgtcaggtgaatctttctaaaattctgctcttatcctatcacttttattgaaaaacccttagggaaaatccagtcttcccacctacagaatgaatcaccaacctggtattcaaggtcccaaagtcacatcccaacctacgtttaagctttacctccccactactctatgacattaactctccactgtgtcaactgacctactcactgtcctaaaacaaacccacccattttctgccatttctacctattcatcaaggcccatttcaaatttatccccttctgtgaagttccctgacaaatgcctgcacgcatgcatacatgtgcgtgtgcacgctcccacacacacacatgctcccacacacccacacgctcccacacacacgatcccacatacacaggctcacaggcacacacactccccccccacacacgctccccacacacacactcccacacacacaggctcccacatacacacacatgctcccacacacacacacgctccccccccacacacgctcccacatacacacgctcccacacacacacacgctctccccacacacacgctcccccaaacacacaca

SEQ ID NO: 27561 - DNA, 2300 bp, Homo sapien
ggaagtcatctggtttcctactgggtttgccaagccctccgcccgtgatctcatctactattcaccccaagcctccaagattgtctagatggaaattaaggcacgggagctagatgactctcaatgcagcacaattaataacgggtggaagcaggatgtgaacacggatctggccccagtccaagcgccttctccatcgcatgcaatcagttacagttataaaatcgatggagggcagattctctctaagcctgacgctaagtcccgaagcagggggccagggccttcggaggggaactgggcttccacggagcagagaagagagtgaccatccatcccacgctcccatgcccgctttggcgccactgagtgcccccaccacgcgcagcctcacagaccgggtccccgcgtgggtttggaggcgaagtcgcctcccgccccaggtctccaccccgctccggcccagcccacgccgttaggggaggaagtctccaggcttcccccaagcacgcgacagcgagccgtctccgagcgcacggggcgaggccctgaggggagcgaatggcgacggttcaaacacgctggcgtcggccagggcttcctcactaacccggcaggcctcctcagcggcgcccgcttcgcccatggccgctgccgcctccgctccgttcgcctgagcgtcggcgcgccctctgacccctcacgccagaaagcgcgggaacgaatccacgccgggggtcgggaacggagagccgccaggcccaaacctcccagaatttgcgcagtattctcggcctagagagcgaggagtggccttggcgaggtccctctttggctcttctggcttagccggggttttaaacttgttatctgcaaagcagaaggaaagtcagcccctgatgtaagtgtcaagtaaaataaatcggatgggtcctttcctgtttggcgaggaatgctacactaagggggactgcgttcaaatgggcagtctttgctggaaacctcgcctccgcgcgccttccctcgctcggattcaggcgcttttacgttaagggttgaatttttgtgtcaacaggcacctcgggaggtcgcctagacaactgagcggagcaactgagataacccccgctacgtgtggagtgacctagtccattaacttgccccagcacgcccgctgagtccgcaaaatataggatggcctcgggttttagatgaacccaaagctaagatttcttccctctctggaattagcaagcagcccgccctgcccaactcccctggaagcgcgcgtgctcgccaggcctcgggacgcctgcgcgggcgcccttgcactggcaccagggctccggggtaggggcgcaccgatctgcccaagcctctgcaggcactggaggaaggcgagccctccacccgctcaacaggccccagtgccggcctttccttccagtctcaactccacccgggggcccgggggctccacagttaaaaactccacgccacggagatcgcaggtaagctgctggctcaacgaggtgtgctaaatgggattaaagatcctggaccgtggccaggcgcggcggctcaagcctgtaatcccagcgatcagggaggccgccgcgggaggattgcttgagcccaggagtttgagaccagcttgggcaacatagcgagacaccgtctctacaaaaaaataacaaatagtggggcgtgatggcgcgcgcctgtagtctcagctacttgggcggtcgagatgggaggatcgatcgagtctgggaggtcgaggctgcagtgagccaggatcaccgccaagatcgcgccactgcattccagcctgggcgacagagggagaccctgtctcaaaaacaaacaaaaaatcctagaccgtttacaaacagccttccgtctcttcctggtcaagtcctaaccctggctaacctcgccgtctacagcctgaattttggcaaccgaaaggcagcgccggcgccacgtgcacacgggctgggccgctccgccagctgccagggccactgccgcgctcactcccagagcgcgctgcgagccgcggcgcctttgtgacgccatcagcccgcgcgccgccgccgccgccttctgtgcagtcgcggcccgggcggacggtggctggctgctccgcagcgctcggctggctgcagcggcaccgcgggttgcgcggccggggatgctccagcgggcgcgatggcccccgccatgcagccggccgagatccaatttgcccagcggctggcgtccagcgagaagggcatccgggaccgagcggtgaa

SEQ ID NO: 27562 - DNA, 2300 bp, Homo sapien
gcgcagaagtttcggtgagatacaaagagcccacggtcaagaatttatgtcatcaggaggtgaacgagggaggacgggggtcctcccactggatgtgggccaggggaagaggatgaggaattcagaggagtccaggacaatcccgtgtgtccggctggaatctgaatggctggtgggaaccagcaaccaaaagaaaagaaaacaggtggcagtggagcagcagcagagaacaggatttcggggaaagaaaacagaactttttttggcatcctgagtgtgaggtgccaggtagagaagccaggctagcaaggcacatccgagctgcaagtaggaatgggctgggacaacaatttaggtttagaaaccaccagcatatatggggtacctggaactgtgagactaaacaaaatctcttggggagattcttaacagaatcaaagtcaggaattttggtctttattcctttttctatcagacttcccaggaaagtgtattttctttttttgggtagtctggtgatttctcttaaaaataaaacaaactgagaatgtcagtgatgggggagataatatctgttcttttaagcagattctaaatgtattagtaccatcagtaactaaataaaactttatcttaaaacctctattacacattgtagttcatattgtatgggctcactcaagagtttatagaaagtatttttggatcaggtaaatgaaatcatccaacagcagtgccgttaaaatctaaactacaaagccctgtgtgatctggccactgcctacatctccaacttcatctcataacactcgcccccccaaccccaacttattggtctttcaaaccactcctagggcacgtgaagctctttcctgcctctgcataggcggtttccgctcatttctcttcagatctgagctgattatcagcccagagaggccttcccagaacagcctatcaagaagagcaacctccttccctttttgctattatctggttttctttttccttttttcttttcttttctttttgagacggagtttcgctcttgttgcccaggccggagtgcaatgctgcgatctcggctcaccgcaacctccgcctcccaggttcaagcgattctcctgcctcagcctcccgagtactgagattacaggcatgcgccaccatgcccggctaattctgtatttttagtagagccggggtttcaccatgttggtccggctggtctcgaactcccgacctcaggtgatccgcccgcctcggcttcccagagtgctgggattacatgcgtgagacaccgcgcccggcctgctacctggttttcatttcctttactacacttacacaaggtctactttatttgcctgtttgcctccttgctttattactaatagatcctcgagggtagtgattttgtctgtcttctctcctgcagccccgtcacgtaaaggtgctggtcaaaggaaggcggcaatcaccgaccggacaccagggcaaatcagggcagcccagtgattcgagatgccggctggggaatcggacccatgtgggtcttttctcagcttccccgcttactgtgactttcataagtaacggaaccccctcaacccgtttccttaagtgtaaaaaggcactagacacagcaagaagcggttccggcagcgcggaaaccgaagcacacgctgggtgtcacgacaacacgtggaagccgcattccgtgccggggccctggccctagccccagccccggcccccggcccgccatgtggcgcggctgaccgcggccgtgcgcccacctgtctccctctgcgtcttcacgctgatgtactggcgcagcttcttcaccgctcggtcccggatgcccttctcgctggacgccagccgctgggcaaattggatctcggccggctgcatggcgggggccatcgcgcccgctggagcatccccggccgcgcaacccgcggtgccgctgcagccagccgagcgctgcggagcagccagccaccgtccgcccgggccgcgactgcacagaaggcggcggcggcggcgcgcgggctgatggcgtcacaaaggcgccgcggctcgcagcgcgctctgggagtgagcgcggcagtggccctggcagctggcggagcggcccagcccgtgtgcacgtggcgccggcgctgcctttcggttgccaaaattcaggctgtagacggcgaggttagccagggttaggacttgaccaggaagagacggaaggctgtttgtaaacggtctaggattttttgtttgtttttgagacagggtctccc

SEQ ID NO: 27563 - DNA, 2300 bp, Homo sapien
tttttttttttaagaattgcttacccagcttttcccaagaataattttttttttttttgagacagagtcgcactctgtctcccaggctggagtgcggtggctcgatctcggctcactgcaagctctgcctcctgagttcacgccattctcctgcctcagcctcccgagtagctgggactacaggcgcccgccatcacgcccggctaatattttgtatttttagtagagacggggttttgccgtgttagccaggatggtctcgatgtcctgaccttgtgatccacccgcctcagcctcccaaagtgctgggattacaggcatgagccaccgcgcccggcctgaacatgcatttttcaaaggtagtgcttgtgctcctggttgccaagtcccagcacaagcttgtttagcctatctgttgccaaatgcttcagtaagggtttctcttactagcagatgtaaatggccaagtcaggcagtgttgtttggctgcagacttatgtttagtttctcttcctgcctagtttgactataaggctgttgctgatcgactcctggaaatgaccagcaggaagaacacgccccacttcaacaggaagcgcctctccaaactcatcaagaagtcagtaactggggagagggttctgacatcatcattcctttagttctcatctcctggtgtgggacaagccatctgcatgcttatcttttttctttcttctttttttgtcctttaatgcttttgtgtatagcaatgtaatagacacatgtaaactgaaaagcttaatggaaacagcagtcccacccctcaggttccattcttccagtgcagccatactcatctcttagctgctttagaatgatgtgaagtctattcatgtctaaaatgaaccaaccagaaactgatgtgaatctgctatttaggtgtcttctgctggtgtgctgctgagatagatagggttaattctttacctctcccctccctcccatatggctatgccaaaagtgttagttaattcagctgtcagtgttgatgtcactctgaccatagtgacatgatgacctggaattcatggagggcctcgtgtggcttgctgtcattggtgacaacaactgtctgatcacactctaggagccgggcactgctctgagcactttgtatacattcaagtattccatgttaagcccccagaaagtagctcctgtagttttgcccatttcccagctggttcttagggcacaggatggtcctagcttgcctgaggtccctgccatccagtgtctcctcccccatgcacctccccacactgcgcttcgatgcgtcttgtttgttctaatgcacaaaaattgtgtgaagcaaaacatggcttcgcctttctccactggagaattgaatatgagagagatctaagctatttctgccttcagaaacaaaaattgaatttcttagtttgatttgggtgtgccaagatgcatctttggcccgccgtgtccttgctggtattgatggtaaccgagggcggcactggccttgagctttttggcttttgtattgcaccacccttccctcacagaatttcctgtctagcctcccctcctggaggagaacgtgaattaacaactatttaactatggcttgtattttaaaaatcaaatacatatgtctacagaagacagaagggatttctttatgaacatttgttatttttttattttttattttttatttttttatttttagattccaagacctttctgaaggtgaggcgcgccaagaatcatcattcatggtgtttttcgtgaatatggaccccactgggggcgttgatgccaaacgctgagaaacaagattgaaagaactttactgaaaacctctgataagaaataatagtccctagcccaggcaaaatagcaaggccacatctctactaaaaatgaaaaaattagccaggcgtggtggcgtgatcctgtagtcccagtcacttgggagtctaagaggggaggatcgcttgagcccaggaggtccaggatgcagtaagttgtaatcacaccactgcactccagcctgggtgacacaacaagaccccaacttttaagaaagacagaccagcccttacctagtcataccgcagtacagcgtgggaagtgatgcaagcctagggctccctgcagcctgcccaccttcctatcctgggctctccctaaccaccaaagcaagagggcagactgctctcatgtgtgggtactgcgatgttttggtttggtttttattattttaactagatggattttcaatggcctag

SEQ ID NO: 27564 - DNA, 2300 bp, Homo sapien
caacagctgggaacgggcaaccagatctttgaaaagcccaagaaaccacaggcaaaaatgtactcaccacaatgacattttcagagtttcgatcagagccctctgtcgagaaggagggtcctggagcccacgggcctggaggctggtcagctctcttccatgcctcccctgctctttcctcttagtgcttgggaccaaaggtgtgataggatggggggggtgggggctggggatggggaagggaccatggatgatggatcaaagtgtggaaggacgaaatccactgcagagagagagattcatcaggcgctcctaagagccaagggcgagagactcacagagtaggatgagcaaagggtagtaagggcagttgttggtgctgcctttgtaggttcctggggctctcacccagcactgcttgtcaccaactctgtaacctctgacttctccttagtttgttaacttcacaatctataagtttgggaaaggacaggagaatttatttcttacaaagggttacagcctttaaggtgatgagacgggagagttccctggagccttttgctggacttgtgataggggtgtggcttgcttacctggcaccacgctctaactccttgtgggaggggaagcacgcaggcgagtgggtgcgagggccaggacaagcgcttttggactccagcctcgtggtaccatctaggggtgtgttacaattaattctctttattttattttattatttttttgagacagagtctctcactgtcacccgggctggagggcaatggcgcgatcttggctcactgcaacctccacctcctgggttcatgcaattctcctgcctcagcctcccaagtagctgggattacaggtgcacaccaccacacccagctaaatttttgtatttttagtagagatggggtttcattatgttggccagactggtcttgaactcctgacctcttgatccgctcaactcagcctcccaaagtgctgggattataggcgtgagccaccgcgcccggccaatgttagctattattaatggacaattatgactaattatgaagtactttcttttaaaagcctagatctctaagtaatgtcttcctccctcagtcctcagcacccgcctggtcgggcattgggtctcaccaagctacagagccctaggtgcgctgtgttaggtcaccaagactttagtctggtgatactgaccccagggccccaaatcaccatgtctgcaagtctggaacccaaaggcctccgttccccggggtggtgcagggaagccgcagggagtgcgtcagctgtggagagcgtaggggtgggaagtgaaggctgtggggtcccccagggggtcaggttcgtcctcgaaggcaggccctccacaggaagacctggttggggtgggatcggacacgcggcccagacccaggcacctgtggatggacggccgggcatgtggccatcggctgggggcctctgcaggccgcgccaccagagtgggcactcagggtccgcaagggtctggggcgcccccagagaagcccgccgccccaggccggtgcggagttgactgggtccccccggccccgtgtctgtcagctcccgcgcggcccctgggaagggacgcggatcggatgcgggctccgggccctgcaggcagttgagagcgcggttcccttgggtatccggggtccggggtcactttcgcgcctccgcactattcccacgcccgcgcgcactctcgtggccatccgcgttgcgagagtgtcgcgcccggaggtcaggggcgtggagcccgggcccccgagtctcccctgcgtgcggcggggcgcggggcgcggggcgcggggcgcagggctgaggcggagcacaatggttgaatgaatgaatgaacgaacgaatgaacggcgctgcagagccctctccaggcggaatgaaagtgcaaacccagcgtttcgggcggcagagtggcgggggccacctggcgcggccgcgcggccagggtccggtttcgcttcctcccagcccgggggcggggcctgcgtggctgtccccgccccggtccgcccccggccagcccccggcgccgcgcggaactcgcgggttcggagccgcccgctgaggtcagaaggaggcgtctgcgctgatcgggtccgccgcgcgccagagccagagtcgcagccgaggggagccggggccggagcccgagcccgagccgagccggagcccgagcgagcggcggagaccgtgcccccgcctcggccccgcgccgccgcggccaggcccggcat

SEQ ID NO: 27565 - DNA, 2300 bp, Homo sapien
gtgtacgtggtgtgtttgtgtacactgtgtgtgtatgtgggtgtgcatgtgtgtacatggtgtgtgtgtatgtgggtgtgcttgtgtgtacatggcatgcatgtgtgcatgtgggatgcatgtgtatggggcatgtgtgcatggcgtgtgtgcacatgtctgggcatgcatgcgtgtgtcatgggcatgcatgtgtgtgtatgcggtgtgttgctctgcaggccccagtgttggccggcccccccgtctttcctgtaagtgacttccttcctaggaggcttggtgtgactggcattccctggaaagggaggggcggatccgcagaacgggcagcttcggggacacaggggctgctgattggcattgtggcttgttggccttggtgtctgcgggtgcacacccacacagagcttttgaaatggaatcctgcgtgcccagttcacagagtgagtgacgctgaggaataagaacagagggaacttctcaaggagaaaggaagaaaggagttgtcaaagatgggctgagcaaaaaaccgtgcaatcagccgaggaggggccggcagcgcctcccttcctgcccacagagcagccgccttgtgcccatctattccccggctctgcatggggcctctgttttaaagggttctgtggccaagacaagcctgccagcccctgtccctgtccttggccactcctccggcagctttccccattcctgaagcaggtggctagcctgcttagcctcttgtcccatctccttacctgtgacagtcaccaagcctctgggaatgtggtcaccctaggacagctaaacgaggaagctgtgcagtgcacacaggtttggctgaccccaagggccagttgctgtgcatgggagcgagttccaaggggtgggagggagccagcactaggtggagctctgccagccggggcacagggaggaacagcatccaggaggagggtgcagcgggtgtgaggccctgtggagcagactctggagctagaataaggtggcatttttgctgcacgctgtgggggtggacggggcccgaggtcacaccagggagcccatattgggtcaggaatgctgctttggcaatccctggactcagcccccagctgtctggccatctgggcacttctgagccagccatgacctctgccttcccttagcactttgcagtgagcccagcacctggcagcccctgcccagctggtgcacggtccctctgcggcactgtgagcctggaagtagggagctgggtgtccatgtgctctgagcagggctgggggcccaggcgatggaccctggagctgtgaaggctgaggcaggggtgggtcagggatgaggggagactgctctggggggctcggggccatttccaccagaagttccccctgggagtttgtaggacaaaggacatggttgatgtggatcatagggctgaccagtggcaggcggtgggagggacgcggggtgcttgtgccccaggttgatcagggtgaagcagtcacatgatctctcctgtcctctttcctcattctggtttcctaaagtggtcagaggtctctgcaaaataagctaaagggagggttctgctgggtgggtggcttcggcttctgtgcagcgctcaccctgctctcccctggaacgcctggaactagggtggtcaggctggggtggaggagctcccctggaatgttccagagcttcccccactcctgccgttctgagtcaccctgcctccccggaggaggaggaggatcagctgagccgccgcgctcacgtagtgtctggctgtctgcctgtctgcctcgctgtgagcagagtgggatgctgccgataaggcgcgcacgtgggccctgggaggagcccgaggcagccactcccgcacgtgggcaggaggagggctgctcacaccaccggccgagggaggaggactgcgggctgcgcctgggcaggggatgagcttgtgtcgcgggcggcagggggaagggagtcggagagctcctgcggtccagccggatgactgatgaggttgaaagcacttccgctgcggcccccgcaggaagttcccaggaggaagttgcgaccctttctaagccatcccactggcctggactctgctgggattattttgaccccccagggcagagtgtagccatctgactggctttctctctcggcaggagacggggcgcacgcctgcaggtgggggagccccaatacgtcacacggatgagcggggcaaagcccagccccccaccccgcacccgcccgcccgcaatcctgccccctgg

SEQ ID NO: 27566 - DNA, 2300 bp, Homo sapien
gcgggtgctgggagtctgtgggggcatgcgatgaggaattctgctggtggagggaaagccacaaagtggattccgctgctgctatgggaagggacggtcactaccgctgcccctgtggggagaagagccccgggggaagaagagcactgctgacagaagcccattctcttcgcaggcttcagtttcacattcttggtacctcctggtggtgcctgggagggagccactgctgtacagagatgccaattccagaggcatggtccggcacagagcgctggcttccagctgaaggacatgtgtaacagcaggagatacctttctctggggtcccaggctcccgtcctggaccttggcaccccgccccccgtgcattgtcgtcttctgagtctggctttgtctggcacatgaagttggatgggtagactctggaagcgtccagaccagcttgcgatgctgatgaataagctgattttgatggggtgtgtgaaacggagatgccagcccaggggctcagcttgctcgtgctctcatttaaaagcagaaaatagcgacttcattctcggatacgtttgccagccccaaaggattaattatctacacacccagaagcagtggagcagaatattttggcaggattttcaggatttgtgtcatcgttgcttaatatctgtttcttcacagtcggttagaattttaaaggatttgaaatactgcaagctatctgtgtatagaggctgtggattcgggctggtacatttgcaaagtgcccattttattttttatttttatttttatgttttttgagacatattctcactccgtcacccaggctagagtgcagtggtgccatcagggctcactgcagcctccacctcctgggctcagtgatcctcccacctcagcctcccgagtagctgggactacagacatgtgccaccacgcccggctaatttctgtattttttgtagagacagggtttttgccatgttgcccaggctggtcttgaactcctggcctcaaactgtactcctacctcggcctcctaaagtgctgggattacaggcatgagccactgcacctggccgcaaaaaaagttaaagtgctaactttaactttttagattagtaagactgctaacgtgtttcattagttcagtgataataccggcttcaaagaaaagccttggcaaatacaaatcgtaagcagatagctcaactcatcatcacaaagcaaagcccacccagtgaagaaacaaatgtgggaagccccggaagcccctccccatccccacccccccccccgccccccccgccctggaaacagccgctgtcctggtgttgacagcagaggtggcactgcctggctttgaacttgaaggtgggactcaggggtggttggctgttcagatgcagcagggagagagggtttggggcattgctggtgcacgggagagggtggggatggccccccaaactagcggaggccgggcttggccctgggagatacaggaaggaggcccccactccgtggattccgtccttcctctccatctgtctggaaccctcaccctctccctccctctctgtcctcacacacccactccctgactctcactcaggcttttgaggcatgtgtgctgcccgcggagcccttggcctgacttcttccaaggggtggggtagacgcccacattttcacagcagagacagcctcccagcctctgttcagtgtgtggacagatgggtattgccttcgttttattgtttgttagtcttattgagtgctttcgctgggtgcgatttctggaatgatgcgtgaagtgcttccccatggaggtcctgtgggctgggcgatgccctcccgggctggttgctccccagagagggaagcccagctccagacacacaaggccctgcctgtgcacatgtcatgtgtgactcggggagagcctcctgctctgatgcgtcagccctccagcctgcagctgggggccccgtgccagccgggactcatttactcccctcttctgagtcagcacctgctggggttcgtgggaccccagacctggctctcttacgcctacctgttccttctctgtcttgcaggttttgggatttgagattgacgcggtgaactctgtccagttttcaaaccacacaggtaaggcgttggctccagcagctggcatagagcagactgtgggtgtgagggacggggcggagtgtgggtgtgagggacggggcggagtgtgggtgtgagggacggggctttcgtgtggacggggacctggagtcctgggc

SEQ ID NO: 27567 - DNA, 2300 bp, Homo sapien
gccccacctttatgaactcttaacctgtctcttctcattcctttgtcactaccggacgttggatacaccatgggtggtgttgaggctggtccccaacactaataaagacatacctgagactgggtcatttgtaaaggaaaaaggtttaatggactcacagttcagcagagctggggaggcctcaggaaacttacagttatggcagaaggggaaacaaacacctccttcacattggcggcaggaaggagaagtgcagactgaggggcccagggttttaaaagccccttgaaaccatcagcttttgtgagaactcagtcactatcatgagaacaagatgggggaaccacccccatgattgaatgacctcctgccaggtccctcccacaacatgtagggattatgggaactgcaattcaagatgagatttgggtggggacacagccaggccatgtcacctccccaggaaaggagcacatgtgcagcagtggtgagtcccaccctgcctggaaagatatcaaaatccgagggcagaaaggaccaggagggaccattgctcacctccctcctcctaccccttaccccaaaccccgccccagcctggcagaagcctcctcaggacacaccctccaccggaggggcaggctgctgtgtgaggcactgacctcgcccgcagtggataccacctgcccctcctgaccccagtgactgttaacccagagtccatcaggggcttggtctctggcagacccacccctcagtgcgtacactctggtgtcccgggcagagtacagggcaggcgcccccaggtgcaccccccagatgccgcactgtgcctggagcgtggctcctgatggcagtctcaggacctttgcgccacacgtcctcccgtgcgacggctgctggggaaagccaaaggcgtcccttccagcgggagccagcgactggtacgcaggagggccctcaggggcaggagccatggagccctcctctggtgtgggaattcaggggatcttagccacagggcatggcgcgtgggcgcagagccggccgtgacccacaagtgcgtgatacttgtactttgctattctaggaacccatacatcagttttccttatttgctgaaaaaggcatgcattagaggggtgattcatgtgggaggaggccgggagcccctcgatgtgaggcgtttctcatgggcgaatgtggggtatccatggtggacccccaccctgtgtggatggctgccccctgagcagtgctttgagctggagctgtggtcaggttccgcagtgcaggaagggctcccaggaggctggtggtcccgcctgcaggaagccgacgcgtctgtcctcacacattgatatgcctgtctgcctgggacggacacttcaccctggctacccatcgggccaagggcaggttgtatacacctgggctgaggcctctttctcattcacatctatctcttgctcaggagttgatctaagacaggctctaattgcaccttaataagcttgttggggaggagttgggggtggggacataacaagccctacctgccagggtatccgggtgacagtggccggtggccgagcaccccggcctgaatagctggggactaatgcaggagacgctgggaaacaagagactgtgacgttgtgcggagggagtagccaggggccttccggacagcaatgggggagcaacgcagccgtgagctggtgtgtctctccccacgctcctcctgtacctgggacgcagctcccgcaggaactggcagtgggagtgtgggggccacggaggtcgtagtaaccatccctgacagtgcaggggcggggggctcgcgggggggctcgcggggggctcgcgggggggctcgcgggggggctcgcggggggctcgcggggggctcgcgggggggctcgcggggggctcgcggggggctcgcgggggggctcgcgggggggctcgcgggggggctcgcggggggctcgcgggggggctcgcggggggctcgcgggggggctcgcgggggggctcgcggggggctggcggggggctggcggggggctcgcgggggggctcgcgggggggctcgcgggggggctcgcggggggctcgcgggggggctcgcggggggctcgcggggggctcgaggcgtcccatgtgggcagccgttgggacctgccaagcactgcgcctagtgatctccttcgggtttgagccagtccatggggaggagccgtccaccaggcagcctcagggagagtgggcgggtgtcaagggaagcccacggcccc

SEQ ID NO: 27568 - DNA, 2300 bp, Homo sapien
gcccaacagagctgcaggaaccgtacaagcagcgggaacatccctttctcttcttgactatgttttcccctgatgctttgctttccacatagaagagttttccattttcgtggggtcaactctgccttcactcattcaacaatgatggggggctctgccccgctccccccaggcttcaaccacacctgactgcccacccctttgggcccttccctgaagtgacagaccaggctgtgccctggcaggtaagagaaaggaccccacaacccattcatgggccgctccagctggggccttgcatgcaggagcggaccagtccccctgagggacagcccttgggtgggggctctgggtcattttgaggagtcaatcacaccaacaggtgcctagcacaggccccacccccaccccaaataaggcaagcgacccttcccttccgcaggtggtccagtctaacagaaaccctaaaccaaagggactgtgtggtggctcaagcctgtcatcccagcactttgggggatggatcgattttagcctaggagttcaagaccagcctgggcaatatagtgagactccatctctacaaaaacactttttaaaaaaattaggggtgcagtggtttatgccaataatcccagcactttgggaggccgaggtggacagatcgctcagaagttccagaccagcctgggtaacatggtgaaactctctgtctctatatatgtgtgtggtagggtgggcctgtggtcccagctactatagcagctgaggtgggaagatcgcttgagcccaggaggtccaggctgcaatgagttgtgatcaggccactgcaccccagcctggccaacagagcaagactctgtcaaaaaaaaaaaaaagaaagaaagaaaagaggtcaggtacggtggctcacgcctgtaattccagcactttgggagcccgaggcaggtggatcacgaggtcaggagttcgagaccagcctggccaatatggtgaaaccccgtctctactaaaaacacaaaaattagctgcgcatgaaggcgcgcgcctgtagtcccagctactcgggaggccgaggcaggagaatggtgtgaaccccggaggcggagcttgcagtgagccgagattgcgccactgcactccagcctaggcgacagatccagactccgtctcaaaaaaaaaaaaaaaaaggccgggcgcagtggctcacacctgtaatcccagcactttgggaggccaaggcgggtggatcacaaggtcaggagatcgagaccatcctggctaacacagtgaaaccccgtctctactaaaaatacaaaaattagccaggtgtggtggcgggcgcctgtagtcccagctactcgggaggctgaggcaggagaatggcgtgaacccgggaggcggagcctgcagtaagccgagatcgcgccactgcactccagcctgggagacagagcgagactccgtctcaaaaaaaaaaaaaaaaaaaaaaaaagaaaagaaaaggaaagaaagaaaagaaatcctaaaacgcaaattccaccagagaaccctgccttcttctcatccctctgatctaccccctgcccccacccagcctggagcgcgtgggcgccgtctccccctccctgggcccctctgtccacccccttcagccttcagtgttctcggtcacaagcggtgatgtccactgcagcccgcacacctgctcccgcggggccgggacccctgacccctgacccctgcagcgctgcgccccgccctccctcgtgcgcggcccggaccccgccaccctgcaggattgcgcctactccgactgccccttccctatcgtcccaccctgcgcgcccaacccaccggcgacacccggccgcgcccccgccccggtccgtgtgactcggcgcccggaaagacgataccagccccgggaggggggcgctccctcccgacaccagcgctgggcgcggagacccagcctgcggcgagtggtggccaggttccccgccccgcgccccgccccgcgccccgccccgcgcgtcccttcttgcggggccaccgcgaccccgcaggggactccgaagccaaagtgcctcctccccgccccttggttccgcccgcgcgtcacgtgaccccagcgcctacttgggctgaggagccgccgcgtcccctcgccgagtcccctcgccagattccctccgtcgccgccaagatgatgtgcggggcgccctccgccacgcagccggccaccgccgagacccagcacatcgccgaccaggtgggtgggccgcggggacggggcc

SEQ ID NO: 27569 - DNA, 2300 bp, Homo sapien
cgacatacccactgtgtgagtgcagggcctcttctcattcgtgcttgtcccccggaaagtcatgtccgctggaacctcggaatgtggccttaatttggtaaacgggtctttccagacatggttagttaacatgaggtcatgctaaattaaggcaggcctaagtccacactgactgacgtcctcataagaagaggagaggctggctgggtgcagtgcctcccgcctgtaatcccagcactttggggagaccgaggcagcccgatcacctgaggtcaggagttcgagatcagcctggccaacatggtgaaaccccatctctactaaaaacacaaaaattagccagaaattgcttgaatcctggaggtggaggttgcagtgagccaagatcgtgccactgcactccagcccgggcgacagagtgaaactgtctcaacaacaacaacaacaacaagaactaattcagattctaaaaccagttgctaaatgtttccttttttttttctttttagacagagtttcaaaatctgtcgcccaggctggagtgcagtggccggatcttggctcactgcaacctccgcctcctgtgttcaagcaattctcttgcctcagcctcccgagtagctgggattacaggtgctcgccaccacacccagctaatttttgtatttttagtagagatggggtttcaccatgttggccaggatggtctcgaactcctgacctcgggtgatccacctgctttggcctccccaagtgatggttgggattacaggcatgagccaccactgccagccttttcaactttttatgaaaaatttcatacatagaaaatgtcagaagataggtcaatgaagacctgtattcctgcctgtagacgccacacttgtatttttttgagacggagtctcactctgtcacccaggctggggtgcagtggcgcgatctcggctcactgcaagctccgcctccggggttcacgccattctcctgcctcagcctcctgagtagctgggactacaggcgcccgccaccacgctcagctaattttttgtgtttttagtagagacggggtttcaccgtgttagccaggatggtctcgatctcctgacctcatgatccgcccgcctcggcctcccaaagtgctgggattacaggcgtgagccaccgcgcccggccaacgccacaactgttaacagtgtgccatagttgcttatctgcatacacatatgtgcgtgtaatgatttacttttttgcagaatgaattacagacatcatgacaggtcacctttaccaaagagttctgcagttatttctaaaaataaagaatatttttctacttcagggtatgtcaaactgtggccctaggccaaatgcagcctccccgtttttttttttgttgttgttttttgagacagagtctcactctgtcgcccaggctggagtgcagcggcgcaatctcgactcactgcaacctccgcctcccggattcaagcaattctcctgcctcagcctcctgagtagctgggattacaagcgcccgccactacgcctggctaatttttgtatttttagtagagacagggtttcaccatgttggtcaggctggtctcaaactcctgacctcgtgatccacccgcctcagcctcccaaagtgctggaattacaggcgtgagccaccgcgcccggcacacccctggttttaaaaataaagtttcgagccgagagtggtggcgcccgtggtcccagctcctcgggaggctgaggctgggggatccctggagcccgcgaggcaaaggctgcagtgagccgagatcgcgccttgcactccagcgtgggtaacagagcgagaccctgtctcaggaaaaaaatacaagtggggttataaataaaatgagattaaaaaacaacagatctttgcctcagaatcccgacccaccgcagccccagcgaggcgcaggcgcaggcgcaggcgcgcgctcgctggttccgcccatgcgcacaggcagggagcgcgcgccccctctgtagccttcggcctccgggggctgcagttgcgcggctcggccactgcgcggcggtggcgtgcgcctgggcggtgtcgcgggctgtgacgtcacgccacgcgccggggccaggaggaggcgggcgcaggaggcgcgtgctcagtgtgctgggtaccaggcgactccgggacagggggtctcggccgtcggcgtcatggtttcgcgcgtgcagctcccgcctgagatccagctggctcagcgcctggcggggaatgagcaggtgacccgggaccgggc

SEQ ID NO: 27570 - DNA, 2300 bp, Homo sapien
catcaaagggaaacaaggtcaggagggccgaggggtccacggcactccgcacccacggggccaggctggcacaacgccccaacgctgcaatcctgggaagagtcacacgcgccctcccgggacccacgtgaccatcaagggagtgtggaggacacatccctcgggggtgacgcccctgcagatggagtttccccatctgtgccacccttgcaaggcctgggaaaggctgcggggccaggcggcaccgggcaagctgagtgccaggtggtggttgcaacacaccgggcaaatctgaaaccatgggacggacgagctgcacccctgggaaagagaacagaggaaggccggttatcaacgtcctcctgtgcctcagtttccagaaacaagccagactcagtgcctcagggagaccccgtgtggcctccggagagcacgggacccgccctttgtgcaggtgaggaaactgaaccccagagcagtgagggactggcctggggaccctgggctcagccctgggcgccttccctctgcccatctcagacgggcacagccagcaccgcctcaccccaacgcgcctccagactggccctccaggggcccccaggcacaatcctctcactttcttcctcaagcccctgccttcccccttcgcactgtgacccaggggctgctagcagctgggctgggctccaaagcttgaagctgcttctccaggtctctttccagggggcggcggatggctgctcactcagggacgccaacaccaacaggaagggacccatgcacggatctgacttccctcccaggctctgccttcactcaatgtccctgtggggcagctggggctcccggccgccctcccctgcccacagccgtgaggttgcttcctagggttctgttttccccacagtcggaactgaggtgctgggaggctccagaagagggatggggtggagcaagtggcctggagccccccagggcagaccccaaagagaagggtcagaagtgccctctggggcctgggcagctggggggagcccacaagcctgagaccctgtgggagggaagcgcccccaccccgtggtaagaaaggggctggtagaggctcctatgtggctccctctgtcccctcccgacctctggccaggcttgggataatccctgagtggacacaggcgccacgatggggtctcgggggtgagggctgaggaggctgagcctccaaggaccccagggtgcctgttcccactgcacacccaccagggcacagggtagggatagtgccaggagggccacagctgcagggtccatcccaggccgtggtacacaggtagaggtgggtgccagccttcgtgaagcacctgcagaagctccactcagggagagaacgaggcactcgcccaaacagatcctgggtcacacggggcagcaagagagggtggagcaagtggcctggagcaaagggttggaggccccggggcggcgcgttctcccccaagcccattccagggccatgggcaccccccagaggcagctggtgggactgcagccatgcaggtcctagagggcaggtgacaggggacgtgacagaaggggacaaagggccggcaacatccctgggggaggcacagagagggccagactgccctcggtggactgcggaacccagaacccaacggccaatcctccccctactcctcacccacagtaaggggccagggctccatgcaatgagaacccacgggtgatgccacacgggggagaagccacgcgggggagaggccatgcaggggagaggttacaagggggagaggctgcggggtgagaggtcacatggggcagaggccacgcgggggagaggccacgcaggggagaggtcacatgggggaggccacgcaggggagaggtcacatgggggagaggccacacaagggagaggccatgcaggggagaggtcacaatggggagaggccgcaggggggagaggtcacatggggcagaggccacgcgggggagaggccacgcaggggagaggtcacatgggggaggacacgcaggggagaggtcacaagggggagaggccgcagggggagaggtcacatgggggagaggctacacaggggagaggccgcacgctggggagatggtccctgcgggaagactccgaggcagtctcctgcagctccttccggcgaatccggttcaggaagtaaaaccagccctgtgtagaggtaagtgatgcttgtggggataatctccgagcagctcaccgcggcgctggccattgccgttctcttcac

SEQ ID NO: 27571 - DNA, 2300 bp, Homo sapien
gctccctccctctccgcagagtgccatgatcaccccacacaggccccagcacctctgacctaaaccccaagggccagaatacggtgtcaccacccacccaacctgacccaggccgagggagctgggagcagaaattcaggatgcggaggtgaggggagcagaggctggattcaattcagccgaattccaattgggagaaaagtgaactccacccgggcttgcctggaagcccgtttccttgggaaccgcagggctgagaaacagcctggccagggaaaaggcagctcctggcgggcagcctggggcagccatgggtgtgcagacctcggcccctgtgagcagcggagagaaaaggacaggtggcactgggctgtggcttctccgtgtccaggagacccgaacggctcagagccttcaggcaagagtaggacattatgggtcgggcgcagtggctcacgcctgtagtcccagcactttgggaggccaaggcgggcagatcatgaggtcaggagttggagaccagcctggccaacgtggtgaaaccgtctctactaaaaatataaaaattagctgggcatggtggcgtgtgcctgtaatcccagctactcaggaggctgaggcaggagaatcgcttgaacccaggaggtggaggttgcagtgagccgagatcatgccattgcactccagcctgggcgacagagcgagactctctctctcaaaaaaaaaaaaaaaaagtaggacactgttgtctgtccaagggagggacagaccccagggcaagtggcacaaagcagacagggtgccaggaggtgcccaaggggtgccaggggcagggtgaggacctggtgctcagactcaaaacctacactcaggctagctcccagtcggccagcccaggagtcacccaggcacaccctaggggaggggacggggctgcctgctgcctgagcccttcactcccccggggaatgggacctgtgccccacagcctagggacagggccactggccttaggacagaccaggcagcagacaggccacggcaccataagccctatactcattccccggcaccacctgctcctggccaggccccacacttggtctggcctgaccctgccctcaagtgccctgagggtgacatggggggcccaggggctgctggggatgaggatgaagcctgactgtgaggcggggcagactgggcgggggcctgggcctcgctgggtcacctgggatgtaggtcaaggcaaggagggaggacctggaacgcccctcccctgcccctgcctggctccccaatgccctggccatgggaatcaggtactgtggcaccaggtggatggtctgggtgtccagggagtctggggccacttttggaatctgccagcccctgccacgtaccagcgttttcgaatcctctcactctccgccaaatcacccagagcagttttccagggacaggagagggaaggagctgcccattgcgctgcccctggctcaagctctgagaggggcgtagggctggggacagcggccaggactccggggctgtgggggcgggttctgggtgcgtcatggggtgcgccctgctgtgcctgcccgagtgcggggcctgacctgaccaggtgagcccttctctgaggaagctgatgagggagaatttctcctgctggcactgaagaagcaaagtgtgtgggggggggagcctcggggaagggggctgtgggcacctccaggatctgagggaaccccaggaatagcccgtgagagaaacgggaggcctacagccaagagtgcatcctctagaagacaaggaagaaagaagaatgcaccctcccaacagccagggagtgtgcgagaggcccagcctccagtgcctggcagcttcagcacccacttcagccagggagccctgggcaggcccagccatgcctcccaaaccctcgtctacggctgggcgctgacatgcagtggtggtgaagtcaccaagttcaaggtaatttgttgcacagcacgggtacttaatgcaggagggactcgataaacatttaggcaggaaaagaaagaagaacaaaggagggagggaggagccaccaggaaggaaggagggtgactgcagagaccggccctgggcagcggtaccaggggcacagggagcctggcccggcccattgtcactggaattcatgccatgcagacttctacatcaaagggaaacaaggtcaggagggccgaggggtccacggcactccgcacccacggggccaggctggcacaacgccccaacgctgcaatcct

SEQ ID NO: 27572 - DNA, 2300 bp, Homo sapien
gagtgcagtggcacaatcttgactcactgcaacctctgcctcccaggttcaagcagttctctgccttagcctcccgagtagctgggattacaggcgcctgcaccacgccaggctaattttttttttgtatttttagtagatacggggtttcaccatcttggccagtctagtcttgaactcctgacctcgtgatccaccagcctcagcctcccaaagtgctgggattacagacaggtgtgagccaccgtgcctggccattttttgtttgtttgtttgttttaaataaagcacatcattgtatattcactgctctgcactatttttattttttaatttaacagatcttggagactatatcctatctgtgtacacagaattatcacatcacaactttagaaaatgttttaaattaaaaatgctaaatgaatgttctagagtttatttaaccaagtgtctggttgttctcaggcttcctgtgattataggtatagctgtaagtcagcacatccctgtatccacacatcccgtggtgcctgtgagaatttatctgtggcacagattacccaaaatgacatgaggggtgagaggttttacaaatggtgaattccacgagctttgcaaatcttaactcctttttcaagaataagggaactgtgagtaggacaggtgcacggtactttcattttattttagtctaagtattttctgaaataatttgaggaggcttaaagggaggtgcaagctgggtgcgggggctcatacttgtaatcccagcactttgagaggaggaggtgggagaatacttgagctcaggagttcgagatcagcctgggcaacaccgtgaggccccatttctacaaaaaaaattttttttaaattagccagacatggtggtgtgtgcctgtggtcccagctacttgggaggctgaggtgggaggatcacttgagccctggagttcaaggcttcagcgagctatgattgtaccactgcactccagggtgggcgacagagcaagaccctgtctcaataataataaaaataaaaaaaaaaaaaaggaaaaaaaggggcacagtagacagtaccagtacttggtattttaaatggttttcaaatgaagcccacccaagctcagcaagtccagccggggcctgaggacctgagcaggcgccaggtcacacaaggtaccgggcgcaggaggcggagcccgcagcgggccctgccctgacagcggcacctgcgcggcctccgcaggttctgggatcggccgctggccaggtgcaagggaggggggacggcagccgctgtcctggggctgagagggctccgcggtctggaggggacggcgtcagcgcccgcgggggttcgcagggcagccccggggcgacccccacccccgccacggtcaagtgtcgatacagtgttgccagccgggtgccaactatgaataagtccaagggcgcggcacgtgggccgaaacgcgatccttccgcggagccgctgcgcgcagggccgtccccaccgagcccgccgcgcggcgacccctgacggcgaccctaagccccggccgaccagggcaggagctcgcgcgcgaaacttccccggcgcccgcaggagaccccggcaggggagatggcggggcccaggcagagctcggaggcccctcccggccccaccccgcgccccggccccctctgcccccgacccggtccgggggagccctcgcgggaccccagcctggtccttcgccgcctccccccgttcagccccgacccccctgatccccgcgccccccgcggtcccggcccgccccctcccccagcccgggccccagccccgtccgttagcggatcccacgcaggctccgcgcccggccccgccggcgccctcggcccacacctctctccgcgcgcgtgtcccgccgtgtcgcccccgtgtcccctccgcgtccccccccgcgccgtccccccgcgtccccccccgcgtccttcccccgtgtccccccagcgtgtccctcggccgccccgcgcgcgccggcggaactgtgggatcgccgcgcacaggaagtggcggcggcggcgcggccgagggcggagggcggagggcggcgggatgggggccgggggcggcgggcgccgcactcgctgaggccccgacgcagggccgggccgggcccagggccgaggagcgcggcggccagagcggggccgcggaggcgacgccggggacgcccgcgcgacgagcaggtggcggcggctgcaggtgagcaccgaggcccccacccgaggtcgggccgcccccc

SEQ ID NO: 27573 - DNA, 2300 bp, Homo sapien
aagatgggaaaggtgctctgcaggtctctactgccaggagctcagctttgatcttgagtgctggtggctgtccagctttactggcagggattctgatgactcagagacagtagctacccttttcccagtggtattgccactgagtgtgggatgggtcacagctatgtctgtggccttttgcaaatcaacttcaaaatttgcagtcacatttatggtaggacagattcatttcacaatgattttgccaattacccttgttatttccactcacatatatctccccaaagtggaaacaaggacacgtctagagacaggcgctggacgtctcctgctcactggcattaagtgggcaggcggcttattgctgagtgatggtccctggacatttccagtcgactgtgtttgacatggtggtgaattggacacgtgacaggtggcaatatgttaactgttcgtagcaaggaagatttgttttcaggctggtggtttgattacaagttggtcattcttaatgccagggagggggaagagagagaaaatgagagagaatgaatgagaacaaatgtaagaactttttttggaaaaaaagaaaattgagaagaaagtgatagtaattactaattgtttttactttgtcacttattatgtatttatttccagaaagggatcagttttttcttccttccaagttttgtggaagaaaaagaaaactgaaagtatttaataactgtgtcataatttttattttgtgccttgtgattacattgtattttggggagtgggtcaattttttcttaaattaagaaatgctttatatgaaaacacatacataaagtattgaacccctgcacctgcctcaagtggagaaattaaccactataaatactttagaaggcaaagggttggtgaagctgaaaactgctaaaattcttaacatgcagacagaaaagggaggtgggaaggatgtcgccctcagagaacgtgtcatacctcagcctgtgctgtctggggcagacggcatgagccatgcagcccacagaggcatgctggaaacatggctggtgggaactgagatgtgtttgtggtgtgaaatgcacgccgatctcagaggcttgatatgaaagagaatgtaagtgatctcattcatattcttctatattggttacacgtagaaatgataatattttggatatactgggttaaataaaatgtattattaatttttttttttagatggagttttgctctgtcgcccaggctggagtgcaatggcacagtcttggcccactgcaacctctgcctcctgagttcaagccattctcctgtctcagcctcctgagtagctgggattacaggtgcatgccaccacgcccggctaatttttgtatttttaatagagacgggggtttcatcatattggtcaggctggtctcgaactcctgacctcaggtgatccacctgcctcagcctcccaaagtgctgggattacaggcgtgagccaccatgcacggcctattaaaaacatttttttgccaatttctttttacttttgaatgtggcctctagcaatgtaaagttgcacacaggccggcatttgcagctcacgtgtgtttgccatgttggcgtggtccagggtctaagccactgcaggggcagacccttgtcccttgggtgagtccctcatctgggggccctgtgcccagggctgagggagtggtcagtctcagcctgtcattccccgccctgccgggccccacatctcctttgcataatggaggtaatgcaggaaaatgcttagagcagggtctggcaaatgtgttattagtgctctgtgttattaataaagcattgtgatgtctcttgtgcagtatggaaataggtttcgtagattgcactcaggatttcagattgacacgtatttccatctggaaactcttgcacgcgtttgcactgggagatgaagtggtccctgttggctcaagctgcagtgagagggtggtgggggtagactcagtcccttgccggggttggccaaagcaggcttcctcttcctccctcaggtgtgtgttatcggaggtttcattcctggaaaatccagtgtctatgaaaccaacatacatggcgtttgcatcacagttggagtcagatgtgagcccggagggcaggtgtctggtaagacccatgaaggctgcatttcagcccccctctaagaaccagcagtgccttccatcactgcaacagcaaacacccctccataaacatctagggcagcgagcagtcacatcccgtgagactcaact

SEQ ID NO: 27574 - DNA, 2300 bp, Homo sapien
ggggcgcctgtccccagcggggcgggctctggggtgcgagcgtctgttctgtgtcaggagtccctgtttctttctccccatgctcacacggggtttttagactttgtgaagggtgtgcttcccaaagaaaaccagctgcaggtgtctgtgctggcacaaggagaacaaacccagagagcactgggttctttcctagaggggatggaatccagccaggcgtgccatgaggctcgcagcctcggggacctgtgctcaccagcacaccaccagtgcccagggctccttgtgctgcaggaagggacactggcatgaagtagggggtggggggagtcgctgtctggggggcactccatgtacctccagattcatgcactcggggaccgggcaacgcctcgggaagcagcctgcgctgatgtcaggatctatagtttaatactcgttagtttgtcccctgtgaaaaggaaagaaagattttctccctactgcactctcatactcaacacagaacacttctgccgtgagatgcgtggatgtttccccacaagcagtgctccagggcacccacccaggcgccctccaattccattgagttctgacgcgtcagatcccccagggccagggcccagtcccacaagactgccccactgtcagatgccaatcccaggttgtgatccatgacccaactggctggaagctggggttcccatgatgccctcgagtttgaacatttgccaggacagctcacagaactcagggaaataccagctgtgtctgctggtttctggtagagggtgttacgaaggatccgatggacagccagggggaaaggggtacagagtgaggcctgggggatcctgggtaccagggcttctgtccctggggagctggggtgcacgggcctcccagcatgtgggtgagttcaccaccctgaagtccattgtacaagagttttgagggagcctggtctccagcccctgtccttcctggaggacggcagggggctggggagtgctgtcgagggccccgcaagtctcctgtcactcaggtgagattgaaaggcttgttaggagtaacagtagatgctcccatcctgtaggaaatgtaaggtgttttttttggttttttttgagacggagtctcgctctgttgcccaggctggagtgcagtggcgtgatctcagctcactgcaagctccacctcctgggttcacgccattctgtctcagcctcccgagtagctgggactacaggtgcccgccagcacgcctgcctaatttttttgtattttttttttttttttagcagagacggggtttcaccgtgttagccaggatgatctcaatctcctgacctcgtgacccgcccgcctcggcctcccaaagtgctgggattacaggcgtgagccatcgcgccgagccaggaaaatgtaaggttttaagaactttgtacaagaaccaaatagaacaaaagatgctcctgtcacccttcccactcaggaaattacaaggaatttatgagctttgtgtcaggaaccagggactaagaccaataaatacctgctgcttatcacacagctccccaggtccgctcccgtgaggagcaggctctgcctttgcaagcactttcacgaacagcagatccatcttcctcctgttagcaatcaggcggtcagggtggcggccacttccctgccatgccgcagagaccctgacctcctccgacatcatgctccggccccggcttctgtcctagctgtggctcgctggtctcgagatggctgccttgccccggctgtttcatctgcattccaggcaggaaggtcgagaagggcacgcctgggcttttcttttgaagactccccctgagccccaccctgccgcaaggggcttgggctgtcaccctgtgggctgagtccagggctgccgtgttggagaggcgtgtgggaatgtgcgttttgggatggcagcccgagcctcctacaacttggcagagttgtcaggatttcaagccccgtgtgtctttgaccttttacctgagctgtgtgagaagaggcattttcttgtttctttgcgagtccttcctcactgcacttcagccagggcgccgacacatggtcgttcgacttctggcttggcctcttttgtgagtgtggggcctggtcatatcctcttggtcagtgtctctgtgatgatgagaacgggaagacggccacggtgcccaccctggcaggactctctcccctcgctggcgctggctcagctgccgtgagcggccgtaggcactgtcccgggccctcctgtg

SEQ ID NO: 27575 - DNA, 2300 bp, Homo sapien
cgcttttccatgaatcacctcttacctctagaacagcaagtgcgggaggtgtccaggtgcgggggggccacgtgccctcaggggcttccctccccagcccgcctggagacatcatcactgactcagctccggcaggcaagggtccctcggggtctaccactgggattgacgccagcaagtcggaccctttctcagaagcccagagggagggcagagccgtagccacagtttggaggcatctgctgggctagtgcatgttttaacagcacctatgacaaggtgaggcagcatgggtggccctgcaggtggcggtttgcatatgtgcacatccagccagctccgttttccagtctggggactatggtgacaggaagtaaaaagcctgcgatttggcctacggggtcccagggtcatcccggggtcgcaccttggctaccaggcttgagggttctgtgtgcgatttcaggagagacacacagcccatcgcacacctgacagttgtcaccctaaagaaaattcggctgaactgtgcacattggggagcattttcattcacattacacatttcatttcacttcacgttttattggtttgagtaatggtttagaaactatcttttacttcaaaatgtttgtgcatctgagattttctgactttatatctggacagggcgccgtaatggtagacgatggccgaggttcagggaaccctgtttctgtggttcaggacaggtccagcctttctgagccctgtccccgcagagagccccctttccaggcacccgtgtcttgggtcgccgctggccctgtgaggtgacactctgcagctcttgcactgtccaggccaagggtggctgttctgaaacctactcggtttattccatcttgaatcaatgcattttttcaagtccgtgcctcagggtgcctgtagaatgacagatgtggcatttcaatcggtaaataatgagtacacctttaaggtccaggcactctttgtttagaacattgtggaatgcctacatcatctcatgcttgcacaggagcgtggctttgtcagaactcatccccaggcagccctgtgggcacctggtgggggctggacaggggtcacgaggagaagccagcaggagggtggtgggccctccaccttgtccccgcaggactcccctctctgcccagacacactcagcctccaccaggactcaggggttccagccaagctcctcttaccaacgatgccccgtgactgccccagggacgggagggctcaatgccattcccctgcaggccctgtctctccccagcttccagttggttgtcctgcagcctcaggtctctgatgggatgaagcaaagtcgagaacttacggtttgtctggctttattcttgtgagagtgggagtgacaagctctgtacatccccagcagaaaccagaattccacctcctacataactttgtaaattgcaaaatataatgaaaagtgcatgaggccaggcacagtggctcacgcctataatcccagcactttgggaagccgaggtgggtgggtcacctgaggtcaagagttcgagatcagcctggccaacatggcaaaatcccttctctactaaaaatacaaaaatcagccaggcgtggtagcccgcacctgtaatcccagctacttgggaggctgaggcaggagaatcacttgaatccaggaggcagagtttgcagtgagctgaggtcatgccactgcattccagcctaggggacaaaacaagactccttcttaaaaaaaaaaaaaaaagtgcatgagacattgatgaccagtttaatgaataagtatgcagcaaatatccatctgtttctatagagtaaaagtagttattataacgcgtagttcgttgtaagaaaattatgtctaggtcaacttagctgtgactgttttatgtgtgcatgcatgtatgtgtgtgtgtgtacatgggcgtgtgtgtgttttggagtgtggtccccacaaatctgccacccttggagaatgctcttctgccctggtgcatggctgtgccctagcatgggaagcgcctgctgtgtcctgcaggcccgcagacttgtcacaggtccattgtgcagtcatcaggccctgggagctttccacatccctccacctcccacccaacatcaccactctccggccagtgagaccatcacagcaccccagaggagacaaattctggagctcagagagctggggtaggtgacgggagggtggggggctggaggtccttggccagcagccttcccatcctgggccaccagcaccc

SEQ ID NO: 27576 - DNA, 2300 bp, Homo sapien
ggaaaattaaatatgaattcataatcaagaatgacaacgtaaacagcagatgtggactgaagatgacccactgtgccccgacttgaaagagaaccaagtagaactgctctcagtgagaactgtagatattttaaagcaaaaacttacagacaggttttgtatcagattagatacagttaatgagaatgggtacagaaccaagtagaactgctctcagtgaaaactgtagatattttaaagcaaaaccgtatggatggattttgtatcagattagacacagttaatgagagaatgggtacaccagacatcaatgtgaagaaatcatccagtgacagtaaaggaggtgaaaaatgtgaaataggcgtgaaaagatgtaaggacagaatgagaaccttcataaaatagggctttggcccccatccccaaaggagagaacaggagaagcctcctgggaagagaggatgcctgaggacctcctgaactgatgaaggcacgatttttcagatacaggaagcacatgtagaccaagcagagcgaatgcacagaaatccacacctaggcaggccctggggcatcacagaccatcagagacaaggaggagccgggcgcggtggctcacgcctctaatcccagcattccaggaagctgaggcaggaggatcccctgaggtcaggagtttgagaccagcctggccaacatggtgaaaccccatctctactaaaaatataaaaattagctgggcctggtggcacatgtctaatcccagctactggggtggctgaggcaggggaatcatttgaacctggtcggtggaggttgcagtgagccgagactgcatcactgcactccagcctgggtgacagagtgagactctgtctcaaaaaaaaaaaaaaaaaaaaaaagataaggaagtcttcgaatccccggagaggaaagctggagaaccacgctggatggtcagcagtgaggccgacagcagatttcttacggcaggcagcagtggcgggagaaggtggaagatcctcaatgtgctggaaaatcaccaacctagcaccctgtgttgttcaagagtacaaataaaataaaaaggttttggtaaacaaaaaaatgagagcttttactgcccatagatcttcacttcaatattttttaaggatgtgtttcagtaagaacaaaaattataaaagtagggtataattttcaagaaagaatggtagccaaagaaattaggagatggatgaatctaaaccgtatgtaaaataaaaacagtgctcagccgggcgcagtgggtcacgcctgtaatcccagcactttgggaggccaaggtgggcggatcacctgaggtcaggagttcaagaccagcctggtcaacatggtgaaaccccatctctactaaaaatacaaaaattagcctggcatggtggtgggcacctgtgatcccagctcctcaggaggcagaggcaggagaatcgcttgaccctgggaggtggaggttgcagtgaggtgagactgcaccacgctcagctaattttttgttttgtatttttattagagatggggtttcaccatgttgcccagactggtctcaaactcctgacctcaggtgatccgcccacctcggcctcccaaagtgctgggattacaggcgggagcgcccagcccaggttcagattttaatggtaactttgttaagtatagggtaggaaaaaagagagatcaaacatagcttccaaagtattagaaaaagataaagaaaaaaaggtaaatctcttttgttaatgcaagaaagtagaaagaaaagcattaaaataagaaatattgaggtatacattaagatcaatataaaattcccagatacttgggatgaccacaaatacacaagaaaagcacttcagtaagaacagaaataatcggcctctccatctgctgggcttgcgtgggtatgtgaattccgtctgtgacttgttggatttgggatgttctccacttagatttatttccatgaatatgtttgtgggagcctttctgcagtcagaggtatgtggaagcctttgccagttcaggggcgcatggtgagagcagacctcacagtgggtttgtttatgtttgtttgtttttgagacagggtcttgctctgtcgcccaggctggagtgcagtggtgtgatcttggctcactgcaatctctgcctcctgggctcaagcagtcctcctacctcagcctccttgagtagctgagaccacaggtgtgcaccatcatgcccagctaatttttgtattttttgtagagacagggttttgc

SEQ ID NO: 27577 - DNA, 2300 bp, Homo sapien
agcttcttcccctccagtgccctgccttgccggcctgctgctttagctgcccagaagtctggtctcttgcctctcacaccattacagtgcaccacactacactatgttcacacatttagcagctgtgttcacacccaaactatctcatatatacattttgttaaaaaaaacttcaggactctctaaacttatgatgccaagggtgaagttaagccctggagactgagtcagtagcaagtttgcaattctgcttcttcgattacagtttaatgctcttcctccttgttcttgagcacaagtgtcttcctcattgtggctgctctgtaaatcagggctccccgaccgccagggccacagacacataccggtcaggccacacagcaggaggtgagcttcaggccagggagcaaagcttcatctgtatttacagctgctccccatcgctggcattaccgcctgagctccgcctcctgtcaggtcagcagcagcgctggattctcctaggagggtgaaccctgttgtgaactgcacattggaggggtctaggttgcgtgctccttatgagaatctcatccctaatgatgtgtccctggcttccatcatccctagatgtgaccgtccagttgcaggaaaacaagctcagggctcccactgattccacattatgggaagttgtattttattacatattacaacataaaaataataaagtgcacaataaatgaaatgtgtttgaatcgtcctgaaaccaccccaactttgtctgtggaaaaactgcattctatgaaactggtccctggtgccaaaaaggttggggactgctgctgttaatgactaagaaagaccaggtctcccccttcccatttggtgatttttgttacagattagctgtctccattgtcctgtacctgacttagaccagacagcacagagaccccaggactgtttcatcttcagtgggtccccaaagaaaaagaccacctcgactaaacagactgttgtaactatgcattaggccttatacagaaaagacgctgaaattcggttaggcttcccgagacgctggctatagaaacgaccccaaatttctacgtttgagaacactgacttccattctttataatgtttcctgggcgcctcaagcttcgcatttgactaaactctagattctgacccttttgattatttttggttgacagtttttgtcattttatggctgggagtgatggctcacacctgtaatctcaacactttgggaggccaaggctggaggatcacttgagcccaggagtttgaaaccagcctggaaaacatagtgagatcccgacaaaagaaaagaaaagaaaaaaattagctgggcgtggtggctgcccccgtggtcccagttactggcggagggggtggggcggggggaaacaaggcgggaggatcgcttgagcctggaaggtggaggctgcagtgagccgtgtcccgccactgcactccagcctgagccaactgaggaagaccctgctccaaagaaaaaaagaaaaagaaacacccgcgccccgccccccccgtttacgtgcacaagaagcccatatgcagttaagtgtgaggtttattttgtggcattccgaaatgccgagggccaggtccccacaaaaacatttgcggcgtgagggaaacgggaagagcccagcggtaggcggaaggcacgcgccggggacactcagcggcgagggcctgcgggagcccccagcgcgataaggagcccggccggggagcagcggcccgccgcgggacgcccgagctgcggggaacgcgagggcagcgaggccggcgtctctggtccgggagcgtccaggctcgctcaccgcgcgcgaggcccgcctgccgagtcctggcctcagctccggcgcagggcccagcggggcgcccactgccgagggaggaagatggacgtgtcccgggagccccgctccgcctcccacttcccacctcccggtcccgcgcggccggcccgggcgcacttccgtcggaggcgaagcgcggcgaagacccgccccgtgaagcctcgcgcgccccggaaatggtcatgcggcggcgccgaggccggaagtggctgaggccggcagcagcgggcggcagctgcggcgcaaccggctccggagctgcctggcgcggccgggcgggcggcgccgctcaggctcgggctccggctgggcccggcgcggcctcggggctgcccatggggcgcggggggccgggccggtgacgccggacgcccatggacgcctctgaggagccgctgccgccgg

SEQ ID NO: 27578 - DNA, 2300 bp, Homo sapien
ggaaagcccaaagattccttttttcttctatctttttccctttctcatgttgacttagtaactccctggaaatatttcttggagtcatttcatcttcaggggcattgctttctaaggcatatctctagtttttcaaagaaaagctgaaaacatatgaaaacctgctagctgagtattgtgaagattttcttagaacttgtgcatcatttggtagaagccaatttgagtgtggaatgaagagtagccttgagctaggtgagtagatacaggtgtgtgctgtgttcctttagggagatgatttgacttaatgttttgcaattttgtgatactttcttttcttctctttactatttgaaattatcaaacaatgtttatttgaagtgtttgtctttatagttttgatattagcagtttttttctatcttcttccatccaagacaaattgttttgaccttcatgttttatataactctccttaaataaatttaaatgaataaataaaaccacaaattattaaataatttaattaaatcaaataatagtatatattataataataatttatatataaacaaattatttatttatgagacaaggtctcactctgttgcccaggctggagtgcagtggcacaatcatagctcactgcagcctggaccttctgggctcattatcttcccacctcagcctgccaagtagctgggaccacaggcacgtgtcaccacacctggctaattatttttattttattttatttatttatttatttatttatttattttcgagacggagtttcacacttgttgcccaggctggagtgcaatggcacgatctcggctcaccacaacctctgcctcccaggttcaagcgattctcctgcctcagcctcctgcgtagctgggattacaggcatgcaccaccacgcctggctaattttttgtagaggcggtgtttctccatgttgatcaggctggtctcaaactctctacctcaggtgatccacctaccttggcctcccaaagtgctgggattacaggtgtgagccactgtgcccggctaaagtatgggtttttttttgttttttgttttgttttgtttttttgagacagagactcgctgtgtcgcccaggctggagtgcagtggcgcgatctcggctcactgcaacctccgcccctctaggtttaagcaattatctgcctcagtctccggagtagctgggataacaggcatgtgctgtgccaccacgcctggctaattttttgtatttttagtagagatggggtttcaccatcttggccaggctggtcttgaactcctgacctcatgatccaccccgcttggcctcccagagtgctgggataacaagcatgagccgccgtgcctggcccaaagtacgggtttgtatgttgctgtatctattcaattctcctggtaaagacctgagtggaatttctgggtcatagggtaactctgtggttagctttttgagcaactgccaactttttccagagggctctacattcccaccagcaacatagtggattccagctgggacccagagagtcccagcttctgtgtgtcctgccagcacttgtctcactgtgtttttggttgtggctgtcccaattggcaggcgtttccccagtggctggtgatgtgctgcggctcgtgggcgtgtggcccatttttctgccttctttggaaggatgtctgttcagatcctttccccatgtttaaatagggttatttgttttttattattgaattgtaagttctttatatatcctaggtaccaggtccttatatatgatttgcaagtattttcttccatttgttgtcttttgaagcaccaaagttaaattttgatgaaatccaattcaactctctcttttattgcttaaattttttgctttggacctagaaaatcattgcctttggtcaaaaagattttctcttgcatttccttccaagatgttcgtaatttgagcacttgcatttaggtctgtgatctactttgacttaatttctgtgtatggtgagaggtagggtccaaatttgttcttttcaaatgacccagcaggtgtccctatcccatctgtcatgacgatgctttcctccctgcagggtggccctggcccccttgccagattccagctggccgtcagtgctcgcgtgtctctctgaagaggctctgcggttctggtccctgtgcctgagctccaggtgccgccaggtgaggcccctgctgctcgccttgggctgtgctttcccccagccactctccttcccagatgcagcc

SEQ ID NO: 27579 - DNA, 2300 bp, Homo sapien
ttttattgtaaaaattgacgattgccctgcatttctaccaagtcctgtgaataaagagatgggagatttgattccgtcagaagagactgtaatccgtgtcgtcagcctgggagccttccccagtgtaatgtagctttctctcttaccttctggaagagggaatgtttcatttattactgtttgattttcttgtatctggttctactcccaggatgaaattatccaactacatatatatttagaggaagaaagtgaaggggaaatttaaaatgtttacggcgcttaattgcctggaaatgaaatgaaatcaaatttatcagtttttttccccctaattacccaaaagatcttttgcaaactatgttacatgaatgcttctgcctctttaagacaaagaagaatgtcacccaaaattgtcatttttttcttaatgttcatcataaaagtcctaaaagagtaactgtaattggatgtttattgtttttatctaaagtaaggtgtatgtgtttgagacaagctggttttgttgataaagagatgttaaataattgtgaagccagatatgcaatgtgtatctgaaaagcaaggaatttgcagccgttttacaaatatctgtggaacatgtaaatactgtcaaatggaaaataaaataagttataatttttgtgaatttcatgggatgtcctatgattggaaaaattataactcttctgattctaatgtggaaattgttgtatttaatctgaaaatgactttacctacaacagttccattgtcagcacagcctaggaaggtcagatcctgtattaattactcttagtggagatgccagatatcccatacagaattagcagagaaaatacacacaggcttctattcaaattttctttagtgcttaaaattaagttttaaaatgaaatcagacactgcaggtttgtatataaaatgaaaagctatactactttttacaaaagggcaaactgggctgatgtaaatgttttactttcaactgtgttctttaaaataaatcctacctggtttttaaattttatttttcatgaaaatgctcctttctctacatttattcatcctatatacatcaggctgtaagaccccccccagtcatcattaatacaatgtgttgggattctgtgactggaaaaggtgacaagttggtgactttgacactgcaggtattccattttcatggtttactatgaaaagtcatttttcatattatgtaatatattgttagattaaaaccattgtattaagactttaaaatgtaagcattgtaattctgaaaatacacattttaagaagaaactattttgcactggatcttttgctgcgacatggtgtgacaacagtatgtaatgtgaagattttattgttttatctccctagtccttgttcctgactcttgggcatagattatttgccttttgggaaacattcggattatttttttttttttttttttttttttctctgagacagtcatgctctgttgcctaggctggagtgcaatggcgcgatctgggctcactgcagcctccgcctcccaggttcaagccattctcctgcctcagcctcccgagtagctgggactacaggcatgcgcctcatttttatactttagtagagatgatgtttcaccatgttggccaggctagtctcgaactgctgacctcaggtcatccacccgcctcagtctcccaggcgtgagccaccgcaccggccagcattcgggactttattcataattccttacccaacagttcacaagaacgaagacatttgggtgtgcagcgctctcatgttgtggacgctgctgtgccaggctgggcgtccgtgcggagcgcgcccagcgctggagcgcgcctaagaggcgccctgcagtgtggctccggggtgtgggcggggcccggagaaggcccccgccttgggaggggttgggcctcgcgttcaaactccgcctcggggcggggcgagggcgacgcagctcctcctgcctcctgggccgctgcggacggtggtgcgcgaccccgtcccgggcgcgcgcgctgtgggcggtgcacgccgtcgcttcccggaagtgcgtgctgtgggcggtgccgcgcggacccccgggaagtgtctctgtgggcggccgccgggttgagctgcggcacacgtgcgacggccgtgatgaagttcgcttaccgggtgagcgcgggcggcgggcggtctgttggatcggcgcggctcttccggtggacggcgcctgagctggctccgggcgggctgggggcgcgtgg

SEQ ID NO: 27580 - DNA, 2300 bp, Homo sapien
ggcatcctggtccccacagctcagtaacagcagcctccagggtcaggacctgaggctgacactgaggtgggcacttcaccgactgccagtgctgtctgccaggcccagcctgtccctcgccagcggtgtggcccccaagaccctgggtagtacctggctcccttgcttatctgggaagtggagctgatatctgcctgccggcctcccgggggtggcgtgaggccagatgtgctagagagtggagatgaatacgacaggcagtgccttgtggcccacagcactgtacctgcaggcctgcagaccagaggtctttgtagaagggaggagctcaggccctgatgacaccaggtgttctgtggctgcacaatctccgtgacccagacgagagagaatccttagctatcgcctacccaaagcacaagttccagtgttcccctcccttgcctcgcccttttccgtgaaacaatttccagcgttccccctcctcgcctcacccttttctgtgtcacatgtgcatggcgatggacacctgagtagtcgcccctgggacaactggagctgcggctctgcagtggggtctgggagctcccggccaggggcagctcccgcacacttggtagagacagggtcctggcccccacaccgactgagtgagagtctgcattcggcatttcctttctgagtggcgcttggtgtttttttgtgccatcccacaaccccatcgctcccaccagctgatgctccctggctggccgctccccaggagctgagaagcctgaagagggccaggcacggaggagcaggaacgaggacagtcaaatgtgccaagcttgtctttggttgtaactggtaatgtcccatgtctgttattctagttccccactatcttgcaaggattggcagtaaagtcctagtgatggacaacgcggcagtggggaaagtgacagccgtggctagatcatcagatgtgtctgtagaatccggtgtgtccctgtgaacatccgccagcagtaaccattcacattatttcaaaaacctgcattattaggttgaaaatgggtaaatcggggaaaaagccagcacttatccagctattcctctgtgaactaacccatgcataacaaacagatttttttaatggaagaattccagctaggacccgagcagctgggatcttcacactgaccgtccatgctgtgaacgtaaaaaacaaaaacaaaaaaacaaacccaaacagcgcccgggaatggtggctcacgcctgtaatcccagcactttgggagtccgaggcgggcagatcacctgagctcgggagttcaagaccagccagaccaacatggagaaaccccgtctctactaaaaatacaaaattagcctggcgtggtggcgcatgcctgtagtcccagctacttgggaggctgaggcagaagagtcgcttgaacctgggaggcggaggttgcgttgagccgacttcgcgccattgcactccagcccgggcaacaagagggaaactccgtctcaaaaaaaaaaaaaaaaaaacccaaacagaatcggcggctcacttgcccccagactaacccagatcaagcccctgggtggaactgcagtttccaggatacaacatcccggggtcagtaaaacccggaggggtcgctccgtgggagccggagccgcgaggagacagtcatggaagcggaggggtagtcctgaccccgcgtgggtcctgacgccgagattaagacgagtggccatttaggaggatgtggaccctggacgctcgtggtgagttaaggatgagacggaggtaaggtaagaagcgccggactgagccgccccgaggcagccttgctctgcggatggcggaaagggtgcgccgcctgtggaggcgtccgatgggggcggggctggggaccccgggagtcaccagcatccctcagcctcgagcacgagccctcagccaccaccggaaggaagacagggttcccggaactctattcggaggctctgcgcaggcgcggcccccgcccaccggcgaactcactggatagggctgagacgggggcgggtcttggctccgcccagaaggctgcgcaggcgcagtcccgacgagcaacgcgtttgtagaggggtgggtgcgcacgctctgtccctgcgtgaccttccgaccccgctgtcctcaccgcaatggcggctgtgagggtcctggtggcctcgaggctcgctgcggcatctgcattcacgtccctgtcccccggcggtcggacgccttcccagcgcgcagcccttcacctctccgtgcc

SEQ ID NO: 27581 - DNA, 2300 bp, Homo sapien
tgccccctcggccacagcacggcgggccctgcggtgtcggcccctctcccaccgcccccgggcggcactggggggctgcggggtccggacgcaccgacagggcaccttcccttcgccgccgcggatgaccggccgcgctcttgggaggccttaatttgggaggctctgctcccccaggacccattccccatcctcccaaagcccccacgcggtatccgggggccgtccccctctccgcagtcccgcgggtggaggggattcaggtgcgcccggccctgggggtggagcgctcggcccggcgtcagctcatcggcgcggcgcagccccggacctcagccgcaggcccagaggcgcgcggttcccggccggtcaatcagggagggcctccgggaggaggtggcgctgcccgcagcccgcccggctcacctgcgccctcctcacctgcgccctcctcacctgcggggccatgcggtcccttaccagcagccgcccgccccggggcgaggaacctcagcccccaacatcgccacccctccagcctcgccggtcctagccggcgtccctgggcgtgtcccgggaagcgcacgtccacgctggcgctggaccgggttttctgactccagggacgggactcgtcctaaagagtccggctcagatgcggttacgcgcctcacctcacccgggtgcggaccgccagtgcctccgccctgcactccgcgggccctgcccagctcttcccgccggagggcaggtggcccccgccccgcccctgccaggcgcgcgattttaaatccccccaacccccgtctctcagcgtggcctgggagggggaagccgcccggcttcagggcttcctgcgccttcgccgccgccctccctgcccttccccgccgccgtcccccctatccccccagcccgtctcttccgccttcttattttgtgcctgggctctctgctccgcaaaaatgttgacttcccacgggcagaggtttcagaatttttttaaagcttttgtccacggcgttctctacatcttggttgaaggaatggcagcctgcggggtgccgtctggggcccccgtctccctgcgcttctcgcctcctccatgcgcaggaggcggtggggatccgagcctcagcccagaggcgggggctccgggaggagggtgccccgctgccctgtctagcagcctcacccaggcccttccggaggtgcctctgcagaaagggagtcacgtcccccctgggcctcacctggcttgcagggatcagggagggagggcggggtgggctgggtgcggtggggaaggagcagggactctgggtcccaccctcggttgcgtggtgcagcctttcccaaaccagctgccccagactccaggccagacgccactgccaaggctgacgagcccagagccgcaagcctgcctcggtttctcggcgggggatcctcagagccagtgttaagcaaagaggctgcgccagcgcccttcacacccctagaaggctaggggagcaaggctaggtgggggcgggctggggctggcccagagggtagagcccgcccactttccctccctccttccattcatgcatgcgttcattcagtcattcattcctcagcagtcgctgagctcactcgccttaagtcctggagatcatcggagcgcagccggccaggggcctggcgctctcccagccttggggcctgggtccccggactcctgctcggggagggccgcaggaccggcgcattgtgcgcggcgcggggaacggcccttgcctcccacggtgccctccctcgctgcgccggcacccgcagcacccctggccaccttcctgccgggtaccccccacccctgcgcttcccagggcacctacggcgcccaggtccgcgtccaggcggacaggccgacctgcctctgtcccgcctccggccgacgggcacacgcctgggcagagccgaactttccggagccgccgcgcagcgccccgcctcctgtcccggggcggtctcggtcgccagaggagccaggccgggggcggggcggggacggggcggggacacggctgcctccagcacaccgcgcgctgggcgctcagagcctcgggcgcggcgggagcgcagttagagccgatctcccgcgccccgaggttgctcctctccgaggtctcccgcggcccaagttctccgcgccccgaggtctccgcgccccgaggtctccgcggcccgaggtctccgcccgcaccatgcggctgggcaggtgagccggggaaggagcggaggcgccgcggtcaggg

SEQ ID NO: 27582 - DNA, 2300 bp, Homo sapien
aatatatacaaaaaattagccgggcatggtggcgggcgcctgtagtcccagctactcgggagactgaggcaggagaatggcgtgaacccggaaggcagagcttgcggtgagccgagatggcgccactgcactccagcctgtgcgacagagcgagattccatctcaaaaaaaaaaaaaaaaagaaaaagaaaaaagaaaactgcccctccttggagccaaaaccagcccccaggaattctcccctttccacttgtgctggtgggaacagccctgcagggcaggggaggttgggtgtggggctggggtcaggggacagatgggcctgctgctcccgctgtctccttctaatcactttcaatcccgtgagctcctgaaaaacaaagctctttggaataaaaggaggagaaaacaagatcattttactcaaacacagggaagtgatctcactgtcatcctcagtattctctcccttcactttttttcattaaaaaaagtaactatgttagaacagctttaaagttatacaaaccttgaggcgctagtccagaactgccgcaacccccacccagccctcaggcccccatggacactgtggttacatgaacaaacctgcagacacaccaacttagagccaaggagccacattttattcagatttcccactccctaccgcccctctctgtcccgggatcccatgtgacacttcattgtcgcagtgcctcagggtccccccgccccctgccccgctgtttttcagactctcccgctgggcggcctgactgccccagtgaggagggctcaggcactgggccgcctctgctccgacccagttcactcctggagaggctgggctgtgggtggggggagaaagccccggtgcggggcacccacccaggcgaatcctccccgagacgctggcctgggccaggggccaaggggtcatcaggctgcccctgtgtggtcacccctcatgcagtacttgcagaaggaagtcaccaggcccagcccacacttcaggggggttacctcccgcaagggtcttctcccactttcgaccagcacaattgtcctgtggctccagccctgcccggcggtcctccgccccctgctctgaagcccctaacctccctccaacaaagtcccccttcccaacccaccccgcacctcccacactgcccctctgcccaccccaccttcctgctcccttccctgcttccacgttccacccccaccctgaacctacccctcccagctccccaaccccccacctgccctgacattccccacccaacaccccttaccccatcctccagggccttccctgtttccttctctcccccacagctgccccccaaacctggggctccagactgagctcccaagcccggctcctgaacgcccctccctctatcccgccagaggaccacctcccctgaacacccccatctcctcctcaccatctacccccacccccactcccatcccaaccgaccctgagatccctgaggcccatccccaccccattctcacccctatcctgccctaaaggccacctcccctgaaacccccatcctcggcctcacacccccattcctactttcaccccgtctctacccttgccctgagccccgacccccgccactgagccctgccccggagtgcccaccctcaccctatcatcacccccatcccgccaaaggaccacctcccctgaaggcccccatctccaactcagcatccacccccacccccactccctaatcccccaacagatctccctaagccccgccctccacccacccaccctgccctgagggccacctccactaatcctcacccatctccacccagggggccaactccacctaaccccccgccctgccctacctccaccctccaccctccaccctccacccctccacccctccaccctccaccctcatccctttcttcacccttgccctgaagcccacccctatgaccttcctaaaccccacctctgagcgccctgcccctaccccacagccacccctatcccccaccccaccccaagggcccccctctactgaaacccccctcatctgccccatccccagtcctcccatctccacccctcccctgaaccccactccccactgaggtccccaaaccccacccctcactccaccctgagggccccatcctctgaaccccaatcccccagccccactgagctcttaaccctccccacctgagggttccctttccctgcccgtcccccagcttcctagctccccaccccaagtgaccccccgcagctc

SEQ ID NO: 27583 - DNA, 2300 bp, Homo sapien
ctcaaaggagaggaaagccaagttgctgggagcaacggttactggtcatcccaaagctgtgtgcgctggttccctggcaccccaggggcttttatgcatgaactgtgcagccagtgggcccaagggttgccattgaacttgatgttagtgagctctcccttcgtgagacccctgcccatggatgagcaaggagaatgggggtgtttcaggagcagacagggatcctgtgcaaagctgggcttctgtgcaactttcgcttgcagttatttaaatatttttgctgtaaatacagaactgcaggggagagggcaggaaacccagcgagcagcagcccggcctggctggggacaggatgtgtctgttggagcggggaccggcaaggcaggcatgcaggcagggggcttccctctcggggtcttcggaaggcgcagtgcagggagtgagagacgcccaggcctgggcagcgagagggccctgctccccgctcaaggctcccaggacattccacacaggagccagcctgttccaaccctgcactgcctgatactccacagccaccactgagatggaccccctccccctcagctccccatgacgtccccagcacctgaccccaggctgaccacctcggccaccacctctggccccaccttcctccccaggtttgttcccaaacacccctagagtcttttccggagcaatctcagacgtgcagaacgctcagggggaccctgggcctgaaggcggtaggagaaaccgagaccgacccctggtctagaggagaggtgtctgccgctctccatcctggactctggctgcccaaaagcaaacggcacgcctgcccacgtgggaatcttggtggcgtctctcactgcatcagttagcccccagcccagtgctgcctggattcaggcttcctggtaccttcgtccacccttcagccctaatccatgctggccaggtcatctcgttctctggctcagtgggaacactcgtgcccagagacctctcgtggttctctgcagcctgcacacagggcctgcttccctggcttgaccgcacagacaaggggactgttaccaaggcctcccactgaggccaccccccctccaggccatgcctgcggggccaccacagcctcagcatcattgcaggccccaggcctctgcacctggtcttgttttactgggggcactgtccccactcacgtccacctgggaccctcggctcctgtccactgcagctcccctcccggacaccttcccagatgcccccggaagctcctgtccaggccacagcatccctcagcctctgtcactggtcctaggaagaccctttgggagctctcactcagggccacactcaggacccccgttgtggggctggccgccttccttctaaagcacctggaggaaggaaggagggggtcaatgcgagcctcaatccccaggcgagtgtgccccttttaaagatgagggaaccgaggctcagagaaggaaaggacttgcctggcgtcacacagctagcctaagatggtgaggtcaggagctccctggcaacacccaggctgccgtaccgtctcctgcatcagactgagcctccatcgggctcctcccacagccccaggcgggcccctgagtaggggctctcagcttgtgtggaggtcccccaggaacaccaccccgatccagcctccatggaggctcttgccggccactgggaggggccggtgcaccctgggcagcccctgccagggccctgagacccgagcctccccgccgagggcacctgtctcggctttgccccattcgagcagggccctcgccgaggcaggacagggccacattcggaagtgagagttctctgagtcccgcacagagcgagtctctgtccccagcccccaaggcagctgccctggtgggtgagtcaggccaggcccggagacttcccgagagcgagggagggacagcagcgcctccatcacagggaagtgtccctgcgggaggccctggccctgattgggcgccggggcggagcggcctttgctctttgcgtggtcgcgggggtataacagcggcgcgcgtggctcgcagaccggggagacgggcgggcgcacagccggcgcggaggccccacagccccgccgggacccgaggccaagcgaggggctgccagtgtcccgggacccaccgcgtccgccccagccccgggtccccgcgcccaccccatggcgacggacgcggcgctacgccggcttctgaggctgcaccgcacggagatcgcggtggccgtggacagcg

SEQ ID NO: 27584 - DNA, 2300 bp, Homo sapien
ctcatgtctctgcacttacctgtgggctgtctgcacatggcagggctgggtcccctccttggcctgccctggctggaaggaaagggctctgcagcccagtgctgcctgcttctggcatagagtatgtgcttgggaacagtcttccccacgggtgaccccaatgggtgttccctttcccagggattcagaccatgtcagcttcagtccagagagctgtggccatgtcctccggggacgtcccgggagcccgaggggccgtggaggggatcctcatccagcaggtgtttgagtcaggtagacgctgtggcggggagatggggctgatggggagacccaggctccaagatggaaggaggaccacgcccctttgcatcctggtggtcccacagcagaccggactgttgctcaggtagccagagtttctgcctgtggttctgctgactttggaggaggagggtgagcactgaagtctccctgtcgggggaccttctgcaaggccagcggtccaggcccacatccccacccgggatgtacagcactccccagtcacctccatccatgtgcatgggccctcctgggccatggggttgcatccttagaaagttctgcctgtgctgctgagaccctccagggtatcggcattcttcaaccaggacagcctgtagcatagcgtccttgccccccataccctggccagcctgcagcatcctcgcccgccattccctggccagccgctgaccccatgcaatcaccagtgccatctgaccagggcacagcagggccgctggtggcagacccaccgtgccatcggggcattccatctcaagtccctgacacggtgtctcctcggtgctggacatgggctgggaacaccaagcacagccagggccctggtcttgcacctctggatggtcccaaggcccactgtgttacttcctaaggctgttggttaaattggcacaaactgggaggcttgaaatgacagaaatgccaacatcgaggtgtctcggggccacactccctctggaggctccagggaagaatccttccttgtgtctcccagctgctggtcattatgggggtacccctgtgctccttgttcctgggctcaggacccaccgctccagcctctgcttctgtggtctcacagctgtctcccacgtgtcctctttataaggacaccagtcattgaacttatggtccagtgtgacctcatcttaactaatcacatctacaaagaccctgatttcaagtaaggtcacactctgaggttctgggtggacgtgaacttcgggggacgctgttgaacaccctggtgtagatccaggacaatccccgggccccagactcgactggggtgggggcgggctggaggaatgcaggctgtgggaactccacctgtctctgctagaccccaccctggggcctacacgactgccaaggcaggtcctgctgggcgggtgagccaggaccagccggcatctcctcccaggcggctccaagaagtgcatccaggttggcggggagttctacactcccagcaagttcgaagactccggcagtgggaagaacaaggcccgcagcagcagtggcccgaagcctctggttcgagccaagggagcccagggcgctgcccccgtaagcacctgaccttccctggggagcctggctcttgatgccccccgccccaggaacagcgttgcctctgggggagtggctctgctgggggctgggggctgctgccgagagacgcctggtgccacagccatgtgcaccctcgctgctgaggctgcccccattgctgacgcccctcttccttgcagggtggaggtgaggctaggctgggccagcagggcagcgttcccgcccctctggccctccccagtgacccccagctccaccaggtaatgccctagaccacaggagaggcccctgtctgcccttgctcccctcgggtgggtcctgctgcctctgcctttacctgggcactcagggatgagcaccggggcctgagcccctacccacagggtacagctctttttctttaatagacagtatttttttcctgataatacgcaatggtaatagtttaaatgagtcagagaaagtgaggtcttctcaggctcttaagagcatggcgtttggtccaggctgtacccgctgctctcagctgggcccgtgggtgggccgggcgcccctgctatagccaggaggtcaaggatccactgggaatgccatgctcatctttcgtccccagcatggtttcttaatggggtagaagcagtgtggggggtgcctgc

SEQ ID NO: 27585 - DNA, 2300 bp, Homo sapien
ctctccttgcctggtgacctactaaaaatataaaaattagctgggtgtggtggtgggtgcctgtaatcccagctacatgggagcctgaggcatgagaatcacttgaactcgggaggtggaggttgcagtgagctgagattgcgccactgcactccagtctggtcggcaagagtgagactccgtctcaaaaacaaaacaaaacaaaaaaaccacataacataaatttatcatctcgaccacttttcagttcagtggcattcacatctcatgtaaccattgccaccaccatctgcagagctgttccagcttcctgaatggaaactctggccccatgaaacactcactccccattcccctcccaacccctggcaccctccactctactttctgtctctatgacttctccagggacctcatggaagtggaatcacacagtatctgtccttttgtgtctgtcttattttactcagcatggtggccccaaggttcatccatgttgtagcatgtgccgaaatctgcttccttttttaaggctgagtaatattccagcacatggatggactgcattgtgttcatctatgctttcctcagcagacacctgggtgcttccaccttttggctgttgtgagtaatgctgctatgaatatgtgtgtgcaaatatctgtgtgagtctttgagtaaaatcgctggatcacatggtaattatatttttaattttttgaagaactgccatcctgttttccacagcagctacaccatttcacatccccaccaacactgcatgagggttccagcctccccatatccttgaaacaattactattttctgcatttttctttcttttcttttcttctttttttgagacggagtttcgctcttgctgcccaggctgcagtgcaatggcgcagtctccactcactgcaacctctgcctcctggcttcaagtgattctcctgcctcagcctcctgcatagctgggattacaggcgcacaccaccatgcccggctaatttttgtatttttagtagagacggggtttcaccatgttggctgggctggtctcgaactcctgacctcagacctcaggtgatccaccccccccccccccccccaccccacgggcctcccaaagttctgggattatgggcgtgagccactgcgcccagcctgtgtttttcttttatagtagccatcctaatgggtatgaggtggtacctcattgtggctaaaccatgtacgtttaagaatttacacacacacacacacacacacacacacacacgtgatgaagctgtaagaaaagggagagaataatgacccaaaatgtcagcacaaggatgcctcaggggtagacacaggtgtcttcttagcgccttttagcccacgcatatgtgcttgcgcagtctctcggtgtgttttctaacatttcacaattaaataaggagtagttgatattcacagccaccatttccaccgtatatgtagagaaaaatgctcaaatcctagcgatcagcccgctgagctttcacaaaccgaacacaccgtgcggtcacgaggcggctctcccgaacaccggctctgcacccccagggcccggggaaccaagacttccccaagggcccagcaaaagtgagggaggaggggaggaaaggagggagagggagggaggagtgctggctgctttccgccagcgcctcgtttgggtttcgctctgctgaggcctgaaggcgccctgagggcccctggggggcagggaggggcggtggctgcggccgacagcaaggaacctccggagaagcgaagccgggccagacgtgccaccggggcctcggcgctggcgaaggggcgcgtgcggccgcactggggccagccccgccctggtccccggccacatcctcgagaccaccggggtggaggggggggtctcactgctcagggcccgcgtgacattgcacaggtttagaaacgcacagcgggaaggtggccccggcgggccgagggcgcaggatccctgctccgtccagggtccgtcctgcgaggaggcgccgggggcgggcccggggcggggcgggcggaaggcgcgcgcggggcggggcggggacggcgacgcggcgcaggcggcgggagtgcgagctgggcccgtgtttcggccgccgccatggccgcggtggacctggagaagctgcgggcgtcgggcgcgggcaaggccatcggcgtcctgaccagcggcggcgacgcgcaaggtgggcgggggtcccggccgcgtcgcggcgcagggggtggagggcgcctccgccct

SEQ ID NO: 27586 - DNA, 2300 bp, Homo sapien
caacctatgcgtgtgtgtactgtgctttccagtctccaaagccttccactctattaccttggggcttcccaagcccaggaccggacggacatcatcctcctctttgtctctccaaggagagaggcccagggaggtagggccacctcaggtttccagagaccccggggcttctgcctctcactctgcagggtctgccagccccttgctgcccagtcctggggtccctctggtgatccccaggggctgtctgccgcctgccatctctcctgaagtttctggtctcctctgtgcagggcggcactatcattggcagcgctcgctgcaaggcctttaccaccagggaggggcgccgggcagcggcctacaacctggtccagcacggcatcaccaacctgtgcgtcatcggcggggatggcagcctcacaggtgccaacatcttccgcagcgagtggggcagcctgctggaggagctggtggcggaaggtgggtctgtgcccggcgcactgtaggccctggggttttgttttgccgctgctgccaggcgtgggaatgggcaggacagagggacgagggatccctgggtgccccgaggcagaggaggggctgtctggccgttggccggggaggagtagtgtctgccagcacgagctcagatgtctcccagagatggaggtcagtgctcaagcctgagggagggcacccaggcagtgcatggggctggtggaggccggtgttgctcaccctacgctgcgtagacaagtcttctctgtgattgatccgagtgagattctggacatgcatggtcacagtctgcagaaatagagttgaagttggggtgacataagacacagagtcccgagattgctgcttggaaagtggcctctcggagccatgtctgttccatgtccctcatgtgggggaccctgatgtgaggccttggccgctctgcaaggcaccccagaggtcccccgtctgcacttggccccagcggatccagccatgctgccacagggttccaggcaggaggaggctgagcctggaactccggggcccctgccgggctgcacgcctgggatgcgggggaaggggtggcaggagaggggtctctggccctgtggtggggccagtggagcctcagccaggtcctcctgctgctcctggcccaggtaagatctcagagactacagcccggacctactcgcacctgaacatcgcgggcctagtgggctccatcgataacgacttctgcggcaccgacatgaccatcggcacggactcggccctccaccgcatcatggaggtcatcgatgccatcaccaccactgcccagaggtgagtgaggctggcgccggcggccagcccagggcccctcctccccgcacggtggtgaggtggtctcagggtgacggccatctgcaagggcagtggactctggtagccccagcatccaggccagccgccctcagcccccagctgggggaacgcacagcgggctccactcccactctgccaggccgcggggggcctttgtgcagccccttctgaggggcagctgcttgccctggggtgtgacgcccccaaaggaagtcctgggctggccaggcctgggcttggcaaatgaccctcagcctgggaggagatcagtcgaaaccagcccaaaggctggaaggatcccaaggtatcttttagctcagagcctgggcatgagaaggggctgtcccctgcctgcctctccatccactgggtcccttgagcaccccgcagggaatcgggctggcagggccgtgtggctggcactgatgcatcctcctgttccatctccacagccaccagaggaccttcgtgctggaagtgatgggccggcactgcgggtgaggaggggcttcctggcccgctgggtggcccgggtgctgctggggaccgcagtgacaggtgtggcatatttattctagggctcagttaatgccatgggtgtgagagagccgggtgggggccgggagagacagagaagctgtggcccagagtcggacctctgggtacagggaagctcccctcaacggctgggtgggggtcctgagcaggcaggcgctcgctcctccaggtacctggcgctggtatctgcactggcctcaggggccgactggctgttcatccccgaggctccacccgaggacggctgggagaacttcatgtgtgagaggctgggtgaggtgggtgccgtccagcctgctgggggccgcaggtgtcctggtgcactgggtagcgcccctggggttttgggaccagccttgaccaactca

SEQ ID NO: 27587 - DNA, 2300 bp, Homo sapien
gccccagcaaggtccagacggcagggctgtgggggtggcgaggccaggagctgggccagtggggagcagggccttcccctgagggcggtcggggcccgggggtgggttctaggctggaaagatgtgtcggaacgtggctgtagccacagggtggacaggaggtcccggaagcaggagagggtggggaggctgctgggaggccgagaccgcctctgggagggatgggggggtgcctggtggggaggggtgtgtctggagtgggggtgcctggaatgccgccctctggttcccttggggtggagttgggggctctggcctagaacaggctgacactgccctgtggaccctgagacccctcaactgggacaggtcggccccttggtggggtggggctcaatggtggaccagaggcacgggccattcaggctgtccttcgcccacacccgaccatgcagggcaaggccaggggcccccgtggctctagctctgtcctctgtgcgctgaggctgaggcaggaccactggaaccagccctgggggcagagggtgggtttgggactgacacggtatccctgtccccgtgtgaaggtggcagcgtcactcccatctgtgtggacactggttccacctccgcgtggctgtacagtgctgccgagggcagtgggagaggccgtgggtaatgacctggcttctagaaccttccccagtggagcctaggggccgggcggagatggagcccaacaggcgaggctggcccaaggtgcgggtcctatgaggggcttgctctcctagggcagggacttcccgggggttccggctccagtggtgaccttggccttagcttatgtctgtgactcacattgggccctcctggaagtggcctggatgcaaggtcggcccacctggttccttcctgctctgtgtgagcagctcaggccctcactgagagtctgtttccccctgtaacatgcgggttcccgccttgcccaccacccagggtgcactggggcagggagggtggcacagctctcctgctggacctgcagcccatcttccgggtgtctgacctcacctgcactggcgccacctcctccaggtagccctccactcccaccacacccgggccctgtctgagctgctccaaccctgtccctgtaggaggcattgtggcccgtggtgggcaaacatggggcttgtggctcagagcgagtcccacaaatgttggctgggtcattgaagtggacggccgaaaagctctttcagttcccagagagctgggccgcggctggtgtgtggtgctgaggcagcagcctgaggctggcagaggggatggtgtgtcctatgtgcaccagtgtggacccacagtggcttcagggtgcagggtgtccggggagccctggctggtgccagcgatgcggggcccctggttataaggatgagcagatggaagctcacaggggccccaggtacctggcccaggctagcccgggcaggcccctctgccctgtgccccgtggagctgcagccctgtgcgtcttcccgcctggaaggcttcaccagacacaagggcccagccccagctgtgtgtgtgctgggcccagccccgagggcccccttcctcccctgctgcccttcccaggctttcgggcagagccctcttgttcaccgcctccaggagggcggggcgtcctagtgggcccagcctcatctctgccctcgcgctccaggcctgctttcctcctgctgggtggggattgtgccctggcccatgtgggttgggaatggtggccccagggagggctcctggcacccgggggctgtgtccggggcaggtttccctgcctggcagctgagccctgtcgtgtctttgacccagactcggagccgtgggtcccgactgaacatcatcatcatcgctgagggtgccattgaccgcaacgggaagcccatctcgtccagctacgtgaaggacgtgcgtgtgggcctgggggtggccactgggcacctgctcctctaggccgtgtgggctggggctcagggctggtccttcccactgtcctgcagctggtggttcagaggctgggcttcgacacccgtgtaactgtgctgggccacgtgcagcggggagggacgccctctgccttcgaccggatcctggtaagtggccatcaccctgccctgcgtacgtgcgtgggtaagcgtggtgtgtgggtgtgggtgtgggcagtgtgcacgcgagcatggcacgtgcactgtgtccatgtggctgtgggtgagtgtccgtgtctgtgtgtgggggtg

SEQ ID NO: 27588 - DNA, 2300 bp, Homo sapien
gggggtgtctccgaggctgctccctaaacagcgtcctggagagactgcccagaataaggtgccgcctgtgcctcacttgcaagatgaaaaaacctgtgtggaacacggagggctgtctgtggccccgggggtccagctgctgggcttctacagggctggccactggtggtcatgggacggccacggcaaccgcaggcctggctttcttgtccactgtggccggttcccggggtggggctggggcctgcctttgcagtgtgtccctggggggcagctcctggatgtgtcctctgcccagccctttggccggtgcggacacacaccagggaagtcacgacatgagggcctccacgggaggatccatcgcagcggatggggccctggggacctggctcccgcccttgccttgcgcgcctagcgatggcagcgagcgacggtgggtgggtcgcattgcatggcaccctgcagccagcagtgcaggctgggccttccagcagggcagcgaggactctgtgaaatggtgtctggtgtgccgtcgtgaatgctggtcagacacgtttccatctctgatgccacctgttctggaagcttccgtcagcgtggggggctctggaagctggggtttgcacatctacagaggatgggcatgtggcttggggtagagggaccaagtgggtgtgccagcctgaacccttccccacagagcagcaagatgggcatggaggcggtgatggcgctgctggaagccacgcctgacacgccggcctgcgtggtcaccctctcggggaaccagtcagtgcggctgcccctcatggagtgcgtgcagatggtaagccctgggccccccccatcagaaccgcctggcccctctccccagtccccactcacaggccccactgctctctgggggccccagcactgtgagcaccggagggcagggcctcgtggctggcccagggcatcccaggtctccagggaggggagggatgtgagcacatccctgggtgggacgtgggacctgggacgttccccaggaggtgtgtcggagctgcagggagcctggtgagcatgggaagtcacaggggtccacggccactgagcttctgtaggcagtggtgggagttggggttacgatgggacggaggaggaggggccagtgatcagagcagagccctgggaggagctcaggcaggtgatggggaacactggggtggctggagcagggaccccaggagaggaggtacggggaaggcagaggcgagggggccgggtgtgggggctggtccagccctggctcggtgggtttggaggcctgcaactggggcagagtgccctgcctggagctggagctgctgagaggtgaggagggcagctgggggcagggtagggcctcctggtctcagccagccccagaagagctggccttggtggtgaccgctgttcctagggagaggctgccaggcctgggccagggtcaggagatgccggccagatctgccctcgtcaggcccaccagacagggcagtagccatgggtgtgcgggccaggctctccatagtctgtgttctgtttctcttccttaagaccaaggaagtgcagaaagccatggatgacaagaggtttgacgaggccacccagctccgtggtgggtaagccccctcagcagacccctgcactcttacatggctgggtcccggtgccaggcagcatgtgctgcagtggcgctatgcacgcctggcctgggtcatccttctaggcaccgcgtctgaagatcgagggaggaaggggcctgcgggtggtacaggaggcgggctgggaggtgtggtaccacaggagaccctgggcggtggcacgggcagggcccagtgcacagggatctgggcatggcgaggggatgagaagctgtggatacaagcccaggacatggggtggccccgcgggggctgggaaggctggcagatgttgggtgtgggtaccacccccctgcaggcgtcctggcggccgggtcaggctggattggacgtctgggttcccatgcgtgcctccacccgctaccaaggtggccaaccctcccttgagctggatgccggccacgtgctttgctgcacgggctggcgtggcctcgtgttgtgttgggggtctcgcaccttctgtggaaggtgccctgcctggcatgcgcggtgtctgctgcctcatggctgagcttccatcgggccgtgtgcctgtgaccagcctcctgggctctgtcacggctgcgctgtggctgtacgccgtggcgctgcagggctgtgcatggtgtg

SEQ ID NO: 27589 - DNA, 2300 bp, Homo sapien
agatgggcatggaggcggtgatggcgctgctggaagccacgcctgacacgccggcctgcgtggtcaccctctcggggaaccagtcagtgcggctgcccctcatggagtgcgtgcagatggtaagccctgggccccccccatcagaaccgcctggcccctctccccagtccccactcacaggccccactgctctctgggggccccagcactgtgagcaccggagggcagggcctcgtggctggcccagggcatcccaggtctccagggaggggagggatgtgagcacatccctgggtgggacgtgggacctgggacgttccccaggaggtgtgtcggagctgcagggagcctggtgagcatgggaagtcacaggggtccacggccactgagcttctgtaggcagtggtgggagttggggttacgatgggacggaggaggaggggccagtgatcagagcagagccctgggaggagctcaggcaggtgatggggaacactggggtggctggagcagggaccccaggagaggaggtacggggaaggcagaggcgagggggccgggtgtgggggctggtccagccctggctcggtgggtttggaggcctgcaactggggcagagtgccctgcctggagctggagctgctgagaggtgaggagggcagctgggggcagggtagggcctcctggtctcagccagccccagaagagctggccttggtggtgaccgctgttcctagggagaggctgccaggcctgggccagggtcaggagatgccggccagatctgccctcgtcaggcccaccagacagggcagtagccatgggtgtgcgggccaggctctccatagtctgtgttctgtttctcttccttaagaccaaggaagtgcagaaagccatggatgacaagaggtttgacgaggccacccagctccgtggtgggtaagccccctcagcagacccctgcactcttacatggctgggtcccggtgccaggcagcatgtgctgcagtggcgctatgcacgcctggcctgggtcatccttctaggcaccgcgtctgaagatcgagggaggaaggggcctgcgggtggtacaggaggcgggctgggaggtgtggtaccacaggagaccctgggcggtggcacgggcagggcccagtgcacagggatctgggcatggcgaggggatgagaagctgtggatacaagcccaggacatggggtggccccgcgggggctgggaaggctggcagatgttgggtgtgggtaccacccccctgcaggcgtcctggcggccgggtcaggctggattggacgtctgggttcccatgcgtgcctccacccgctaccaaggtggccaaccctcccttgagctggatgccggccacgtgctttgctgcacgggctggcgtggcctcgtgttgtgttgggggtctcgcaccttctgtggaaggtgccctgcctggcatgcgcggtgtctgctgcctcatggctgagcttccatcgggccgtgtgcctgtgaccagcctcctgggctctgtcacggctgcgctgtggctgtacgccgtggcgctgcagggctgtgcatggtgtgacccgaatcccttccaggagcttcgagaacaactggaacatttacaagctcctcgcccaccagaagccccccaaggagaaggtgaggcagggagcggcgcccacagagggaggaacgggctcagttattctgcagcctcttcacgctggccccgtggctgggcctgcctgcccccaccttccctcctgctggggtccgagctgtgagctgggagggtgggcctgacctctgcctgggctcaggcaccactgtggctggcaggtcccgggtgctgggaccctggctgcagggctggctgttgcttctcagtggtggatggaaatgaagtcaggccacaggcttaactcaggagaggagaagccattgtgtagaaaatgtcccccggggccaggctcacacctgtaatcccagcactttggaaggctgaggtggccagttcacctgaggtcaggagttcgagaccagcctggccaacatggtgaaactccgtctctactaaaaatacaaaaattagctgggcgtggtggtggcacatgcctgtaatcacagctactcaggaggctgaggcaggagaatagcttgaacttgggaggtggagggtgcagtgagccgagatcgtgccattgcactccagcccgggcggcaagagtgaaactctgaaaataaaatgttcccaaacagctgaaaacctcaggaaatgggatctctcc

SEQ ID NO: 27590 - DNA, 2300 bp, Homo sapien
tgggcttccccaagtccggcgacagtggctgccccagtgctgcagctggctctggtgacggtggcacggcatggccccgagcttgggagaacagcggcctgcacacacggtcacgcatcaccgctcggcggaggatgggaatatctcatggagatctggatctcaaccccacatgggacaagggcccagggacctggctttcctacacaccagctggaaggctgactccccatctcacgtgaatgcttccttggttttggggggcactaggaaggtccccagggccacgggtcactgcccagattgtggcatcctcataagacttgcgactcttcccagaggaaagaaaacccctctcagatgctccaaggactcccctagtctagctgcttcctgtgccaggcccggaccccagggcgaacaggcctgttcatccacaacctcacagctgagggccctcctgcagttcttcacaggagagagaaaggaaggcgcacctgcccagcccggccaagaaaacaaaactctctcccatgggtgcgggaggctgctgcctgcctgctgagcagctcagggcagatgtcgctatgggtgccagcattctcgaagtctcccttgcccaacagaaatctatccaaggaccaagggctggaatcggcaaagccatccgtgaagacctcctcattctgtggagaaacggcccttgctttcaggaagactgtcacaaccatgccttgggaaacgtcacctccagatcaaccttgggaaaatcttttattagggaggacagcctgcaaaatcctccctttaagagcccaggccagcctagaacctccagaccacagaaggggagtcctggggacaggactggtgtagacaggcatctccaccgccccggttagccagtacctaacacccactcctgccctcggccgatgtggcaaaccggggaggcttttgtgtggggccggggctgcggccatggcagccaccctccagctcccgggggctggggaagacgctggggtccccgtggaggctggagcggcgttcaggtcctgcggtcactcggcgtgctcctgcacctcttccccacgcagggcctgcagccggctgcccacagtctgctgcacggcctccagcccctctgcatccagctcccgcagcagcagcaggatggcagtcaggacgttctgagggcagaggggtgcggactaagcccacccggcacggcgaggctgcttccctccacaagggctggggcctggccagcggtgccccaccacggagcgactggtcccgggggtgtgggccgtccaagtgactgaccggcacactcggagaatctgagcagaggagccccgcctgtggacgcgtgtgtggcacctcttccacgtgactcctgttgccctcagcccagcagggcccgggcccacattccacagaccaggacagcaggagaggctgaggggccaggacggctccgtgcggggcacgtgttacacgtgtgtgcgcattcacagacccgcacacgcagctccccctggggcacagctcttcaaggccctgtgaggctccatgctccctccccacggggccctgtgaggctccatgctccctccccacggtttctgtgcagtgggtgcagtgggcagaggcagccgcggcccctagcggcccgccactcaccctgcccctgtggctgctcgaggcatccctggctgagagggaaggaaactggccccgggaaggcggcttcaggccacgttcatcctgggcgccgctgctgagagggagacaaaggcgtgtgagggtcagggggctcgtggcaccgggggggcctctgcaaaccctgtctgcgggtcgcatccaagcaaaggaggggctcatacaaatcccacctggcacacgggggcaagagaagggaggcaactcctgggaggtcaggggctacagatggcagctcctggagagcccggcacttacttcacctgtggggcgccctcccggcaccctggggctccccagctgtaacaccttccacccagggcttcaggggcagggtggggggcacccgaacacacaaatgccgggggagagctcctgaccatggggtcaggccctgtgccggatggcagatgcctaacagagatcacatcccgatgcccccaccacaggcaccagcagcgggtgtgatctgccaagcaggagagaagtgcccagcttctgtcaaatgcgttcgtgacccgctgccaactgccctgggaggcgccggcgtctcactgcagagtcagccctgt

SEQ ID NO: 27591 - DNA, 2300 bp, Homo sapien
tagcttatcttgtgacctccagaataatggctgacgaatgtttacatctgcatcttagtggaattcatgctcctctatccttctaggctggtagtgtaaccgcccaatgggttcgccttgcccactgcctagacagaaccgatttatcaaggcaacggaattgcaatggagaaagagtaatacacacagagctggctgtgcaggagagcagagttttattatcactcaaatcagtctccccaagcattcggggatccgtgtttttaaggataatttggcgggtatgggctcagaaagtggtgagtgctgattggtcaggtcgaagattaaatcatagggggtcaaaatgagttctggctgacttctgtccctgggtgggatcacacacatggttgagccagattatccgtttgggtggtgtcatctgctgcatctgaatgcagggtctacaaaatatttcaagcactgaccttaagttttgcaacagtgatgttattcccagaagcaatttggggaggttcagactcttgccgccagaggttgcatggcccctaaactgtaatttttaatctcgtagcttaatttgttagtcctacaaaggcagactggtccccaggcaagaagggtttttttgggaaagggctattatcaattttgtttcagtttaatctataaactaaattccttcccaaggctagtctggtctacacccaggaatgaacaaaagcagcttagaggatagcaggaagatggggtgggtgaggagatcttcccctgtcataatttcttcagttatgatttttgcaaaggcggtttcagtggtctcattagctttacaaaggctgtttagttttgaggaagggctgctatcacttaaactataaatgtctcccaaagttacctttgcttatccaggaataattaagggcagttttaaggccaaaggcaagatgggggttggccagatctccttcaaggccaaccttctctcaccgatacaattttttgcaaaggcggtttcagaacgtcagaacgcctgtcttaatgtaactgtggcccatgtaacgatgtttagagggtcttatctgatttctaaaaggttgaaatgcttgtaagggctctgctggacctgcccgtgcgtctttcctataaatgcgtcttttctgtaaatgctgggagggagggagacaaggaatcaacacagccccagggctgccctgggtttattccaagagtttgaatcgcgtaacttggagctgtgtagcgcccatgccatccacgctaggcctgcgctcagagtcaggcctaggcactcggccatgatgcgcgtcggaccgagcccaccccgctcggttcctgggagcagcagttcagccctcactgggccgactcggggaccgccacctgcacccaccctctgctcgctgcgcgcttccggggtcgcgttagaatcgcgtcagagaagggcgccccaggccgcgcatgagcaggagcagagccaacgtgtcagcggcgcccaagcggccccagcgggctcgcgtcgccccgctctcctcaccgagccgccaatcggctcaggatccgcccctgacgacgcgggccccgcccctggagacacgcgccgcgcagtcgtcacccgcccgggatcaggaggccgggggcgcccgccggtcgggcctgggcggccgccatgaagctgacgcggaagatggttctgacccgggccaaggcctcggagctgcacagcgtgcgcaagctcaactgctggtgaggcggggcctggccgcggccgccccggggtggggggaggagccggggcggggcgagggcggagccggagggaggagccggggcggggagagggcggagccggagggaggagccggggcgggacgagggcggagccggagggaggagccggggcggggagagggcggagccggggcggggagagggcggagccggggcggggagagggcggagccggagggaggagccggggcgggacgagggcggagccggagggaggagccggggcgggacgagggcggagccggagggaggagccggggcgggacgagggcggagccggagggaggagccggggcggggcggggcgggggcggagtggaaggggggaggggcaggggcgagggcggcgaaggagccgcgggtgagggaggggaggaggccgggggtcggggtcgcctgggcccccccccatttcccggcccgcctttgccccgggtgccctgtgggctgggtctgttgtctggggttgccagcagtcactgggacca

SEQ ID NO: 27592 - DNA, 2300 bp, Homo sapien
gacagggtttcactatgttggccaggctggtctcgaactcctgacctcaggccatccacctgcctcagcctcccaaagtactgggattataggcgtgagccaccgcgcccggcttaatgtacatcttatacatatattttttcttctttttccatcttacacatattgattgatgtctcatgtctccctaaaaatgtatgaaagcaagctgtgccccagccacccagggcacatgtcatcaggacctcctgaggctgtgtcatgggcttgtccttaaccttgacaaaataaactttctaaacagattgagtcctgtctcagatattttggattcacagctgctaagctgctcggttacaattgaaggctcatgggttaggggttgttcaaaggtagtttggtgaacagggggctagggcatggggagtgctgattggttaggtgcgagatgaaatctagctgtccttttggtccttttgtgctgcatggcttctgggtggggccacaggagctgttggcaagacatttagctggatccatccgtgtgagacatgcaagaaacctgcaaaggtacaatagtgatgttacctgcaggagtaattggggaagtagcttatcttgtgacctccagaataatggctgacgaatgtttacatctgcatcttagtggaattcatgctcctctatccttctaggctggtagtgtaaccgcccaatgggttcgccttgcccactgcctagacagaaccgatttatcaaggcaacggaattgcaatggagaaagagtaatacacacagagctggctgtgcaggagagcagagttttattatcactcaaatcagtctccccaagcattcggggatccgtgtttttaaggataatttggcgggtatgggctcagaaagtggtgagtgctgattggtcaggtcgaagattaaatcatagggggtcaaaatgagttctggctgacttctgtccctgggtgggatcacacacatggttgagccagattatccgtttgggtggtgtcatctgctgcatctgaatgcagggtctacaaaatatttcaagcactgaccttaagttttgcaacagtgatgttattcccagaagcaatttggggaggttcagactcttgccgccagaggttgcatggcccctaaactgtaatttttaatctcgtagcttaatttgttagtcctacaaaggcagactggtccccaggcaagaagggtttttttgggaaagggctattatcaattttgtttcagtttaatctataaactaaattccttcccaaggctagtctggtctacacccaggaatgaacaaaagcagcttagaggatagcaggaagatggggtgggtgaggagatcttcccctgtcataatttcttcagttatgatttttgcaaaggcggtttcagtggtctcattagctttacaaaggctgtttagttttgaggaagggctgctatcacttaaactataaatgtctcccaaagttacctttgcttatccaggaataattaagggcagttttaaggccaaaggcaagatgggggttggccagatctccttcaaggccaaccttctctcaccgatacaattttttgcaaaggcggtttcagaacgtcagaacgcctgtcttaatgtaactgtggcccatgtaacgatgtttagagggtcttatctgatttctaaaaggttgaaatgcttgtaagggctctgctggacctgcccgtgcgtctttcctataaatgcgtcttttctgtaaatgctgggagggagggagacaaggaatcaacacagccccagggctgccctgggtttattccaagagtttgaatcgcgtaacttggagctgtgtagcgcccatgccatccacgctaggcctgcgctcagagtcaggcctaggcactcggccatgatgcgcgtcggaccgagcccaccccgctcggttcctgggagcagcagttcagccctcactgggccgactcggggaccgccacctgcacccaccctctgctcgctgcgcgcttccggggtcgcgttagaatcgcgtcagagaagggcgccccaggccgcgcatgagcaggagcagagccaacgtgtcagcggcgcccaagcggccccagcgggctcgcgtcgccccgctctcctcaccgagccgccaatcggctcaggatccgcccctgacgacgcgggccccgcccctggagacacgcgccgcgcagtcgtcacccgcccgggatcaggaggccgggggcgcccgccggtcgggcctgggcggccgcca

SEQ ID NO: 27593 - DNA, 2300 bp, Homo sapien
agggcagaggcgaggagctgggacagagaccacgtggccggcaaagcctgccacagcgaccatgcggccctgtgcagagagtttgctgctcctgctctagctgggacctccctccttcctggagtgtcctctgaggagcccgccgcctgtcacctgctcccgcgcctcactcaggaccagagtgtgccagtgcctgcggccctgtcactgcctttttctccagttgtggtttcctcctgctgccagagcagggccctttttacctgggcctcgtgcccacaccgtgagaaacactttgtgccaagtgctttctcctctgaactcgagaggactctccatggagattggtacctgccaatcgggttttatggtcgcgtgtcctctcttttatgggaagaatatcgtgtaattgctactgcagcagcgtccgggcagacagacgtgcagtgtgcggttcttctctagaaaggcaggagccgctcccagggcgatgtgggcccggctgtttcatcagagatggtcagcttggtacctacttcaccttaaatgatgttcccacagaggccccgggatacttggaaacaagcgcccagcccctctcgcagatggctctgcagttacgactgtcttataaaatattaactgccttgcggtatgtttttagttaacgagatggctctctagccagaaagcacccagggcaggggcactggatggggctctgctgacatggagcgggtgaaagggagggcgtcttcacctcctttgtctgttaagggggctctaagacacctctctgggggtgttgctgattgtgataggacccaactcctgcagtgggtgctcgtcgagcacatctagttgcagggtggaccgggcgaggactgtaccgtccagcagggcgcagctgcgggtgtgtggggacactgtgtctagttgcagggtggaccgggcggaggactgtaccgtccagcagggcgcggctgcgggtgtgtggggacaccgtgctggccactctggagggcagcttccggccatgcttgtgcagagcacagtgtcctgaagaggtgacagtgtcctgagtgctgtcctacaccaggggctatgaccgccttcccaccactttgcaggcaccaggatggtgggttagtgagatggtggacatccttgggcgcgccagcaccgctggctggctcatctgcggagggccttccagaggcgtgtgctctgggcagtagtctgggcagcaggcctgcacacccagggaggaaatgagggtggcgggtcaggcagtagtctgggggcaccctccctcctcccagatcagaggccacaggacctcttcacttccctggacatggaggccagcagggcccaggaatggcagccgggtatcgcccgctggtggcaaggaaggggcggacagtgtggctttgtggggtgaaagggcgtctgggtcacttgggaaaggcacattcgccttctcaggcatcagagggcagtccccgtccctccccaagccagagagtgggcagcacacagggtggagttagacatccatggggccccgtggccagcacctgccgcgatggggactgctgggcttgatctttctggctgttcctgtcccctccactgtgacacatccagggagcaggccctgagcctgccccagccttggggtcctgcctctctcactgggaatggtccctggcttggggccacatctggggtgctgggggagggggctgcagaggtcttcgagaagggggtcctgggtctcgttgtggggggggtctcactcaggcccaggtccccctgcgactcctgccctgcctttcccgctcccgttggccattcagggcttaaagataatcgcggcactcgccggtttaaaaggagacacgtgcccccaaccctccgaaggcacacatccgcgcgagggtccggttccaggtctctgggggagggcgggctcgcaggcggggtgtctgggcccagccttccctggcgtgtccttggctctagctgcgggcgcgggacgcggcgcgggagacgctctccgggctgagtgacgcagagcgctgcgggcggctccactgcaccgggcacgcggcgcacgctcgggcgagatgtggatggccccgcggggccagggcggcggtgctgcgcggggacgcgggtgacgccggggcgcgggcggctccgagcaggtaggtgcccgccggggccggggcgagggcgcgagcccgggtgcggggactgaggcggccgtcccgggagcttgtgaaggttgaggc

SEQ ID NO: 27594 - DNA, 2300 bp, Homo sapien
caacactcacacctgtgccagttgcttgtggagaattttagctgtgaaccagggtggcccaagctgttctcaggtgacttgtgagaaagggattgagcctgtaattttgggtagaagaaccccagaaagggctggatgggcccttggaaggtcgttgccaggcctgggttttcagggttctgcacccctgggctgaggctgaggcacccgtcctgttgggcactgggtcgagccattggcccccccacagcgggcatcagatgctcacaggggctcctggctgcctcctgcaaagtcgggtggtgctggagcaggtctgacctgcttcccagggcctgcttgcctctgggattagaggaacctgcacaagaccccaggggctgtgctgaggtggacagctgcctgaaagatgagcgtgtgaacagaacatgctggtcttaaggcagagagtcccacaccgtggaccctcccgtctgatgctggggtcttcgtttccagcgtggagccatcctcatcccgtgcagggtggaccgcctgcctggggagccacctgcagtctgggtccccttgcggtgccactgcgatctctctagagcctcctcttcctcctgccactggggacatctctgcccctctgcttccctcggaagctggttgtgaagccgggccagtggctgcggggacagctcatggccctggaaagaccccactggcatgcggcacaacatctgctctgagaactgcaggaaaaggccgggcagggcacccctgccatcctgccagtgaagtttacgggtctcggaatgagtgtggccaaggggcaaaggggaggagggagagggggaggtggggttgcctgagagtgcccgccccaggacagcagcccgtagctcagccccaagagcccggcaccgagcttcgagctgcgtggccccgaagaggggctcagtcacctaatgtgatgaggggacggcagagcaaaggcttgtctgacagtgaccgtcgtgtgtagtggagaggacgtggccagagatctggtttcagggcagggatgaggggggattccagtcagatcttttgcatcccagcaaccctccccttgacacctttggggcagtggcaggggatgaccatggatgacctcatgagaacactgtgggtgtcagggactcagggaggccccgcagggcttgaacatgcttatgtttctcatttgtaaagggagggcagtcatccggtggcttcttgtggcctcggtgatgaaggccacatcagagccagggggaaaggatatgagagaaaaagattcatttgaattattgtctttttcctggagtggagagatgtggtactccccaaaacttcctttctaggctgggcacagtggctcacgcctgtaaaaccagcactttgggaagcggaggctggtggatcgcctgaggtcaggagtttgagaccaacctgaccaacatggtgaaaccctgttgctactacatacaaaaaaaattagcagggtgtggtgattggcgcccataatcccagctactggggaggctaaggcaggagaatcacttgaaccagggagaccgaggttgcagtgagccgagactgcgtcactgaactccagcctgagcgacaaagtgggactccgtctcaaaaaacaagaagaaaaagaaacttcctttgtggacagtgagggctatttaaaaaaattttggaatatgaaagtagtcactggtgtctggaagcaggagctgtgcagaattgtacagttgcgaaaccatgtcgctggcagctggtgctggcggtggagacttccctgtgcggtgctcagtgcagctgcacccgtgggggagggagctctttctctggccctgcagtcacctgaggttgttaccattatgaacggccgctgggacccccgcatgtgcatgtactcccccagagtgtccgggggccccagccaagggacacagctcaggcagctgggaacatgtgcaggctgatgaagagaaccggatgagggcttcacatgaggaagcatgtggccaggtcctctcagaacatcagcctcatcttcctgtctctgatctatttcagcaaccaccccatgtgtctctagaaccccagtgtagcgagctggagagaggactgtcctgagggcagcaggcctggttgcagctggcgtgggggtctcagaatggagccctcagccctgaggaaagctggctcggagcaggaggagggctttgaggggctgcccagaagggtcactgacctggggatggtctccaatctcc

SEQ ID NO: 27595 - DNA, 2300 bp, Homo sapien
tgcagagcggtgtggcgttcccagggccccaaggtgtggtgtgcgtccagctcagctgcttcctctttcagggttgacgccatggtggacctgctggacctggacccactgaagaggtcgggctccatggagcagaggttggcctccctggaggagcaggtgggtccgaggtcggggcctccgtcaggaggtgccactgctgggcctggtgggcggctctgccatgtggtggcaccaagaaggagggctctgaggagtgatggtgaggaggaggccggaacgttggggcagccattcccagctggaagaggcaccctgtgtgtcctccagaaaaccccgcccaagggtttctgtgactgagttccttctgtgtgcactgaggcctccacggccgggctgtgctcctcgctgctcccaggaaacagagtgcttctcccctcccggcctccagggaggctgtgggactctgtgcctgagccctggagaggccgcaagaccgaggtggggaggacttagagacggcctctcagggtctgctcccaccaccccatcaacgtccaccagctgggccgggctgtgctgtccaacaacagcacctgcggccacggcagcccctgcgggcagtgctgagccctgtggatggctcagccaccctgtgctgctgctcccagccttgctctgtggggcagggctgggacctgtgctgctggggcatccaccatccaccagtcctgcccgttgcacccaggggtctgcccaggccgccctctacccctgtcttggccatgctgggacccctgacagggtgcccagcactgagccacacgagtgagacatgtcccactgtcccctgtgggaggcgcatcagcctctggggaggctcctcctgggaggtgcaggaaccctggaagcctctggctttggcggcctgtgacctctccctgtggtgcagaattgcctgactgtgccttcatgctggctccatcctctggcttgtccagtgcagtgacagtcccactgttgtgtctcttggggaggctgcaccatcagatgtgtgacttggcagcccccggggggagccgggtgggcctggggcagcgttctggctggcttggtggctgcctggggaggacgtggtgtctcactttcaaagggcgcaggggctgagtgacaggggtggggctcctggctgggggagtgaagtctcggtgggcagtggggtgtgtaccatgcgtgtgggtggcaggtgctcactgtgtctcgggccatgccttccaggtggcccagacagcccaagccctgcactggatcgtgaggacgctgcgggccagcggcttcagctcggaggcggacgtccccactctgggtgagtgggtggccaggccagcagctggtctccagccgcctgtttcttttgggtctggggtcagttgggaggagaggcagctgggggtggggggctctgtccaggaggaaggcactggctgcagcctgttccaggcagggccagcgccctcaggaactcagcccacccaccgacgctggcgccgaggccccgcccaatccctgacctgacctggttcctggacgtccacggggaggcctggcctgctgtgccctgagctccccacataccgcactgcagagtgggggtgcgaggcgggcggctgcagactgtgtctgaacctggtcacgtaggctgagtgacgagaagcaaagtctgttttcctaaattcgcagccggctatgaaatgcacatcagtagccttcctcgggctgctgagtttcgccggccctcaaggagcatatttgccctcgtaaccgcactgcgagttcagctcattgccgagggccctgactgccgctgcacaaagaggcaggtgccggcggggacgctgcctgagctcccgtggctgtcctccctgggggccctgcccacttcagagctggtgttcgacctgcatggccatttgggctcggggaggtggaggagcccagatgttttggcggaaggaccacagaggaagtccttgtcctgcgggcgggcacctgagcccgggctccgccttgcgtcacgtcttcctgactgtccccagcctcccagaaggccgcggaggagccggatgctgagccgggaggcaggaagaagacggaggagccgggcgacagctaccacgtgaatgcccggcacctcctctaccccaactgccctgtcacgcgcttccccgtgcccaacgagaaggtgccctgggaggtgagcgcctgcccaagcccaaccaggcggagtggccgggcccctg

SEQ ID NO: 27596 - DNA, 2300 bp, Homo sapien
aataaattcaacaacttatatgcgatgggcaatttcttgagcgatacaaactacatacattcagtcaagaataaaataaactcagcagttgtatatccattaaataattcaaccacatataaaaatgataatacatcatgaccacgtgggctttatcccaagaacacaagattgatttaacactttaaaatcaatcattatactctatcatattaatagatcatcacgcaaaaagattctcaatagatgcagaaaaaacaaaatccaactttcattcctgattaaaaagactctcagcaaacaagagaaaggatagtcttttcaacagtctggaaaaaactgattatccacatacacaaaaaataaacattgaatcatatctcatactataaacccaaataaacttaaaataggtaatagacccaaatgcaaacctttaaaactctaaaacccttgtgactttgggtgaggcaaagatttcttatatatgacaccaaaagcaggatccataaaagaaaaacataaattggatttcctcaaaattaaaaaattctgctctttgaaaaactgttaagagaatgaacacacaatccaaaggcttggagaaagcatttacagatcacatatctgataaaggacttgtatccagaatatgcaacaaactcccaaactcaataataagaaaataaacaacccaattaaaagtgagtaaaagatttgaactcaacgcttactacaggagatggagaataaacagatgaaatgatgctcaacatcattggccaacagggaaacgcaaattaaaaccacagttccatctatcaccacacacctattagagtatttgaaattaaaaagacaaaccataccaagtgctggggaggatgtggaatgtaaaaccatacaatcgctttggcagtttcttaaaaagtttcacatatggctaccgtggcatccagccactccactcctagacatctattcaagagaaagaaaagcattcatccaaagacttgtgcacaatgttcggatcagctttatctgtaagagccaacaccagaaacaacccaaatgcccaccagcaggtgaatggacacaaactgtggtacattcatacactggagtaccatgcagctgtaaaagaaatacgcattgacaaaccaaatgacgcaggcaaatctcaaaaataattgtgctgagtgaaagaagctacacaaaaagtacatattatatgattccatttgtgcaaatcataggaaatgcaaagtaatcagtagtgacagaatgcagatcagtgcttgcctggggatgagggagggcagggagagatgaccaagagggaacccggggtgttcactatgctgattgtggtgatggtttcacaggagtatccgagtgttaaaacgtaccaaattgaaatatgtggcttaccgtctgtcaattacaccacaataaggctactttttgaaaaccatgaggatggctcaggtccggctcaaatgcccccaccctgcgttccttccttgggatgtcagacgctggagctggagcagaaggggacctagatgggcggagatctagccctactcacccactggccacggggtaggcgagggacgctcagcaggggcttcccgcagacccagggtcttcaagccccagaagtcctgatgccagagggaagaggggatttgcccagagtgaggggcaggggctggacccacagcccctcccggcgcgcagaccccgcccccacccataaccacgccctcagcccccaccacctcgtcctcagccccacaaccacgcccccagcatgccacaattactcccacaacccgcccacagcccctgcgacctgggtcttagtaccagctccatctaaagccgcaccaccggcccctcccatgcccctcccatgcccctcccccatctcttccaggccccgccctgccgcagaacccgccctcaagccccgcccccgcctaaccacaaatcccgttccggtctccttacatgccccgccccttccccgcccccgcggggaatcgacacagcctgtctccgcctttcgccccgccccctccaggccccgccccaccccgcccctcgcccgcgcaggccggagtcgcggcctccccagctagtggtcgcgggcgcggtcgcaggggcagcggggtggccgccgcgccaggcgtggagctgggtctggcgggctccgagaggcccgggagcggcgcgcagagcagcctccggccgccgccgcgcaggtaaagcccccgcccagccctgggagcgtg

SEQ ID NO: 27597 - DNA, 2300 bp, Homo sapien
tcaggccatgagaccgggccagggttgtgagcaaaagtgcagctcgttgcggtgcctccctcggcaccagtgggaggggagaggaccctggggctcgtcagcctggacacgccagcgctctcagccgtctcactcagtcccacgagcccacacagtggctgccctcaaagggactttggagaccacccagtctttcttcccagtttacagacccagagactcgggcccagagaagacaagtgactttgaacaaagcaaattagtggcaatgcccagacttgaaccgagattggcagagcttggtggtctgccacaaaccaccctcccccacagcaggtgcgggtggggggctccgttcttccggtcaccacagcatgttacaggtttctgcatcagtgcgcctcctcttaggaagaaacatctctgggctgggatggctagctccccgctttcagccatgtagaatttctcttggcattttagttagaagtgttgtctagatttcttaagtgtctgaggctgccctggccacagggatgagttagggaaaattaccgtttcccatgtgcgtgtgtgaagctctccatgctcactgaagtcagagtgagaagcagcaaacacgtcatcgggagggtggccagcaaggctgtgtcctttcacacgtcctcagatcatccttgaatccacccacattccaaattcattctcaaaaatgagattccaaatttcaggatctatttacagccagacgattttggtgccccctgctcaaaagctttgattactcctgtgcttaattaagtcacaaatccctggcccatcatccaagaccacttgtgatgtggttaaacctacctctgtgagtgctagtaaatctacctctactagtactagtaaatctacctctgctagcgctagtaaatttacctctaccagtactgccccccactgtttccttttcaggcattcagctcagtctacggcccgcagacagatttcctagaaataactgctcctacttctcaactcttaacaaaaaggtctctgaaaaggaatttggaggaaacagactattccagtgaatagtgtacaagcctgggagatgcggactttggtgtaaaatgaaggtgtgttcaaagagcaaagaaggagttcgggttttagagcaaaaagctcctgccctggggtccccattaggtccatgtaggcaaatgaaggattgaaacgtgcttagttctgattggttggtacagctgggccctgatgggttggtttccaacccgcgaaccggaagtctttgttagctgtttctttcaaacagtggtggggggcgtgaggggcgtgcggggcgtcgggggcgtgaggggcgtgcggggcgtgaggggcgtgaggggcgtgcgggcgtgaggggcgtgaggggcgtgaggggcgtgaggggcgtgcggggcgtgaggggcgtgcgggcgtgaggggcgtgcggggcgtgcggggcgtgcggggcgtggggggcgtgcgggcggggaggagggtgggggccgctctggctacagtttatcttggcactaacaacggggactgattgggcttcgttgtgaaaaggggggccctgtggtgcgtttacagagtctgagaacacagagttcgtggccactccctcacccagccctgggcaccaggttatgttttaaatttgagcacctcagccatggggaaccccttttgtttgtcagccagggcatagtttaccaatcccaaatctgtaatctctctcttaacaaatcactttctacccaaatacagatccttaagggcagggcctctggttcatttttgtcatctccacctagcggagagcgcggcacacggcaatgatacgggagtgcgggggaagggaagagtgtggtccctttaaatgatacagaagggaggtgctgggtagaggggggcgtggtccccggctagggctccacccccccggacctgggtgaggacaggcacttctgccttcttgccccaatgttgcattttccaagaccaccctggcccgccatgcccccattctgagcctataaaaacccgagaccctagcagggcagaggcagaaactgctggatgctgagaggaacgcatcagtggaagaaaacaagcggctggacgtggagaggacgtcaagggagcatgccggcggaagagcacaccacagacgccggcaggccaccgagcggcaggaccaggcggagtttggccggggcagtcggaggagagctaggccactaagcagctcaactccaggagataaa

SEQ ID NO: 27598 - DNA, 2300 bp, Homo sapien
gctcacgttcatgaaagacattgcaaaactcaaaccaaacagtaaacaaattaagacatctctaggacctaaaaggatttcaacacaatgtgagaaatgttggcaaaacatgaaagtgggctttgtgagttttgaggaattactgagttttgaaagatgaggctcaggccaggtggagaggaagcccgtccatgtgtgcgtggtcccagcgccttcccagggccctcctaaggcaccttcagggcctgggccatgatggcgcccccagcagccaggtccccgttcccggagttctggttctgctttgggagctgcagccgtgcttccttctgtctgctgtggtcctgctctagcccctgctcttctctgatgtttctttcaggcggatgtcacccaccccttgggacttcgccatgggtcgctagcccagaccctccccttggttccggtggttccatttctgcccctttgctgctggcccccttctgaggatgcccgtgcatctccaggaccactgctccagtccttggtgtagatcaaagctggccttcacacgcggcctgaaaatgtagagtggccgccttctgggctgggctgccacctccaccacatcacccgtgacagaagccccgtgtttttcggtaaccacgttccacgaacacctcccgactgccttccagaacacacaaagatcaacgaagctcagaatccagtcccgacgtcatttcatgaagagcaggtagtccatcaaagggatgggccccatgagtgaagggctgagaccccaccatggtgtgaggcgtcccaggcactcccgtcacggcccaaaccaggctgcaggctccatccccatggggcaggcacagaggaggcgattcatgtggacacagggacacctgtggacgccctggctcggccgcttaccgccgtgtgtttgtggccaggtccctgctcctgagcctcagtttccacacctgtgagatgggtctgaggtggaatcgccaaccagctgaggatgcgcagccacagaccaccttccagaaatctccaaaaggctttccaaaacaggaaaacaaggaaggctgccatcagcaggaattccagggctttcagaatgaggctgtcaggagtgaagggagctgtgctccacatgcagggcagtggccagggctgccaggccttgtttatctgggagcgccaggctgcctgcctgcacctggtctgggcacctgaaggcagagctgctcctgcttagggtctgtggcaactgtcctcctcagtgggtgctgctgggagctcctctgattcctggtgggcggcttctggcctcgcctcttcacccacggtgtagggtgtgggatggagatgcagggcctctgctctccttctcccctcccccaagcagcctgggttgtacctccactaataaacaccaacacccgcgcccagggtgggttcggccacggggcgattctctgagtgacacatcaggatcagcttcgtgtggtcctgaccttacggtaatgtcagcccccagagccaggggccgggctatggcaccacccacccaggcgatttctatgtcgggatgaccaactgtgccatccctggggcagtcccccatgccaggcaaacattctcctttcatgcttaaaatcacaggacgggttcacctgcttcgtccttggacctgtgatctatgtacgctgcttttcaacaagtttctagttgtcccctcctgggtatggccctcccctccttccttcccagaggaagaaaacacaccagctctgcatgcgagaacgctcccagctctcccatcttcccatcgcaggagcccctcgctcctgcaccctggggctttcggtcctgtcccacctcagcggctgctgcacaggaaggccgtcctggcctggcccctgtgtctctgccttcctcgactcctgcagtctgtgcttctgtcactccttcagcacgccatccctggacacactttgtgctccgtggactccacagcccccaaaccccctcttatgccctccctgaccccagaccatctgggctggcttctctctaggacacataccagttctcattccagaactttccttatggtcatctttgggtggagccaccacttccagttctgatcttctcattctggttgagtacctgggcttgccagtgcaccccccaggaacaccgcctagtccagggctcccacaggtctcagactgacaggagactgggtcatatgaccagcactagccaatgagctgtgagtacacgtgacacaggga

SEQ ID NO: 27599 - DNA, 2300 bp, Homo sapien
tttatttccctcttttctttcccatctctgtattcaggcttgaaatttcctcatctcccttcctttactaatcttctctttggttttgtctatatgttgtaaagctaagctacctagttcttaatttcagctattgtgttcttcgtttccagaatttttgtttgattccatttaataaatccagtttgacactgaaattctccatttgttctctattttcttgagcaagttaatcagcattaaattccagtttcacaattctaatatctagatctcctgcacgtctgtttctcttgtttgtttttttcctcttggtcttttggtcagttggtcttgtcttctaatatccctagtaattttttgactgcatgaaggactttatgaaaatttataagatgatttgagcctctgttgatgctgctgtctccagaagagatcacttttgtttctgggaggcagttaggctacaggcagatcatatgagttcagtgcgagtttatttaaagataggtttcattctttctggtttttccttcctcctagggagtagcccttcacttacattcagcatttccaactgaaagcctagggtgtttttgctagaatccctccaccttgtcaggtcctgaactctgtggtttttttcttctaattccatgagactactaaaagctctgctcagctgatcaggctctcggcctcttggctgtggtctgtaaattggtaaatgcctcagtaagaaaatccacaaggaatattggactcacttctgtgcagtttctctctaatgcggattcactcactcaagtctcagctgtcttgatacctcccggccccttcgaacagagattttgtttgtaaaccagatttcctaatatttctcagctagatggccagtctgatgtaagccagttccccacacacgaaaggagaacttgacagagcattttatacagcataagaaaaaggtggcacaatggaatcgcgttcagagctcaaaattactcttcaataatttctccaaaaaagtttattatttcagcccatttttataaaggcttttccttgggccaggcatgattttaggcctttgaagactgagtggtgaacaagacaaacacactccctgctcacatgcagcttacgtttgaagaaaggaagctgaggacagcaaggacaatgaacaggaacagggaagacacgtggtgcagaaatactgatgatggccaggcaccgggctcacgcctgcaatcccagtactttggccaaggcaggagggatcacttgagacgccatctgtacaaaaaaaaaaaaaaataaatttaagaatattgataacgggacttgagttatctatggttgaagcacatcataaagctatggcctttaagagcagaaccaaatccatgggccagttcaaaacttttctttcctgtccgaaacccagtcctatccccagcgttcccacaccaacgtctgagtggacctcggggaaggccgtggggaggggcatggcctctccttccttgctccccttctccctgtttggggctctaatttcttcagtgatggggatgggggaaggaatgtgcagggccaccactgtggggttcgctggccactgctgcaccttctctccggctgctccagtgatcctgtgcttctaccagctgcttctgcctcttcagtgaggacccgctttagggaggagacgcccccacgatcgtgagtgggacagctctcaccctggcatgccacactttgcataaggctgaagggccacccctgcctccgcagcccccttcttacaacccggactgcactggtggcgtgctgggaccaggtccacctccactcttgcccccagggatccacatgggacaggctacagcccagacaggacaggagatttatgacctgggccacatcacaggcaaacaaacatccctagtcatgacacacgccacctctcagcaaccaggaaggggacgctgtgggccctggaacaacaaggccagaaggggtataaaagcagagccccacgaagctcacacactcactcacacactcagtcactcacacacacactgactcccacactcactcactcacacctcccgcagctcacctcctccccaccccagcatggccgcgtccaccatgtccgtctgctccagcgcttgctccgactcctggcaggtggatgcctgcccagagagctgctgtgagccccactgctgcgccctcagctgctgcgccccggccccctgcctgaccctggtctgcaccccagtgagccg

SEQ ID NO: 27600 - DNA, 2300 bp, Homo sapien
ttttctccctagcaattgaattttcaggttttgtctcagctaaatatacactctgtttgttatcttttctctcattatatttgtgaattttatcctttacctcggcgtttggaagaactcatgtttggacttaaaattgaattgattctctgtggtattagttttgctcttctgcttctgatgtgaatttttaatccagctgtttggtattaaatttggtattgaagacttgctgtctttcatcttcaacattttttatttttagaatcggagactcactggttgagaatgtagatcctatgtacagaccggctggcttctagtcctggttctgtcactgttttctgtgtggctttgagcagattgctcaacctctctgctgaagcttccgcgtctgtccatagtaacttcgacaagaagttaatgccgaaattcagtgaattaatagatgccaagtgcttggaatgctccctggcgcagccacatgctccgacctcaccagcttcatcatcagtgctactagggggtcattttctaagatcaccgaagctgtcactacagtcacatgctataatttgcagctccaggtctgtgggaccctccccctcatactccattagggaacgccgctgcctcggcttcccttcggctctcaccctggctcccagtgctgactgccctgcgtcttcagatgagaggctcttgtcgggagctgagtcttcacagacatcacccctgagaggtcggaggggcttgtttgacaacagccatggagggcggagtgactggcacgtgctggaggccccaggttcagatggaatttccatcacaatggcgaggcaggtgtgcagggaggggctgttgggggctgtgagtttatcccacgtccagccggtgcacatggccagtgacagtcacaatggcagtgactcagatctttaggtggacaattgtgtcacctgcgaataacagaggttcacgtctcatttctatttctcggcttgctgctttgactggccctgtaggacaacagagaaaggttctggtgaccaggggcctgctcacctcctgctacgctatgacaggagagcttccagtgagcctccctagcgctataggctttctgggccaccatgaaagcccgtcccaggctgccgtagcctcatccccagctgaaagaggctggaaggacactgggagatgttgctggttcctggtgagaaccagcttcaggccatgctgggctcaggccccaagacagaggagctcacctgtgacggtccctgccccggggtcagggcctgtcctgcctgatgacctcccaagcacaggctggctttgcccaccccaagtgtccttcactctccagtgaccctcattccacatccacctcctcaaggcagaggcccctccccacccccaggcctggatctgcacccaccactctcaggacacctgaccagggctccaggggacaacagtccagacccaaaggccagtccccaaaccttgtcctcctaatgagctgactgtccagaggccttgccagaacattccatctccttctcagaggaggggaggtcctccctgtcctcctgctcttggcagacatcaggatctcagaagatcccagagcccgccaggaagcgctgtcctcaagcgtcttttcccaacacaggcacctccatcctggctctcccaatcacagccacgccagcccaccctgtgaggtccctgcagacagaggctgggcctcccccgggcccagagctcacgctgggcacagtcacgggacctgccaggtggaagtcaccaggtcagccccagagaggccacaccttccctcctggtgttcccgggggacaggctcagccaggggcgccggtcctgcccaggaccagccgagtgttaggagcagagtgaggacaagtcatggcaaaggaagcagaaataatgagggtcctcccggctccaaacaccaacacggaagtggagggcgttgctgagtctcctgctgggaaaacacaggccctgggcatataaaagccccagcagccaacaggctcacacacacactcactcacacactcacacacacactcactcactcacacacctcccccagctcacctcctccccactccagcatggccgcctccaccatgtccatctgctccagcgcctgcaccaactcctggcaggtggacgactgcccagagagctgctgtgagctcccctgcggcacccccagctgctgtgccccagccccctgcctgaccctggtctgcaccccagtgagc

SEQ ID NO: 27601 - DNA, 2300 bp, Homo sapien
ttagtgctataaatttccctgttaacactgctttagctgtgttccagagattctgggacattgtctctttgttctcattggtttcaaataacttcttgatttttgccttaatttcgttacttacccaggagtcattcaggagcaggttgttcaatttccatgtagttgtgtggttttgagtgagtttcttaatcttgagatctaatttgattgcactgtggtccggtagactttgttatgatttcagttcttttgcatttgctgaggagtgttttactttcaattataaagtcaattttagaataagtgccatgtgacactgagaagaatgtatcttctgttgatttggggtggagagttctgcagatgtctattaggtccatttgatccagagctgagttcaagttctgaatatccttgttaattttctgtcacattgatctgtctaatattgacagcagggtgttaaagtttcccactattattgtgtgggagtctaagtctctttgtaggtctctaagagcttgttttatgaaactgggtgcttttatatttggtgcatatatatttaggataattagctcttctcattgaattgatccctttatcattatgtaatgcccttctttgtcttttttgatctttgttggcttaaagtctgttttatcagagactaggattgcaacccctgcttacgttgctttccatttgcttggtacattttcctccattcctttattttgagcctatgtgtgtctttgcaagtgagatgggtctcctgaatacagcacactgacgggtcatgactcttcatccaatttgccagtctgtgtccagctattatttctatgaaataatatttttccactgtagtctgactttgccaggtagtcctccaacagagcccttagccatactcatcaaaggtcagaggcttcaaaccctgcagcctatgggcccccaccaagcactcagtggacccctggcctaattttggaaagccctgcagcctagagcatcatcagagcctctgcctttgccatttcaaagatttagtagaaaatagcgatcatagagtgaggagatgagggatccatgatcagaactttgggggcttactagcgcacaggtatggtcccgggcacaggcatgggctgatacacacaggtgtataggtatttgtgagacaaggctctgcaatcagacccttttatttgtacatttactatgacaatgtccaggagccaacagtagaactaatacattctgatgactttctggcccataagggaagagaccttggagctcccaaggacaccattgcaggtgatgttgcccgagatgtgagaggagaaggtgtgaacactattgtgcacaccaccgggggaaggccccataacagttcaacgtgaaatgaaacaaaggtgcttgcccctcatctccatccctactgtgctgggcctgcagctgcctccctgctcccctctgcgagccaatctctgcccaggaagacactattccctcacacctgccccagggctcacccccagcagaaatatgccccatggttcccactgacaaccagcagtgtcaacccacagggtggatctcgccgtgtggccaggccaactgagcatcttcaaacttgtccacagcagaacacatctctccctttcctcaaggcccagaaactgaggttctcctaacctcatccctccttaggtgtagaagtctttttttaagtgcaaactcctcctgggatggagcagagggctgtcaattccagaatatctcctaactgccactgtccctgcttctgcagtgtgctttgatgcaatcaatatatttctactagtttatctctgtggacaagcccacattagggaagccctaactccagtcaggagcctcacaaaccagaacatccacaaacaatgaaccaacactactaacacaacagtgcctacaacaacaacaaggaagaggaaggcttctcgaagccaggcaggggcagcacaatcaacacagaggggtataaaggttccgaccactcagaggcctggcacgatcactcactcactccctcactcactcccacactcactcactcacgtctcccccagctcacctcctccccaccccagcatggccacgtctaccatgtccgtctgctccagcgcttactctgactcctggcaggtggacgcctgcccagagagctgctgtgagcccccctgctgcgccaccagctgctgcgccccggccccctgcctgaccctggtctgcaccccagtgagctg

SEQ ID NO: 27602 - DNA, 2300 bp, Homo sapien
tgagatgaacttggacccaaaagtaagaaaggtcagggagggacagcgtgttgaaagggcaccagggccaaaacgaaaggacttgagggccgaagttggaaccactgcaaccacaaaatacatagtgatcatattggattatagctcaagtaatagataaacattctttagtccacacatagataaataaataaggaagcaaatagacacacagaagagcgggacagctcctcctcccgggagaatttcaattagtaagtgtggaaggaacaaggcagggaggagaatcctcaacagagccccacagggaccgtgcgggcgaggcccccggaggggcaccagcactgccgggcaaacgcctgggcagacgcgggacagctgccaagtctcagacatgaccaattacagagggaaacggcggcaccgcgagggatgggccgcggccgtgtcacctccatgccccacgcacactgctcctgtgggattcctcccccaacacgatgcccactctgaccacgaggaaacctcaagcaagtccacgtggaggggcattctacaaaacacccaaccggtcaaggtcgctgaggccaaggagagattgggcaaccgtcacaaaccagagaagccgaggagagctttcagccaacgccatgtggggtcctgagcaggacccaccggaagttggtgcagctgcctaaagaccgtcctggctgagaagaaacagagcagcgctgctttctcagagctgggaaccgacctgcggtggtgtcgggaagctggcgaagggcgatgtgaactccgcttttcagccactattccctaaaaccattccacgaggtcaagccacacctcacaagcaaaggctgctgagtgcccagtgctgggcacctgctgtcctgtgctaccctcgccaccccccatgctccacctgccccaggcccaagtccacgagaaacacttctgccgtgcctgccttcccatcccgggttctgctcccgtgcccacgtcctcatcccaggttctgccattgtgtctgcttgctgtggattgaattgtgtccctcaaaaggtgccgaagtcctgaccgctggtacatgtgaatgtgaccctatatggaaatagggtctttgtaggtgatcaagttaagaggaggctgttaggataggccctactgcaataatgctttgtatccttataaaaaggggagatttggacacacacacacacacacacacacacacacacacacacacacacacggagaagctgtgtgaagataaaggcagagctcaggtgaggccactgtaagccaaggaccccaaagatagcagcagcccacaggagtgaggggagcggggtgagacagtgcccctcgcagcctcagaaggaacccatgctgtccactgtccacacctcgatctcagacttctggcttccaaaaccatgagacacggaatttctgttgtgtgaccagccagtttgtggtactgtttgtcatggcagcccaaggaaaagaatacattacagcatacaaaccatgactcacattatctttacttagaacccaaacaaacctctctccctaagctttcaatcacagaggcacatgatcttgttcagcagcctagaaaaccaaggcccagcggagccacccgtaggcacccactccccatagcctggcacacacacacggcagagccacccacaggcacccactcctcatagtccagcacacacacggcagagccacccgcaggcacccactccccatagcccggcacacacgtggaccatgccaccctccacgtgcgcctggggagcaaagcagcacagcctgaactgcccctcagctcttcctcctgagtctaaaacacgcacatgcgccccaggccaattccaagttttgtaaactgagcaacagctcttgggaaacaaaaacacagctactgtttattctcctggagctggctgtacaccccaacaaggaagggagggcttgctgagcctcctgtctggacaacatgcaccaaggaggagtataaaagccccacaaacccgagcacctcactcactcgctcacccactccctcccatctcccccagctcaacccccagcacagcagcatccaccatgtccgtctgctccagcgacctgagctacagcagccgcgtctgccttcctggttcctgtgactcttgctccgactcctggcaggtggacgactgcccagagagctgctgcgagcccccctgctgcgcccccagctgctgcgccccggccccctgcctgagcctggtctg

SEQ ID NO: 27603 - DNA, 2300 bp, Homo sapien
ctgaaagagggagtcctacttccctgaccttagagaggccggagggtcgaggagatgattctgctcacacagggtggaagcgaagcgacagagacccaattccaatcgcctgtctgtgttcctcccaccacgccagtgatgtctgcacagggcacaagaggttttaggcaatgtcgatgaagactactgattttgaagctagggaggcatttggacacactctgggcaagcatggcgctagaagacaccattcttatttgacaagtattgtgcagcagaaggataatttaaaaagcaaatcagcaaaaagaactatgacacgactaacaacacaggagggttagggacaaacccaagggcccgaaatggccaaagggctgcaaggctccccgcgtccatgtccgtctagcctggacccctgggaaccacacgcccctgggcacaggaaaacactcaggggcctgaaggacagcagagggttgtgcacaaaggagaaaaccatggccgtgagctccagccaaggcattaatcaacacacctgggtgtcagcgccattgcagtctcagggcctttattggtcagcttgagggcgtccaaagaaggctctgcggctctgagccaggaggacagagacctcacgggtcaaggctgagctgaccctcatgagaggtgggagatatggaggggaggccactgccatgggaactttctagaagcgcccccctccccccgcaagagggctgcagcattgagtatagactttcagttcttccattgtccagctcaacagcagacaccaggaaatggtcaaagtgcaggagcaattcaggacgcgactatcagctttcaggtgggacctgagcctggctggcactggggggcgtgtccatcagcagctgggcttctgacctgagcggaggcctcagcaggctgggcgggagcacacggggcgtcagaggagggacacgcaggaggctgggcggcagcagctgggttggcaggaggaggtgggagcacagcaggaagggacgggcacgcagcaggcgggcctgcacacggggcggcagaggagggacacggaggaggagggtctgcagcaggaggtggtgcagcaagctggctggcagctagattgctggcagcatgaagaggaagccccagagcaaacaggcacacagctcacaggcttgcagcagacgggcacgcagcagccctgctggctttgggaggaggtgcagcaagctggctggcagctagactgctggcagcacagagaggaagccccagagcagatgggcacagagccgacaggcttgcagcacacaggcttgcagcagacaggcacacagcaagcctgctggcagggagaggaggtgcagcaagccggctggcagctagactgctggcagcatgaagaggaatcctcagagcacacaggcttgcagcagacagtcttgcagcagacgggcacgcagcaggcctgctggcaggaggaggaggtgcagcaagccggctggcagctagactgctggcagcacgagggcgtgcaggagctgatgcagcctgattggcaggggctgggctcacagaccgcctggcagcaggggctggacacacagctcacacagctagactgctggcagcacgaagaggaaatcccagagcagacaggcttgcagcagatgggcacacagcaggcctgctggcagggggaggaggtgcagcaagctgactggcagctagactgctggcagcatgaagaatccccacagcagacgggcacacagcacacaggcttgcagcagacagtcttgcagcagacgggcacgcagcaggcctgctggcagggggaggaggcacagcaagccagctggcagctagactgctggcagcacgagggcgtgcaggagctggtgcagcctgattggcaggggctgggctcgcaggtcactgggcagcaggggctggacacacggctcactggggtgcagaccaggctcaggcagggggccggggcgcagcagctgggggcgcagcaggggggctcgcagcagctctctgggcagtcgtccacctgccaggagtcggagcaagagtcacaggaaccaggaaggcagacgcggctgctgtagctcaggtcgctggagcagacggacatggtggatgctgctgtgctgggggttgagctgggggagatgggagggagtgggtgagcgagtgagtgaggtgctcgggtttgtggggcttttatactcctccttggtgcatgttgtccagacaggaggctcagcaagccctcc

SEQ ID NO: 27604 - DNA, 2300 bp, Homo sapien
gagcgcagggcgtggacttagatcaggcacactgagatcctggagctgttgtgggcacagcaatgactgtggaaagacactttggacagtgatgggtggtccagacaccaggagaagggagcgacagagggcgtggatcacaaataggaataaagagacaaggaatcaccacacccattcgattaaggaggctgccagagatagcgatgggaaaactaaagcaaattatcatacaggccccagggcttgtcccagaagccatgtcagccttaccacatcccgctggctcaggaccacctccctccctgcctgccactcaggaagcacgcactcttctgggagctgtgtgacagaacggagccatgtatggcggtgagggaaaggagtgagagctcgcggttgtcaggttcactgctggccagctgtcctctttcaaggttacttatcttctctcatcatttctgcaactgtcaaaatgggctgcagagtcaccactcacgcggtggctgatgtggagaccgcacctgcgccgtgcatgtctgtagcacacccgctgatatgacgtcatcctagccttcctggctttcctgtcatttcctgaaaggagcatcgagtccttcagtcccagaaagtgggttaagcacacagttctcgcacaacctctactaataatcactgaaaggatattcaaagagttataaaaaataaaatcaaaattgtctaacaaaaagggaggctctttaaaatcctttatatatttgtagaaaagagaaacagatggaaacaaattagaatgtaaactggatcaggaccccaatgccctggaataaaatagtcttttactcagaaaatcaaatgaactgccaccaatgagcagagcttaactgatgtccagtgaaacgaggggaaaaacgtttaaatgctcaacataacatcattacagtgagccaaaaatgtatttcattcatcgtgagacaaaattaaagtcacaaaaggaaagaccttgagagataagagttatttttaagagcgcaaaacacttcctgagtctccacattgaaaggctcaatgaattctaaccacagaaagtaaaataatgcacacgcatagaaacaaaagaagaataaaaagaaaaccaaatgttcccagagagttaaacggagagagagagacaaactataaaaaatgacaaatgaccaacctcagtctctcatcagcaacgctggacactacagaaaaatggtgacacaggttcatcattttgagaaaacagattttttgttattatttataataataattctgacttaaaaccagaattatatacccagctaaactatcatataagtgtgagggtaaagttgagtacatttttaggcaagaaagaaatcttaaaatgtatgtcctaaaatcaccatatgtgaaaaagtacttgatctgtcaccatgaggaaataaaaatggagaaaacccagagcgcagcttcaaataaaacagagagagggctctgagggtggcatggaagagctgaagagacaaggataaagcacagatccaccagataccaaatctctgagcattccccttacgaggcacaaggggttgaagagagggccacttagcttcattgtaccctctgtgccagctgcattttataagaaatgtatatttttctacctatttatattttaatatgctaaaagtaataaaatatatccaatcagtccaaacacaggataggtgaaactagaattcctccctttagagaagtcttcatctctaaaacctctactcaacaaaagtttgcttgaaatattttccaccacatttctggggctaaaataagaaccgatgaagaaacacggccctgcaacatacacacaagtttaatgagggaaaaacaaacagataaaccagcatgaatgacgcatctccagccaccagctctaaacaccaacaaggaagagaagcttgtggagcctcctgtcaggacaacacacgccagggagggatttaaaagccccacagccctgagcacctcactcactcactccctccttcactcactcacacactcactcactcacacctcccccagctcccagctcacgtcttccccaccccagcatggccgcgtgcaccatgtccgtctgctccagcgcttgctctgactcctggcgagtggacgactgcccagagagctgctgtgagcccccctgcggcaccgccccctgcctgaccctggtctgcaccccagtgagctgtgtgtccagcccctgctgccaggcggcctgtgagccc

SEQ ID NO: 27605 - DNA, 2300 bp, Homo sapien
ctgaacaaacatgcatgtaacatacgacctgttttcactctgcggttgtgagaaacacactgacccgtccaaatccaaagaatggacttagaggcatgaagaacagtgaaagtgagactttaatgtcggtcttgcaagatctggtgtctgatgggcgggcacacccagcacactttcaacaagcaatttatcccctagtgtgcaggtccctcgcccagttcctcgcagcctgagtactatggggtcacaggcttcctggacgtcacctaagtttcattatccccttataaggttacatcttgtccccttccccactttacatttgatttctcaatggcaaaagtttctttccttttatgtgttagccatccgtcactttttcttcctcccctctgacttctgtgagtcttatcactcttcccaggtgtctgtactgtgtggcttgtcacatctgcaagggagctgcctggacttgccagggcctgttttctgaatacggaccacttgaaatgtacttcttacagggtggagtcttatcatgtcaatgggtcgcaatgaggccctaaacctcagaagtcttctcaggacacaaaggcactccagtgcacagcctctgtaaaccggctggagccagtccatggttgggggtcccttatcaggaggaggttcctgaagtcagtctcctgcccagtcagagctgtggtcatggctgtggaacgtggtcagttggcatctgccggtggatgagctgcagtcgtttgaaccttgctcatcctcatcgcggggccagtgcgtgtttagccactgtagaaaaacagcagctgtggcgtgagagcagagtccgtcctctcagtgtagggcacgcggcttgtcccttgcctggcgcggcctgaggtcctgtttgtaatttgatatcttattgccagagtctgctctgtgggtcttacggtctctattttaactttagtgctgggtagtggttgtgtcgaaaccctaaagggagggggtgtaacgaggcgtgtctgacctcccttcctgtcatggccaggaacgcagtttttcgggggtccccgtgggcaagatgggatccatttagtcagttgaggggcttaggattttatgtttcgtttacactggcaatgggtttgcagtgagatcaacttctcatggacccattttgtgtcttctgtgcgggttctttggacagatgtcccttaattttaaggtggtgacactaagaggcctggcacagggcttggaagacagggctgggaaatgggcccagcaggaggctgggtgggggctgacgggcagcctcggagaagcagagcacacagaggagccaccccaggcggggacgagggctgctgaccgcccgctgctcagcacggttactctgcaggttcagaacccaaaaccacagcccagaaggctgtcatgctgtccaagcagggaggggccaagcccaccgtccttgccctggaacacacaggtcctgctgcctccaaaacacaaagacgaggtggacacgaaacagggccggaggtgaagaggctgtggggatgagaagtcgtccagagctcaaagccaagaggtctgggcacagttacagctgccccccacccccaccatgccatggcccagggcaggtcaatgaaggctcatgggccccaggttgtccctcagaagatggccacagtcctgtgtccggtgatgggggaaggaccacgctggatgaggggttttcaccacaaggacacttcctgaggccggcttcctgcagaggggctctgtgtcccggggctgctggggccaggggtggacgatgccgcgacctgtggctctcccagctccccgaacccagctgggaccaggccccgcccaattcctgcccccagggatccacatgggatgggacacagcccagatgtgatgggagatttatgagctggcccacatcacaggcgaacaaacacccctaatcccggcagactccagctctcggcaacacggaaggggaagctgtgggcccggggacaacaaggccaggtggaataaaagcccgagagcctcagcacctcacaggctcactccctcaccctccaccagttcaaccccagcatggccgcgtccaccatgtccgtctgctccagcgacctgagctacggcagccgcgtctgccttcctggttcctgtgactcttgctccgactcctggcaggtggacgactgcccagagagctgctgtgagcccccctgctgcgccccggccccctgcctgagcctggtctgcaccccagt

SEQ ID NO: 27606 - DNA, 2300 bp, Homo sapien
tatttctaacattattgattatacattgattatacacagtttttactatctcttccgtggtcactttagagattatagcacacattcttagattattcaagtgtaacatatgtcagcacttccaccgcttccaaaacaatgctgaaaccttagaaaactttcactccatttatccttctcaccttttattgttaatgtcatcatgcattacttttctacttctagtttagaccccacaagagattataaatataataatattaccctttcagatcctcctggttccttcctgcatttttatccttccgtcatcctgcctaaaaaaatcccctttcatagttactgtagagtaggtctgctcgtgttcagtttgctcagttgttatccagaattgttttgtttcatttttcacctttgaacaatgttcttcctggtctagaattctaggtttgcagtgattttctttcagctctttaaagatgtcattctattacctttagtttcttcaacagctcttttaggagagctttaaaggaatcatttttaaaacattttgttcagcttttcaagttgttctcagcaggagtatatgtctgacatagctactttgtcccatatggaagcagaggcccccattctctctctctctctctctctctctctctctctctctcaatgtacttccatcctgtaggaccagatcctgtacctctggagggaccaggccatgctcaaatttatattatttttatagttcaaaatatacagaaagacaattcatcccaccgtgtaactgaatttctagccctctgaggccttttgtacttttcctaaatcccctaggagttaagaggcctggactgggaaacacagatagagacacaggacaccctgagcctctgagacttgcctgggcatcaaaccccaccagaagggcccctggagccctctcccctgggtaggggccacttctcagggccgcatgcatgctgggctatggctggtcatcactgacatcaccaggcaccaagcagcccacctccctccctggtggggtccacagtcagggttactaccccttcactttcacattctcagcacctggtgcaatttccagcatgtgggaggactcactgcatcatgaataaatgaatgcttgagaagtaaaagtatcggatacaattggaaacatttagcagaaacaaccaaaaagatgtggtggccaattggatattatttgcagaagaaatggagacttagatcagatgtctagctggggtgaccaaggacttagctggcaatcaagaaaacacactgcaagcgaaagcagtgcttgctgcttttcacacggcagtgctgttgagagtggctgtgctttttgcggaggaggtgttctgggttagacttacaggtttgcagtgcttgggataaaaccaaatggaaatgggggccccatacagggatctggggcctccctaagtgcccagatggaagagggggtgcacggccccccaggaactactgtgaacctgacgggaaatggctcacaccactgtccaccctttcccgtttgccactcgctctaaagcccttggggggacttcatgcaccagagagagtgtggggagtcacttctaggaatgttccaccctcatgccatcattgacagaggcctctctagcctggcattccagaagccacagccacccagacaagcagagtcccctggcgatggcccacaggcgctgggattaggatggatggatctctcctgcagccagcacaggcccctgggacactctatttgcagacattacaccctgtctacttcaatattatgctctgaagccaaaggtaggtgagggtgcgtcaacggaaccaaatatagactcaggactttacaaactgaacggcgtctcataggactaaacatgaaactcgcactaataagcgttctctaggttttaaacacaaacaaggaaggggcaggagttgttgacactccagctgggacaacagaccagggagacatataaaagccaacatccctgagcacctaacacacggactcactcactcactcactcacccactcactcccatctcctccagttcaatccccagcatggccgcgtccactatgtctgtctgctccagcgacctgagctacggcagccgcgtctgccttcctggttcctgtgactcttgctccgactcctggcaggtggacgactgcccagagagctgctgcgagcccccctgctgcgcccccagctgctgcgccccggccccctgcctga

SEQ ID NO: 27607 - DNA, 2300 bp, Homo sapien
atgtatattgtttaataattctgagacaaacaggagaactaagaagagcatctgggatgggccttgggagggatgcatgccagagagaggggggtgttaaaggcattcagttttataatgaaagcagagcataaaagtttgaaaaatttgtagcctgactatgcaatagaaaagaaaaacccattttctagggagaaattcaagccggatgcagaaatttgcataagtagcaaggagcctattgttaatccccaagaccatggggaaaatatctccaggccatgtcagagaccttcatggcagcccctcccatcagaggcctggaggcctgggaggaaaaagtggtttcgtgggtccagggtccccatgctgtatgcagcctgggtgaaaggagccaatgtacagctcagactgtggcttcagagggtggaagccccaagccttggcagcttccatgttgcgttgagcctgcaggtgcacagaagtcaagaattgaagtttgggaacctccgcctagatttcagaagatatatggaaacgcatggatgcccaggcagaagtttgctgcaggggtggggccctcatggagaacctctgctacggcagtgcagaagggaaatgtagggccagggcccccacacagagtccctactggggcactgcctagtggagctgtgataagagggccaccatcctccagaccccagaatggtagatctattgacaccttgcaccatgtgcctggaaaagctgctgacactcaacaccagcccatgaaagcagccaggagggaggctgtaccctgcaaagccacaggggtggagctgtccgagaccatgggaacccacctcttgcatcattatgacctggatgtgagacctggagtcaaacgagatcattttggagctttaaaatttgactcccctgctggattttggacttgcatgggccctgtaaaatccctttgttttggccaatttctgccatttggaatggctgtatttacccaatacctgtacccctattttatctaggaagaaactagcttgtttttgattttacaggctcataggtggaagagacttgtcttgtctcagatgaaactttggactgtggacttttgggttaatgctgaaatgagttaagactttgggggactgttgggaaggcatgactggttttgaaatgtgaagacataagatttggaagggccagggacagaatgatatggtttggctgtgtccttacccaaatctcgacttgaatttcatctcccagcattcctacatgttgtgggaggaacccagggggagataattgaatcatgggggccggtcttttcctgtgctattctagtggtagtgaataagtctcacaagatctgatgggtttatcaggggcttctgcttttgcttcttcctcattttctcttgctgtcaccatgtaagaagtgcctgtcagctcccaccaagattctgcggcctccccagccatgtggaactgtaagtccaattaaagccctttttcctctcagtcttgggtatgtctctatcagcagtgtgaaaatggactaatacaggggcatcgcaccatagtttgcagatggaacaggtaggggtggcagggtggggagccagggggcattcctagctgagacacccattgttcaatggagcagaactctgggacaggtggagaacatctgctggtaaaaaaacaccccacccctggtaccaaataccccaatagcaaagacatacaggcaaagacaggaggaaagtggggctgggttttccagacttgccaactcacgatctgttcaactcccagctccaccagcagacacgcagcatcactgtgtgtggttgcagggcacagacacctgcaagtggtcagcatcacccaaccacatgcagcagtcctgggaccacagtaacatcccacagcaagtaaactaattagggttgcctggaggcaaagtctcagccacaacaaggaaagggaaggcttgtgagactcctgtgaggaaaatacccagggagggtataaaacctcagcagccagggcacacaaacccacacacctcacaccagcactcacaccacccagtccagcacccaccatggctgacgcctgctgcaccaggacgtatgtgattgctgcatccaccatgtctgtctgctccagtgacgtgggccatgtcagccgagtctcctcccccagcacctgcactggctcctcctggcaggtggacaattgccaggaaagctgctgcgagccccgctcctgtgcctccagct

SEQ ID NO: 27608 - DNA, 2300 bp, Homo sapien
gacagagagttttatacagcataagaaaaaggtagcataatggaatcgttttcagaggtcaaaattactcttcgataatttctccaaaaacatttattatttcagcccatttttatgaaggatcttccctattccaggcattattttaggccctcagagactgagtggtgaacaagacaaccacacttcctgcccacatgaagcttacctttgaagaatgggagctgagcacagcaaagaaaatgagcatgaaaagttaggagacttggcacagaaatactgatgatgggccacgcacggtggcttacgcctgtagtcccagcaatttgggaggccaaggcaggaggatcacttgagcccaggagttcaagaccagctgggcaacatagcaagactctggtctctacaaaaaaaatttttttttacaaaaagaaatattgataatgggacttgaattatctatgattgaagcgtatcataaagctatggcctgaaagagcagaaccaaatccatagcccaaaatggaccagttcaaaacttttctatcctgtctgaaacccagtcctatccccagcgttcccacatgcaagtctgagtggacctcggggaaggccgcggggagcggcatggcctctctttccttgctccccttctccctgttttgggctctaatttcttcagtgatggggacgggggaaggaatgtgcagggccaccactgtggggctcactggccactgctgcaccttctctccggctgctccagtgatcctgtgcttctaccagctgcttctgcctcttcagtgaggacccactttagagacacccccagggacagtagctggaggactctctccctgggacaccacactttgcgtaagactgaagggccacccctgcctccacagcctccttcttacaacctgggcagcactggtggggtgtggcagctggccatagctggtcaacttctgtcttattttagaaaccctgtggggacaggtctgacccagaatgttagcattatttttagaatgagaggccgtttccagctttgccagattcacagcaacaaagacgttctactcaacatcgtgtaatacgtcttactttataatgaaatatgcgtatgtgtacttgaatttttaaataaaaatgtgaaatcacaatcaatattataattagctgctgggtagcaatgttcctggaaagtgatcagggccattttataaggcaagaagctcgggacttcatcatgccctgtggtgataacaattcatcatcaaagatcatgcagccgtgagagttgcctgtggctgacctgggggtgtgtgatggggcctgtgggcagggctggtgagaaaaagatgcttgcagtgcagggcacacggaggagatggctccagcagtggcgagggctggcggctgcctgctgcctagcacagctacttcacgggttcagaacccgaaaccacagcccacgatgctgccattgtgcctcagcaaggagtgggctgagcccacgatccctgccctggaacagagtcctgctgcctcccaagcaaaggacagggtgggcaatgaacagagggcaggaggcacagaggccatggggattagaaattggcgagtcctgtgtcctacagcaggggaaggaccatactagaggaggagtttgcaccacaggaaataattcctaagggccggcttcctgcagaggaagcccgtgtcctgaggctgctggggccagtggctggacgatgccccagcaaccaaagatggccccaggcacatcccacccacatcccacccaccagacgcccacagccgtccttgcctccagaacccagctgggatcaggcccaccccaactcctgcccctgaggttccacatgcaacagactatagcccaggtgtgacaggagatttgtgagctgggcaatgtcaccagcaaacaaacatccctaatcatggcagacgccgcctctcagcaacaaggaaggggaagctgtgggccctggaacaacaaggccaggaggggtataaaagcctgagagccccaagaacctcacacactcacaaactcactcactgacacactcacacactcacttacacctcccccagctcacctcctccccaccccagcatggccgcgtccaccatgtccatccgctccagcgcttactccgactcctggcaggtggacgactgcccagagagctgctgtgagcccccctgctgcgccaccagctgctgcgccccggccccctgcctgaccctggtctgcaccccagtga

SEQ ID NO: 27609 - DNA, 2300 bp, Homo sapien
gaatcacttgtacccgggaggtggaggttgcagtgagccgagatggggccactgcactccagcctgggtgacagagggagactctgtctcaaaaaaaaaaaaaaaaaaaaagaatgtttatagaagcactattcacactagccaaaagttgaaaagaacccaaaagtgcattagcagatgaatggataaatgaaatgtggcgtgtccctttgatggaatatgattcagccaagaaaaggaatggcgttctgaaacatacccaaacacaggtgtaccttgaaaacatgctgagtgaacaaagctagacacaaagaccacatattccatgactgcgtctatatgaaatgtgcagaacaggcaaatccatagagacaagcagaatagtattggttgccaggggctgggcatggctgcttaatagtaccggggttccttcgggagcgatgatagtattctggaactaggtagtggggatggttgcacaacattatgactgtactgtcactgaattgcacactttaaaatgggtaaaatggtacattttattttatggttgatcacaatttaaataaaattacacctgccaagggtttctaagaatgaagcccctcgctctgcaatgctggatattatcagcattttaaatcttgtttgctcttacaggtgggagacgtgtgtttaaacctgagaaactttagttattaatgagatcaactagctgttcatctcattcatgcttattggaaatttaaaatttttagtcttctattcatttcttttgtatcttatcctgttttagtggtaaggacttcaaatttttcacattaatcttccacctgtcatggagattacaagtactttctggcagttcatatcttcatttgtgtacccaatgattccttcagggctgtgatgggaacgtcgtggatgctgagctgagctgaggcatgtggaccggtctccagcacccaaccctgccgggtttccaggggacatacgttgtatgtgttctggtcaaggtttatgctttcgttcacatctgaccctctgacattccactgggcattttatacttgggtctgctggctgacgggcttcctttcccattgtatttccacactgtcatggcaggggtacaggtagggggtgctgggtgcagtgactttgtctctcatccagcccttcagtgagcgtggcctgggacagtcactctgatcctaggtggacaatgatgtcacctacagatactagaaattcacatcacatttcaacttcttggcatgtggcttcagccaaagtgcaaacatagagtaagaccaggcgtccgggcagtggggctgactgtggccccatctgacacttttctcatccagaccccaagtatcctccactctccacgcaaccctcactccacacctgcctctccaaggtagaggcccctccccaccctcagaccctgacctgcacccgcccctctcaggacacctgaccagggctccaggggatggcagtccagacccaaaggccagtccccaaaccttgtcctcctaatgagctgactgtccagaggccttgccagaacattccatctcctcagaggaggggaggtcctccctgtcctcctgcccttggcagacatcaggatctcagaagatcccagagcccgccaggaagcgctgtcttcaagcatcttttcccaacacaggcacctccgtcctggctctcccaatctcagccacgccagcccaccccgtgaggtccctgcagacagaggctgggcctcccccaggctgagggcccacgctgggcacagtcacgggacctgccaggtggaagtcaccaggtcagccccagagaggtcacaccttccctcctggtgttcccgggagacaggctcagccaggggcgccggtcctgcccaggaccagccaagtgttaggagcagagtgaggacaagtcatggcaaaggaagcagaaataatgagggtcctcccggctccaaacaccaacacggaaggggagggcattgctgagtctcctgctgggaaaacacaggccctgggcatataaaagccccagcagctgacaggctcacacacacactcactcacacactcactcactcacacacctcccccagctcaccgcctccccactccagcatggccgcctccaccatgtccatctgctccagcgcctgcactgactcttggcgggtagtcgactgcccagagagctgctgcgagccctgctgctgtgccccagcccccagcttgaccctggtctgcaccccagtgagc

SEQ ID NO: 27610 - DNA, 2300 bp, Homo sapien
ccactaatacgatgtcaccctagacttcctggctttcctatcatctcctgaaagcatcaccaagtccttcagtcccagaaagcggattaagcacacagatctcacacacctgtactaataatcactgaaaggatatttaaagagttataaaaaatgaaatcaaaattatctaacaaaaacgggaggctcagcagggtccttcatatgtttgtagaaaagagaagcagacagaaacaggttagggagtaaattggagcaggaccctaatgcactggaataaaatagtcttttattcagaaaactgaatgaactgccaccaatgagcagactatctgatgtccaaggaaacaagaaaaaaacatttaaaaactcaaagtaacatcatcagagtgaatggataacatatttcattcatcacaagatgaaataaaaagtcataaaaagagagaccaggaaagatgaaattattattaaaaatggaaaaacacttcggagataagtctttatattgaaaggctcaataagttctaaccactgaaagtaaaataatgcattagcctagaaacaaaagcgtgacactttagaacaataaaaagaaacccaaatgctcccagagagttaaggaaagagagaaactaaaaaatgacaaatgaccagtatcagactgtcatcggcaacactggacatcacaaaaaaatggtgacatgtgttcatcattttgaggaaaagtaatttaaaaccagaattttatacccagctaaactatcattataaatgtgaggataaagttgacatattttcagacaagcaaggaatcttaaaatgtatgtcctaaaatcaccatatatgaaaaagtacttgatctttcaccaaggcaaaatgaaaattgaaataatccagagtgcagcttcaaataaaacaaagagcctctgagggtggcatggaagagctgaagagacaaaaataaagcttggatccaccagctactgaatctctgagcattctccttacaaggtgtgagggatcgaagggagggccacttagcttttttttttttttttgagacagagtcttgctctgtcacctaggctggggtgcaatggtgcaatctcagctcactgcaacctccacctcctgggttcaagaattctcctgcctcagcctaagtagctgggactacaggcacatgccaccatgcctggctaattttttgtatttttagtagagaccgggtttcaccatgctggccaggctggtctcaaactcctgacctcgtgatccacccacctcagccccccaaagtactgggattagaggcatgagtcaccacgctcagccagcttcctcttatcttatcgtctgtgccgtttttatttcatatgaagtgtacatttttctccatgtttatgttttaagatgctaaaagtaataaaatatatctaatcagtccagaaacaggataggtggaaacagaattgcttcctttggagaaacgttcatctctaaaacctcaactcaacaaaagcttgcttgaaatattttccggccggacgcggtggctcacgcctgtaatcccagcactttgggaggctgaggcgggtagatcatgaggtcaggagttcaagaccagcctggccaagatggtgaaaccccgtctctactaaaaatacaaaaattacagcgtgcctgtaatcccagctactcgggaggctgaggtgggagaatcgcttgaacccagggggcggaggttgcagtgagctgagatcgcgccactgcactccagcctgggtgacagagcaagactccctctcaaaaaaaaaaaaaaaaaaaaaaaaaaaaaaggaaatattttccaccacatttctgtggccaaaataaaaactgatgaagaaacagagccctgcgacatacataccagtttaataagggaaaaacaaagagataaaccagcatgaatgatgcatctccagccaccagctgtaaacaccaacaaggaagaaaagcttgtggagcctcctgttgggacaacacatgccagggagggatttaaaagccccacagccctgagcacctcactcactcactcacacacacactcacacactcacttacacctcccccagctcacctcctccccaccccagcatggccgcgtccaccatgtctgtctgctccagcgcttactccgactcctggcaggtggacgactgcccagagagctgctgtgagcccccctgcagcgcccccagctgctgcgccccggccccctccctgagcctggtctgcaccccagtgagctg

SEQ ID NO: 27611 - DNA, 2300 bp, Homo sapien
ataaataagtttcaaaaaaataatggcccaaggcaccaaatatgatttaaaaaataacaacttacagacccaagaatctcagaacctttaggaggatcaacacaaagaaaaccatatccaagcatcaaatagtaagagtaatgaaaatcaaaaaattattgaagacagtggaaaaaaaagacacttctcatacaaggtataaggttcttgcaaggatgagaaaatccctcacttctcagcaaaaacagtggaggccagaagacaatggaacaacttctttaaaatgctcaaaaaaaatttgccaacccagaattctatacctatgaaaaaaatccttcaaaacatgttgaggtaaaaacctgttcagaagagcaaaagctgggagaaatcctcccctgcagatgtgcactgcaggtgacgtgcacggatgtcctttaggttgactaggacgaggccaggtgggccctgacctgcaggaaggagtaggaggaacaggggaaggtaaaggagcagataaatatcaaagacgcatccttgttcttctgtaatcgactcgtaagacaaccaacttttaaaatggattacttggtgactagctcacaatcactgtggctgccccaattctcttggtttttaagtgtgattctgaactatagcagtgaaaggagttgcctgtgaacttgtggcctcgcccggcttgtccctaggccttaaggtgactcccacatggccacagatcggctctgggtccatagacttctaagttctgtccacagctctgagaccccacttggtcttcagccttggaggggatttcattaatgtggtgtctgacttgtctgaaggcttcttggcaggaatcacccatatccaccaccagcaggcacagaaggacccacacaggagcagagggtgcccctgggagctgcctgggatggacagagtagctctgccctgagagatggctcatcccccaccgtgtgacaccaccgtagaataaagcgctgtggccaatccatcaagagaacagagctggagtgtgaggaggagcgtgtcatccacactcctgcccgctgcttcccaagttcaggggcatcctggaatttcacaccagctcctcactttcccccaagctgcctctgcaggggtgagactgatcagacccacagcgagggagaggaaccagatatgaatagctcatgcccgactccgtgatgggtcctcctgggctccgtctgcagaggaggtgtcctgtggccattagtgctactcgtgggaagtgggcacttctgaggtgtggtgtcaggaagcccactgtggtcacacgcctgagccatgctctgcagacgccaacgtggctgatgttttcgtccatcttctctgtccgagctggttcaggacttcaggatgagtcacttattgaaccttcaagccctagtataatttggcacagtggtaacgaccatggatcccagagtgaaactaagcagtccagatccctgcacctctgcagtggtgcagacacgcacccattgtgcaaaccctctatgacttacaaattgcacatctgtaaaatggggtatcggccaccccgaatgctggcaaagatgaatgagataatcacagcctggcacagtgctagacctctgtgcattactgttacctcaataatcatcattattattccacaatatagagcccagtagtttggctctcgttacttgggaagaccctgatgatgactgagcttctcagtcaaaacggggcccctggtgtagtgagtgtgactgtgcttgtgtgagctccagatggcatttacaacggggggaccttgaacatccatgaggtgggcccctggcctcactgacagcccttcaccagctacccctgctctgtttccaggaaacacacggtctgctgaatgatagggcacccctagctgaaagagtttcctgaactgagtaacctcaacagaaaaacacagaaagatcaaccagacagggcagaggaggaaaaaccacccacgaggaagatgccagggggcttgttgccaggatgccggtagcctgggtataaaggccacctaaggaagcaggctccagaccagccctgtcctctgcgccccccacctgtccacactccatcatgtgccacaccagccactcttcgggctgcccaatggcctgccctggctccccgtgctgtgtccccagcacctgctacccacccgagggctatgggacctcctgctgctgctcagccccctgtgtggctctgctgtgccggcccctgtgtggggt

SEQ ID NO: 27612 - DNA, 2300 bp, Homo sapien
cagctcccaggggcaccctctgctcctgtgtgggtccttctgtgcctgctggtggtggatatgggtgattcctgccaagaagccttcagacaagtcagacaccacattaatgaaatcccctccaaggctgaagaccaagtggggtctcagagctgtggacagaacttagaagtctatggacccagagccgatctgtggccatgtgggagtcaccttaaggcctagggacaagccgggcgaggccacaagttcacaggcaactcctttcactgctatagttcagaatcacacttaaaaaccaagagaattggggcagccacagtgattgtgagctagtcaccaagtaatccattttaaaagttggttgtcttacgagtcgattacagaagaacaaggatgcgtctttgatatttatctgctcctttaccttcccctgttcctcctactccttcctgcaggtcagggcccacctggcctcgtcctagtcaacctaaaggacatccgtgcacgtcacctgcagtgcacatctgcaggggaggatttctcccagcttttgctcttctgaacaggtttttacctcaacatgttttgaaggatttttttcataggtatagaattctgggttggcaaattttttttgagcattttaaagaagttgttccattgtcttctggcctccactgtttttgctgagaagtgagggattttctcatccttgcaagaaccttataccttgtatgagaagtgtcttttttttccactgtcttcaataattttttgattttcattactcttactatttgatgcttggatatggttttctttgtgttgatcctcctaaaggttctgagattcttgggtctgtaagttgttattttttaaatcatatttggtgccttgggccattatttttttgaaacttatttatggttcagtatcgctctcttctctttccaaggttcaaactactagtatgttagacagttcagtactgtctcatatgtcttttcatttttctagattctttctcctcttcttgagacaagataatttctactggtgtgtcttcaggttcactgattctttttccatctgactcctaaccccaaatcccagacccccccagcatgggattctgatgcttggttcttgggtcctcatgatctgaccagttcacctgcacccatggcccaacacccagagtacaggattcctgcctcccctggacataccagtttctgaagcagcatcctcactctctccatggccacattgtctcctcacagacgccccccagaccacccaccagcacccccattactatctcctgaacccattttccccagcactcagccctgtatggaattatttcatgcattcatttcttcctttactcatttattcattgcccactgctagaatgctcttgaggccaagacctcgttgctgctggtacacaatatatatttgttgcattaacaaataacttcttgtatagattactctatggcagggttggctaactttctgtaaagggcagacagcaaatattttagcctttgcatgttacagtctcttccataactattcagttgtgccactatagtgcaaaagaagccacagacaacacataaactaatgacatgctgtgatccaataagagttcatttgaaaaacaggcagtgggccaaatgtggctcacagacgatagtttgccaacctatgctttaaagttttactctacaaaattaaagctcaaaatacattattgcctcaacatcttccttgatagcatgaaacaaaagtgaaacaacgggattcggtactttgagtcgagccagtggtgctatgtgcacggtagtagcctgaaaaaaattgacaaaaaacctgcataacgtcaaaccagaacatcctgtttacagaagaaactaacctcaaggccgaagctatttatggtggagcatgacgcgggaaagtacacgcgggaaaataagatgttgggaaacacagtggaaacaaccacaaggaagacaacagttgtgtttttgtgttacccagatgacaggacccaggtataaagaccaccagagaagcagcttccagacatcaccatcctcctccccagtaccagcccagccacacgccaccatgtgccacaccagctgctccccagcctgccagccaacctgctgcatacacagcccctgccaggcatcctgctatgtgcccgtgagctgccagtcctccgtgtgcatgcccgtgagctgcacgcgcattgtgtgcgtggctccctcctgcca

SEQ ID NO: 27613 - DNA, 2300 bp, Homo sapien
tgaactcttcttcaatctcattctatatttacgtctatcatgtggattttaaaatatcagctattgtacattttagttctagcattcccatttaaaaaatagtttcaatttccctactgagattctctatctttgatcttgagttaattttgtatatggtgtgaggtaagggttaaaaataatcttttgtgtgtggatatcctgttttcccactgccatttgttaaaaagtctgttcttccctcactgaaaggtcttgacagccttgccgaaaattatttgactgtagttgtgagagtttatttctgggctctctatgctattccattagtctatatattggtctttatgccagtaccacagttttgattagtgtagctttgtagtaagttttgaaatcagaaagtgtgactcctccagctctattcttttcttaagattgatttggctatttagggtcccttgagactccacataaactttaggatgggtttttctatttctgcaagaaatgtccttgggattttgacagggattgcattgaatctgtagattgctttggttagtatggacatattaacaatattaatttccaattcatgaacatgggatgtgtttccatttatttctgttgcctttaatttctttcaacgttttgtagtttttgttacacaattattttaattctttggttaactcctgagtattttgttctttttaatgtattgtaaatggaattgttattgtactttccttttgagattatgcttgttagtttatggaaatagaactgatttttgtgttttgcttttgtatcctgctactttgctgaattcatttattctaaaatttttgtgtgtggaatatttagagttttctacatataaaaatcatgtcatctgtgaacacagctaactttacttcttgcttttcaatttggatgctttttgtttctttctttcttccttttaaaaacaattgcctagttgctcttagtaaaacttctagtactatgctggctttgttcccaatattagagaaaaagccttcagtttttcaccagtgggtatgaggcttgctgtgggtctttcatgtatggcttgtattgtgttgaggtagttttcttctattcttagtttgttgattgttgtcatcatgaaagaatcttgaattttgtgaaatgccttttctatatcaattgagatgatcacgtggttttttccttcattctgttatcatgatgccaagttccaagtgatctggtgttgacatctgtaggctcagagattctactgtccctgcagtacagggtgcacatggctttctgctgaacatacccagaagtcattctggcccttggaaccttctatattcagctcacacatatcctgctgtggctgtccatgggacccttcactggcctcacatgcttccctgggaacatgcttggaccagcttgatttccttagagctgtgtctccatgcatgagggccagtggtgttgtctcatcttggttcttaactaggaggatttctcaagacaaagatccatggtcaccactcacaagaagttctctgtgacccacaccctttgtccccactcatcctatggacaagtgatttccatgttcttcctccatctgctagctctcatccagctctaagctctcaggacacccacagatcagctagacacgtcctgttctacctcacattgactgtggagccttcctgagccatgagaggagtgtaaacttctgtggtttaaggaccatcatcacacagagaggaaaaaaatctggagatctgagtttttggaatctcacaaaagtaactcaggtaaaattttaaagaacaaggaagaatcttgatgaagccagtaaaacactctggcaggtttccaagcataccaagagttcgaagaaggtgcaattagtcatgaagctaagggccaaacaaaacccagagacacctacaacagaaaattaagctccaggagacagcactgaggaagaaaaacaaggaagacaggtgtgcttctgtgctgtggggatgcctgggcccaggtataaaggctgcccagggaggccgtccccagacatcactgccctctgcctcgaccttatccagccacacgccaccatgtgtcataccagctgctcctcgggctgccagccagcctgctgcgcgcccagcccctgccagccagcctgttgtgtgcccagctcctgccaggcatcctgctgtgtgcctgtgggctgccagtcctccgtgtgtgtgcccgtgagcttcaagccagcc

SEQ ID NO: 27614 - DNA, 2300 bp, Homo sapien
gtgcccggcccggcctcagtctcagtctttaagcacgttcttcatagatgtagacttccggattgccagttattgttgctcagcattttaaagatgtgtctccactgtttctcatgagaagccagggcgtttttcttatccttgttcctttgtatgtaaagtgtcttcctgtcactgcttttgagattttgtcttcatttttggttttcatcacttcatgatgtgcctggatgtggttttcttcctatttatcctactgggggctttctgagattcctggatttggacgttgttgatttttgaagtcaaatttggtgtatttaaaatttctaactactgtacttttcagttctaggattcccattttaaaaaatagcttcaattactctactgagattccctatttatccattcatgaagacaatgttttcctttaattatttgaacagttttcttggattttttggaagatgtctataatagctgcttacagtcatcatttgccatgtccaatatctagaccatatcaggtttattttttttaacagtgaattaaatttacctatatcttttaatatctgatgatttgttttttgagacggggtcttgctctgttgccctggctggaatgcagtggtgtgatcataactcatggcatcctcaacctcccaggctcaatagaccctcctgcctcaacctaccgtgtagctgggaccacaagcatgcaccaccatgtctggctaatttttaaccatttttttgtagagacagagtctcactatgttgcccaggctggtctgaaactcctagcctcaagcaatcttcccatcttggtctcccaaagtgctgggattacaggcataaacaaccgtgcctggtcaatatctgatgattttgattgtgtatgaggtatcataataatgcatttacagactctgagctgtatcatgtttctgatttttgttctagccgtcagttactggagaatgaccttaatcttgtgcagtttttgttcaacactttgctagggtggatctctgggaagcatctacaacttggaacactctgtatcttggtgggactcacattccaaactgtcttccctaaaaatcctattctgaattggtttaggctttgttcgggctggcctaggcgggtctcactgtagtctgtggtccttactcatttggtgccgggctgtagggggtctcggctggatgtcgacgtggggactggaggggggcttcactctcaatcctctagcagcttctctctggtgagcctgtggttgccttgccctgggaatgcacagccctgccccgttccacagattcacagtcagcttccacagtgtggggcctgctctccacacggatccttctttccgcttctctgctcctcggactccagggcttcagctgcttgagcgctggccccttcctcctcggcagagttgggtcactgtattctgctctgactccggctggtgacactgcattttggaaggtgacactgcattttggaagcctgccccagcagagagctgggaaatgggagtttatctcctaagtttcttctctctcaggaagcacagtctgcactgctggttgacggctgcctgaaaacgagcatctcctaaatctcaactgtatagttgatagagtagccagctttgcatcactcactccagcaggttccccagtatgatttcattgtctatattcagttctggtctcttccccaaagtttctggttgatgcaacagaagttgcggttcgaggagctcttttgggtaccactcatgtctgcttcagcgtagaactaacgaagggaggcagatatcaggcaggtggagctaaaactgcctgtgcatcactgataaatttgggcaggtttccaaatgtaacaagagcttgaagagggtgcaattagtcacgaaacaaagggccagataaaaaacatcatctacgacagaaaactgagttccaggaaacagccttgaggaagaaaaacaaggaagacaacaggtgtgtgcttctgtgctgtggggatgcctgggtccaggtataaaggctacccagggaggccatccccagacatcactgccctctgcctcgaccttatccagccacacgccaccatgtgccacaccagctgctcctcgggctgccagccagcctgctgcgcgcccagcccctgccaggcatcctgttacatccccgtgggctgccagtcctccgtgtgcgtgcccgtgagcttcaagccagccgtgtgtgtgcccgtgagatgccagtcctctg

SEQ ID NO: 27615 - DNA, 2300 bp, Homo sapien
tttaacccagatgtccccagatcctctggccttctgaggtcactctttataatccaaataaaataacaagagacagtgccctccaaactgtggggaacctatccagcctcccccgaccccaccccaactcctgtggctttggggcattcacactctcctggtcctgtcctggcacctttgctcccactggactggacgctgtgctgtctctcaggtacgcaagtgcaccacagactctgatatgtacagaacaggcccctgggtctcggtccccaaagcacctcttctcagaccttctactgagaggtcgggggtcgggtcatgacacacagcaggaaatgaatgcacgactcaggccagaggcatcagctggtcctccctcccttgggcctctccctggccatgccccaacctggctcacactccctcagggttgcaatgacctccgatcccaagacccttttcccaagtccaatttttcctccaagttcctggtcccttgtggtgggccagtttattcagcttaggagaaatgattgttaaatattcagaatcttctcaagcaggttgttaaactgctcatagcttgaaatcagccaggatatgaatatttacaccacggatgacagctaacactccacgccagggttctcatctcaccgcagcgggacaggggtacacgccacacaccagggtttcatctcatcacagggtaatgtttacaacgcagagaccagcagacaccacacaccagggcttttcacttcaaggggcccatccaccacacacctcgagccctcacctgctggtcactgcctgtgggcctgaagccctccaactttccaggcagagccaagcagctctcccttaatctcaggatcctccaggctagatgagccctggggctctagagtcctcaaccacaaaggctgccgaatgtcttcttctcaaaattaaaaacaattcacttcccataaagaaatctttcaacctcctagaacaacccctctgaactctgaactggaccttcccttcacaataatgttttttcacattcccactcataaataaacccaaatcctctctctttagatggaaggagctccttttttatagctagacccaaccgtctgggcacccatcagatattttcacatcaatcccacaccgccatgtctaaaccatgctccgccccgctcttctcacacaatctgggtttctcattctgatttcccatgtcccttgctctctgaggcagcagaggttaatggctaagaacatagaatacgggcctgccaggcctccagtgtatgctcctctgcctgctggtgcagccttttgcacaagttcttcattgtgactcagtttctccatctgtagagtggggataataacagcccctactttacaaggttgatgtatgggttagtgaggtcatatttacaaacttgctcagaatacttcctgacacacagcaagacctatcacatgactgtttgccgaaaaaaataaaaataaatccagctcccaagccattcattggtctacggattcaagataaagagaatataaaacaagaagaaaaacatccttgactcaactgagtgtgaagaaattagggggaaataatagtaagcaataccaaatgacaatcacagaggggcggccaagggctgctgaccttctgtggtccacgcagaggctgggctccagcccattggccggctccctccacggccccacggtcccgctcagttctgacacctggggagcttcaggagctaagctacgctacacggttcatggtgagcatcctcaagaaaccaccccaaacaccaacaaggaaagaagcctggggccttgtgctgggacaacacacacacccttgagagatatataagctcctagcacccagacactcactcactccctccttcccatccagcacccagacgctcactcactccctccctcctgcccatccagcacccagacgctcactcactccctccctcctgcccatccagcacccagacactcactcactccctccttcccatccagcacccagacactcactgtctccctctcagctcccccagctcaacccccagcacggctgcatccaccatgtccgtctgctccagcgacctgagctatggcagccgcgtctgccttcctggttcctgtgactcttgctccgactcctggcaggtggacgactgcccagagagctgctgtgagcccccctgctgcgccccggccccctgcctgagcctggtctgcaccccagtgagccg

SEQ ID NO: 27616 - DNA, 2300 bp, Homo sapien
agtttcgtatgtgaggaggatttccactggctcacccttagttatctttgaggctattactagtgctactgcatcaaatgtaacataagaaaaattttgccggaagggttcaaggcagcttaattgtgattgtttaaattagctctggagtgccacctgcccatcatttggggggagtccccatcccctcaggggcgtggtctcagaggccactgtgacccgcagctggcctgggagcggcctggcccaggacaaagttctcatggattgggacacaaaagaggaagactccatttattccatttacacaacgatcaggcctttcgctcctctgaggaaccacgtcgtccctcattaggttagggttgtcaggaatggtgctatgtggagcgtttccagctgctgagccccagtggggtggggagcccactcaggaagcctctgtcctggcactgcatgcccaccggagctggcagggggtcctggggggtgagggagacacaccccaccccagggctcacttgggtgctggaagaggagtcacatataatgggagaccttcaacctcccttcatatgatgccagttaactcaagcctcataaataggactacgaattaatatctgtgaattaatattaactatgaattaatatccctgggggcagggccgggtaaaagaggaagcgagagggagacagaatgagcctgtcccatcgcaggggctgtttatgggaagagcctccagagccccaggagctctctgtgcctccccactttctccctctccctctaggtctttccccagtctctgtccctctcttcggcccctttctccttccctccctccatctctgtctctctccacaagccctaatgacagggtctatgctcttggaaaactcattgtgtcagaggtcccagagtgggggcttccttctgaaactagcaggagtgtgtgcactttgtgggcctgtgaaccagggaaagccatcggcctcagaccagtttgccagggcctccacaccaggcacagaaacgcagcacccagttgcgttggagatttctgcaagaatgctgcgttcagtgctgtttggagagggtaggggggcagggcacttttgtaaaaagaatacttctagttaatagctgctcccctcgagtggcatgcccattgcagtgtcgagaggtcagatgcgagggtcctcggctctggatgagtgaccatggccgtgccccttccctgagggacactcacccactccttctcattagctgttccctttaaggaccgacttccctccagagggaaattcctgaaacccaacagttgacaaacccacacaccctcgggagggctgggcaccagataaaaagccctccgagggagcccagcccctcctggggatggacggccgctgccgccgggggacccagcagagcccgggacctgccgcctagacccccagcagagcctgggatctgcctccaggaccaccccccaccccccgcagagcacaggacctacctctgggaccccccctccccaccacagcagagccccgacctgcctctaggaccccctagcagagccccgacctgcctctgggaccctccagcagactgtggggacctgctgcccaaacccccagccagagtgcacccgccccacccgctcccggcctgccatggtcgcctgtgcccctggtcctaaaaggcggtgagcccagggagcctgcgcctgagggaaacgggtctcctaagtttctctggcttgttctcagctctccgcagcacgatctatttctgtctttccttttggaaagtgtgctttgccagcgactaatcccaggccgggccgagattgttatcacctgtcacctgcacgcagggcccaagcccatcagggaaatgaagagataaaccagcggctgcagcccaacctgccaggggccacctgcctcccgcaggcagcaaccagaagcttccccactgcgaccgccagggccacctctgtccccgccttaggccgctggcatgtggccgtcgcagtgacccccgggggccccgcggccgcccctggaaaggctgacgcagacgtctgaggagcagccacttccctgcaggctgagcggagccctggatggagcttggcacccaagcccctcatgtctgccctgctgagtctgtgttttgtgctgcccctggcggcccccggccacggcacgcagggttgggagccctgcacaggtaaggcaggggcatgggaactcgggcgggggtatcttgccggggagctggg

SEQ ID NO: 27617 - DNA, 2300 bp, Homo sapien
tgaattgtactgtagcttatttgaaaatgtgtccagtagtaggaattggaatttctgaacagctgtagtttttattttttccttttacattcttccttttacatctttgccataggggttttcaggactacccccccacccccggccacttcactggtggaaatgccgtctgccaatagacttgctgtcctaaccctcgtttaggacttctcatttactgcagatattggtacacataggtagtgggcggctgcctgagagagaccatttggtacttcttttcttatctcaaagctgcttcagtcttgtgtgcacaggggatgctcagaagcgtgccttctttcagggagactggccatgcgcctgagttagatgataacatggaggttcatcacacgctgtctacttgagtgtgtttttggaattctccataataaaaagttaaaaaatacaattgataggtaagagtaattgaagtagtttcaaattggttagctataaaatgcaactatgaagaggattgtaggtaattaaaatactaagattgtattgaggagaaatatattattcagaacaatacctgtgacatggcattagtgacaaatatgaccaataaactgattaccttatgtgactatgtactacaggtggtctgattattatttttaatgttctggtaattatttttaatgctcagataatataaatttttgccttactgtaattggattattttgattttttaaaaattatctttgagaactataggtctaccaatatcataaaaactagtcaataaatactttaaaaacaattcaacacacgtactgaaagttgctggtatacagtggtgagcaaataatagcagaccttcaggagcttatattccaaggacagggatggacattgataggagaatcacacaaacaaaatgcaaagtcacatcaggaagttctgggcagcaccttgcagaggtggtggttggatggaccatctgtagggagtgaagcaggagttacctgagtgattcggggaggaggggcccttcacatgtgcaaaggcccagcgcaggaagtgacgggagaggaaggccggggccaaactacctcaggccttttggtcaatactgaaggttttgatgttttctcctgggagtggcggaactccattgaaagactccaagggagtggcatgaccagaatgatctctgacggctcgctctgggtacagtgcaaaggacaggtgggaggaagccaggcaggccctcggctgtagtggtctagggtagagacaccggcaacttgggaactaaatgtgggcactaaagataaagagatgtgtgtggatccacgagaggtttaggacatggcactgctgggacttggtgaaggaggggctgtggcagggacacaggtgcttttgatgcttctgtggatgcagtgtcaccctatgggaccaactcctggagaaggcaacacagaagtgggaaacttcctgattttgtggatgtggatcttaggtggacagcctgatgtccagggcaagtatgcatctagtttcttccactctccttgaatgagaagttgtggttcagttcctggatagtagagcgttcaccactgaacgttcaccactgaaacaatggatgagtggaaacacataggaccaggtatgaaagacaagactgtttgaaggtaagtgatcgccattcacatttgtgaattttcatgaaattcagagcttattaactcaggtgagttaaataaatgtattttaaaattgctatttctattattataactttaatggctttataattttacagttgagtctatctagatggattactgcatatctgagtatatatggagccatctgagaattcctcccaattttatgtaaaagaggactgattaaatgctgtgaattgaaaatttatttctctttatcagaccttgtgtatctttttaatgatgatatttggtggaaagggatttgatttagacacattgacctacattccaggttgtactgatgataatttacttattattagagtaagctaccaagagaaatcctggtgcctttctttttgtagatatttacataattccagttgcctttatcatagccatgtgaacatatattttacacagaccggttcagggatttaatgatagaattagaaatagctaaggaactagctctgaaaagtattgtaaataatcctaatcacattagatattttgataaaatatttgccagataacctttcatttagtctttttgtatatattgct

SEQ ID NO: 27618 - DNA, 2300 bp, Homo sapien
cgcacccggcctcacgtgcatttttaaagtggtaaaaatgttcttaacccatttgtcaattgtggtcgacgttgaaaaatgtactttgaagttcagtctacgtattttatatcttctaggggcccagaagacacctgctttgagtttggtgtttttcctgccatcctgagtttcccacttgattacccgttaagtcccccaaagatgagatttacctgtgagatgtttcatcccaacagtaagtgcttttggaagtagtttttgtggtaccaggataggtacggagataatattatcagccacctgaaatgtggtatattctatatgtctatgatgtagatctttagaaaacacttcttatgttttgaaattcagccaagtaagcatggtggtattaagcacatgatttcaattttgaaggtcagtttaatatagataaaagacaacaggcacctaaaaccggatgccatttgacccagccaccctacttcactggggaggaagttttacacatgggtgtgtgctcagaaggggttatgctaatctttgtcatagtgttatttgtaatggtgaaaattttgacttaacctgggtttttaacacaagaataaattaagttatatattgtattagtctgttgtcacgctgctaataaagacatattcaagtctgggtaatttataaaggaaagagatttaatggactcacagttccacatggctggggagacctcacaatcatggcagaaggcaaaggagaagcaaaggcacatcttagtggcggcaggcaagagagtgtgtgcaggggaactgccctttacggaaccatcagatctcgtgagacttgtacactatcacgagaacagcacgggaaagatgtgcctccatgattcagtacttcccactgggtccctcccatgacatgtgggaattatgggagctacaattcaagatgagatttgggtggggacacacccaaactatatcatatatgttagaatgtgatgtagattttttaaatgatctaaaagaagaatcaatgatacaaagtagtatttgtgttatattgactgggaaaagcagtagcactgttataatttcctcttgaaaaagaaattcacatgtaaatgtatatataactggaaaagtaagcacaaaaatgttaaaagtgattcttttttcagattgaaattttttttcctttttgtaaatctttttttgccctaaaattaatatatattaattttaaaaggaggaaaaaaataaggtcatttaagtgaattgtactgtagcttatttgaaaatgtgtccagtagtaggaattggaatttctgaacagctgtagtttttattttttccttttacattcttccttttacatctttgccataggggttttcaggactacccccccacccccggccacttcactggtggaaatgccgtctgccaatagacttgctgtcctaaccctcgtttaggacttctcatttactgcagatattggtacacataggtagtgggcggctgcctgagagagaccatttggtacttcttttcttatctcaaagctgcttcagtcttgtgtgcacaggggatgctcagaagcgtgccttctttcagggagactggccatgcgcctgagttagatgataacatggaggttcatcacacgctgtctacttgagtgtgtttttggaattctccataataaaaagttaaaaaatacaattgataggtaagagtaattgaagtagtttcaaattggttagctataaaatgcaactatgaagaggattgtaggtaattaaaatactaagattgtattgaggagaaatatattattcagaacaatacctgtgacatggcattagtgacaaatatgaccaataaactgattaccttatgtgactatgtactacaggtggtctgattattatttttaatgttctggtaattatttttaatgctcagataatataaatttttgccttactgtaattggattattttgattttttaaaaattatctttgagaactataggtctaccaatatcataaaaactagtcaataaatactttaaaaacaattcaacacacgtactgaaagttgctggtatacagtggtgagcaaataatagcagaccttcaggagcttatattccaaggacagggatggacattgataggagaatcacacaaacaaaatgcaaagtcacatcaggaagttctgggcagcaccttgcagaggtggtggttggatggaccatctgtagggagtgaagcaggagttacctgag

SEQ ID NO: 27619 - DNA, 2300 bp, Homo sapien
taaggtactgaacgacgtccctgaaatgttgcagagagcctggttctctgaagataaggtgttgtaacagtcctgttgaggggagagactgccatcttgtttcagcaactcatatttcaagtgacttttgtcacttgaagctgaagctaatcctgatagaagctgtaaaccacatttctgaaaaataataattggaaaacatacagtgttctgcagtaagatgtctgaaaaagatggataaaattatgaaaacatcaagcatatgttgcagtgaacatcacggcattgacagtaatgctttattgcccacatctcccataactggaaaaggggagctgctctcctttaggagcactggacagactgccttggggtgtggggtgctgtctgattagagagagagcagctcttgaatgggggaggaaacacctccactgtgactttttgcacattgcatttgcacaaattactctctgaaacagtctcaaaggaccatgtcattttataaagcactgtggtcatttgaaaagatggaggtagactgaaattttgaattttggggaattttcctacactatgcatacttgtgaagtttgtattgttaaatttcatttgatttgacaaatccgtgttaagagtatacgatgtccaggtacagaggctgccccagaaacaagacagaagtaggcagggacccatggctctcatggaacacgcttttggttagaggcaacagataagggtaatacatttatagcatgccagtaagttctatagtacggtgtgttgagtaggtgttgcagagaaaaaggtatgcggtgaaggccgggtggtgacggcctaggccacactgaagaggcaacatttgagcaaagactgaaagagcaggtgggaagagtcggggacaagagccgccagaaagtgtttccggggagggaagagtcagggactctgaaccaggccagggcagctggagtggagtgagagggagggagggtctgggagtatggcggggtgaccggaggcagagcaaagcactgcaggacttcagctttactgagtgaaatgggcggagcagagtgtgaatgtgatcagacttcttttcaagggatcatctgcaatgctggaaaggaaaagacaaatgatagattattgcaacaaacagccaggcaagagatgcaaactttttttgcaaaggtgtgtgtgtatatacatccttgcaccggacagccacgaagcacctactgtgctgtgaagtcagtaaggatgtgggttaaaatcgctcacctcacagcgggtcaatcgggaaagcacacccactcactacagccattatgggaaaaagggctcgccccttacaggatcctcaactgtggagaggccgggagcccacgcggggcgctggggagtctctcagcaccccaggggttcgggcagggacctgagccgcgccctctctcccgggggtgccctggggtcgaggctgctcggcagagccggcggtcagttcgagccgcgggcccgaacagggctctccccgcggctctctccctcggagtagaaggtgctggacccgaactccagcggagccgcacaacacgtggaggaaaagcgccaggacagctaaccttcccaccttttcaaacctgaaacccggccggctggggacggttggaatgttcagtgcgtacccgcacctcaggccccttgtctccagccccagaccgccccgcgaccatcctccccaccccccgacctcttatctcgtccccgccctgtctccccaacctccatcctcccctccacaacccccgtcctcccgcccttcggccacgcgcggctggcacagaacaggcagttagcgcacacacactggaacaggcgccaccgttcaggaagtctctacaagaccaggaccctgaggcctctggaagtgccgggaccgaaccaaccccgcagagcgactaaggcgagggcaggagccaagagaatcgtagccgcggtcgcgggttgagctcccaccacccggacagcgcgcctcggcgatcgcgcacgcgccacgccccggaagagttcctgggcccgcgacggtggcccggaagcagtccccggtgtcggggcaggaggcacgcgcgcggctgaggcgaggtcgctcggcgcagctgttgcggggccatggcggggaccgcgctcaagaggctgatggccgagtacaaacgtgagtctggggacccgggccgtcagcagcgtcccgcgttcctgctcccgggcccgcgtcgtccggcggggctggggcaggg

SEQ ID NO: 27620 - DNA, 2300 bp, Homo sapien
gacctttcctctcttaacttctccatcatgggagagtcctgtgactttgtctcgcagttctttgcgtcctcagccaggacccctctcctagtcacatgtgggtcgagctttcatgtcagcaatgctgttactcatttgccagttccctgccttctcatgagtcttcttgttgggaccatcgccaggtgtggcgaccctccggaggggctctggccatttgggttctttaccctgtgctcgtggtaggccacggtttttcctgagctctggttcctccgtccattcgatcccctttggctgtgtccttcagaaacctcttggcgttcggtccaccagcggtgtcctttgtgtccccacagctgcgacagagcctttttgcatctttgctgtcacatgaaggattcggggcaggtcacagtgtgggagacagacacagcatgaattgaattcagaccaccattgtcttatagcctggctttttaaaacctaatgtcatctgagcctctttttcccttatccatgactgtagtcacgcatcacttcgtgacacagcaactggcgtaatttcgagcggtaacacatttgggttctgtgtctcatgatttctaagctgcgtgtttctcacttccacaacactgaagcgggctgccgtcatccacagcctgccggagtttagtgtgtctgtgctacctacggtcgtgttgttttatgattaacggtgtcttggagtcgataactctctgaaccctgcctgccctagggcacttccagggccagcaatctgtgggctctgaggcgccacgtcccctcggaaggggctggttgcggagccccctcccaggaccgtctgagctggccacccacctccacatcctctgctgaggccctgggctccaggttccagaaggaagggaccacaccttatgacctgcctgggactggggctgactctcagaccctctccccgaaagacttcagcagccttccccctcctaagtgggggctctagccaagaaagtgaatttttgagtagaagacggtttgtgaagttatggtccatgaagacttgtctccatggctttgcgacgttgctcagttggctgagcctttcccaggcaggacagaaacggctcagacgcttaggttcaaatccaggccctgccatttcccagctgagcctgaagtgcggcctcccccgccttcggccgggctcaccatcagatgagacctccgccacgccccggctggcaccacccgggcactcctgagggacgcaggggtgtccgccctcaggtccgttccatccgaggccctgggatcacagacatggaggccggggcgggccaggcaccccaggaatggcgcccgcaagtccggggaggccgtcctgccggcccagcgcgtttcccgcgtccacgaggtccccgttccgccggcactggcggcgtccagcctgggtttgcccgcgctcgccgacgtggcggcctggccaagctcggcgccgctcaccagcgctgacctgggggtggtttgacctcccagtgcctcagtttcttcacaggtaaaacgggtcttcttgaggacgggtgtggagggcccggggcagccccgtaggagcgttggccaaaggagcccggcctggggctgacaggaaaccgcggcggcagggaggcgggtggcgcccccaatcgtctagggtgctggcccgattcgcgcggcccccgcggacgggaccccgcgggccgccttctccgctctgtccgcggctcctgagagggaacgtcacccccagcgtcctccctcctccgccccaggtccctgcggccatgggcggcggccccggcctcacttcccggcgccccaggaacgcggcccccaggaaaggagtcggggcccgggcgacgcggggaggcgggcaagggtccccagggcccgggctccccgtaaacgctcctggcccgcgccccacagcgccctagggcttccgcgcccgacggggtcgcgcgggacccgccccgtgacgcatctccaaccgcccagagccgcggcccggcctgcgcgcgcccgacgccccggggagcgcgcctcgtgaacgcgcgcagccacgtgacccccgtgccggccaacgggtgcgccgggatttgggggataaagcgcggccccgcgcacagttgcggcgggagagcggcggggccgagagcgtgactcgcccgctccgcgctgcttcccccgcgccgcctccccgcgccgctcgcgcagccatgtccgaggagaagcccaaggtaagcgcggcgaccccg

SEQ ID NO: 27621 - DNA, 2300 bp, Homo sapien
catactcctagtcttcaactctttcttttgaaatagtggagtttccaagaacatttttttgtctccatatctgccctcttttctcacctggaattgacaatgtagttgttctccatgcctctgtcacagtgcagagtgggcaccatgcccgtttggctgctcgttctgctgatgagcatggagactgcagcctgtggcctgcggtgtgacaggagcatgacaaggaaatacgtacacttgctggtgtgttcctttgtccttagtgtgtttattgactcacctgaaacttcaggaaagcactcaaatgggtcatggagggttggtgtatcctgacagaagaaaacgttatttgttgttgttgttttttcctttaatttcggaaacaaatgagactgaaaggtctttaaaaattgataaatggagtctaagttgaagccttgcagtcataggacccagaagtcagggcagtcacattcagtgttagacttaagcaacacaagggcagtttttatctctggttttctagcacatgttttttctgtatcttgtgatgagataagagatagtgatcacttagagaaataaacactgcttgtctttgaagcagtaacaaatgattcatgcctttctttttttttttttttttttttttgagatggagtcttgccctgttgcccaggctggagtgcagtggcgtgatgtcaggtcactgcaacctccgcctcccaggttcaagtgattctcctgcctcagggattacaggcgcatgctatcacacccggctaattttcgtatttttagtagaaatggggtttctccatgtcggccaggccggtctcgaactcctgacctcaggtgatctgcccacctcggcctcccaaagttttgggattacaggcgtgagccactgcacccggcctttcttttcttactatgcaagatgatatgttttcaaaggatagaatagaatgaccttttttcatctttgatgttattttcatgaggactgtaaacattggtgttttcccccttattgaaagcccgctctgttcttggcctgctgggagcaggaggaatgttgggcggtttttctctccctcttcctctcatgcctctccgctgactcagactgaccggtaatccagaggtctgggtctgactcagactgaccggtaatccagaggtctggggatagatggagttgacggtgtgtgttttggagctcagttcttttagttcacacaagacctagttatcagaaagaagctttaaaaatgaaaatcccctgtcacttgtagccactgttgggctgaggagaggaagcacacgcacccttcctcatggatgacttttcaggaaggactcgagtgggtgtgttgggcataccctgtctccttgcccagattgtatttagaaagacctcagaggcgcagaaagttgaaggaatagtgcagtgaagtcctggatgcccttccattctcaacattggctctgtttgccttagcactctctagatctccttattttttaaatttataatacaattgtttgtgttttatttatttttaaaaattgattcagctgggcacagttgctcacacctgtaatcccagcacttttggaggccgaggtgggaggattgccggaggccaggagttcaagaccagcctgggtgacatagcaagactctatctctacttatattttaaaaatgtattgtaaattgacaatcataattgtgttgcctgttgttattttgaccaaaccatttgagagtaagttactattgtgaccctttatctctacattcttcagagtctatctcctaagaaggaggctgttcttcttcataactgaaatttatataattatcaaaatctggacatgtaacattgaatacctgatttaacttacaatccatatacaaatttaaacagttaccccaacaatgtcctgttcccctaccccctgaaatccaggatcacaagttgaatttaattgttgtgtctctttaatctccattgatctagaatagttcctctttgtcttgagaaagccaatttgtggaaggaccctcagtgggtcttaccgggtgtttcctttgattcgattcaggtgcgctttggcaggagcacggcacagtgattctgtcctctcagtatcctccgtgggaggcacatgctgtcactttgtcccatcatcatgttgttctgggttatggtggagataactgatctcttggaagtgccacctcctctccatgagtaatgactcacctgtggggaggtgctttgagacta

SEQ ID NO: 27622 - DNA, 2300 bp, Homo sapien
ggaagaaaggtgggtctgggcgaggtaattcagacaacaaaggataaagagaaggagctgagggaggagggggagaaatttcagtagtcttttttaaattcagaaattattttagataatttttgtttttctctcataaatacctttattagaacttcttttggatgcttccaactaccataaaaaataactctcccaaagattccgttttatcctagagccagcgttttccaattgagcaaacaagtaaattaccttggtgttccaatggtacccggctttggtcactgaaatgttttttctcaagttacgtgagaccatttttctaaatataacgagaggtggcaccataagcactgcacaggaaaccagctggagtttccaaagatgggtcctccctgaaggagaaagacttgttttggatggacgattgcctatgagttctcttaagtgacaaaagactgtaagggaaaatctggttactcaagaagaaagtttagacatgtcaaattgaactcagctccagagcctggccagttttaaggattacaaattttgcttaagccacgattcgctgcttcttttcaaagagaaactgctttccccttctccaaatctgaaggacaaaaaaggttgcaaactttagcaagacgaacaaaaccttaacctcgaaggatagtgttaaccacacacctgcaaacagctgactctttggagaaataacaaacgaaactcttgccttaaaaccaagcctcaactccagccctatcaggtgtggacctgggtaggcggaacagagtctgaacctcagccctgggaggctgccagagaccccggccaggttcccaggcggtccggtgaaccaaggccgctccgcgggtgccagcgctccgagtgccagagaagtggctcggatcacaagaggctggcttcggagccatctgcaggcgcccaaatcccaacctaaaatcaccacagggtcagaatctaatgtaagggggggttattcaaaggcagttggaggctggcccacccggaaacaccggctccagaggaatggagtccgccctcggaagcggggaggggaagggtgccctcgggcaggcagaggcggaggcttttagcaggaccgcggcgtccttcctacgaggtgggcgcagtcctcgcgtttgatggacgacgggcagtgcctgcttcagggaagggtgcggcagtcacggtttcccgtcttctggtctaagcagtgcagaaaacagggaagttcatctacaagggtcatgaactaagaaggcaggaggtttctgtccccggcaccggcgaatcccggacccgagaaaggagctacgggcgcacagaagcgggcggccccggctctcgcggggcttaaagcgcgcagtgtgttcgggttcacacctctaaatgtatttttgccatttcttaagtagccttaaaaatgtccgtcactatttagtccttttatcaaccgaggggcccggaaggccgcagcgagggcgtcggcgagaagccatggaggagaaacggcgcttctctcgggagtttaggtggcagcttcagcagcacacgtttcagcccattctggggccgtttctagtgtggttaacgtacaaaaataaacaaatcccctaaaagtcccacgcggacatcggcgggagcccagggccggacgccgcggtgtggagcgagggcgccggcgcggactatgagggcccaccgcgcctcgtccagggctcacttaagagcagcgtgagcagcgcttgggaccgccgtccgggacgcccgcagccctttaggatggaggccaccgtgacctccgccaccgaagcaccgcgctcccctagtcccctcagccggtcgccgttccccgccgcgcaggcgcaggagccgcggcgagcccctcggtcacgcctcgcccctcggtcacgcctcgcccctcggtcacgcctcgcccctcggtcacgcctcgcccctcggtcacgcctcgcccctcggtcacgcctcgcccatccgcgccgcgcaggcgcactgagcctcagccgctctcctcgctaccaggctcctttcctctatcgcgcaggcgcactgaacctcagccgcgccgggaggcgagcccgttggcgaggggcggggcagatggcgagggagcggggcgagctgctttttgaggctgcgcactcgcatggccccacctcgcaggtccacttccggcgccgcggctgttccgggcggagaccgcttgtgctggagtcggagttgtaacgctccactgactgatagagcga

SEQ ID NO: 27623 - DNA, 2300 bp, Homo sapien
tactcacaccacaggcgggagcagtcacaccgcaggcaggatcactcacactgcaggcgggatcactcacaccgcaggcgggagcactcacaccgcaggcgggatcactcacaccgcaggcaggaggactcacacgggcaggcctggacaatgctgcagctcagggctttgctttcttttcttatcctcatgatgcaacagtaattttttttttattttttatttattttattttattttatttatttttttatttcatttcatttcatttcatttcatttcattttattttattgagacagagttttgctcttgttgcccaggctggagtgccatggtgtgatctcagctcattgcgacctccgcctcctgggttctcctgcctcagtctcctgagtagctgggcttacaggtgcccaccaccacgcccagctaatttttgtatttttagtagagacggggtttcaccatgttggccaggctggtctcaaactcctgacctcagtgatccacccactttggcctcccaaagtgctgggatcacaggcgtgagccatcatgcctggcctgggttttttttgttttgttttgtttttttgagacaaggtcttgctctgtcgcccaggctggagtgcagtggtgcgatctcagctcactgcaacctccacctcctgggtttaagtgatcctcctgcctcagcctcccgagtatctggtactacaggcatgtgacgccacaccactctaatatttgtactttttgtagagatggggtcttcttatgttgcccaggctggtcctgaactcctgggctcaggcaatcttcccacatcggcctcccgagtactggtattccaggcgtggcccctgggcagctcagggctttttacccccaagaacctcttaccacacatcactgaccacacactctggggaccaagtgcaaaactgcgttgaggaccgtcccagccattttgcaggtgcagaagcccctggggtgagcccagtgcgtggagatgccgtggcacaggtcctagccgtgccatgtctggtcttcttgcccaacagaaactcaccgagatcatccccaagtcagccgtgggggagctgtctgaggactccagcaatgtggtccaactcattaagaatgcttacaatgtgagtctcccgcaccactcagctgggacccatggggtggccagcaatctccccactgcaggtcagctcctgctgcaggtcagcaggagggtggtctgggaggaaagcccctgccccgtgggccagctgcagcctcccgacctgccctcaggcctccaggacaccctggcccggcacttccacggggagctctgggtcctctctcgttgatgttgtgggcgatgctccctgaaacctgagctccggactcttcattccagactcttctctgcgggtctctatggagaagggaggtggacagctctggtggcaaacagtgcagctggggcaggaggaggccacaggaaacccccacagtggacttgggccctgggaagacaccctggggggtggaattcctcttgctctgttcacctgtcctgggcaagctccagagaagcccttaacccctgaatttctccctggtgcacggcccatcgagctgcaccctgggctgctcccctggggagcccatggccctggtgggcataggtaggcataggtgcgcactaggtgccattcagggccccaggcaccagaggtcccgactgctctggaaatctacccccaggtgagagatgttctcagaattctggcctggatccttctaggccaaaggtcctgctggcttgagggagctcagcacgttagcgcctccgacaaacgttgggtcattgaattaaactgaaggcccgtggaggaggtgccatttgcttctcgtagcctcccgtgagccccaaacccccagagcagaccctcctgggtgccagccactgcccgaggtgtttctgtccttacacagaggatgcaggtgacgccactgccctggccattcacccgatgcccctatgaacctgtccctctgcctcctctcaatttccgtctgtctctcagtctttgtctctctttctctgtctctctctgtctgtctctctctgtctctgccccatctctgtctgtctctgtctctgcctctctctgtttctctccatctctctgtctctggctctggctctgcccatctctgtctgtctctgcctctctctgtttctccccatctctcttatcgcttgaacaatttatgcagctcctgccctgtgctag

SEQ ID NO: 27624 - DNA, 2300 bp, Homo sapien
tgggggagtcctgaagccggctggaccctgcaccctgggggagtcctgaagccggctggaccctgcaccctgggggagtcctgaagccggctggaccctgcaccctgggggagtcctgaagctggctggaccctgcaccctggggtagctccagcacgcacagggcctccgatcagctgaggggctggtgggcactcgtggcaccgaggtcagtccaggcgcaggactttgagggggcccagatggagagctggaactggcctcggcctgaaccacaacccccaacgatcagagatatgggggctttcagacacagggtgggcccaatgtgaaccaaaaccacctcctccaggaagttacagcagggtgcaggttctgtttttgaccccaggacgggaaggatcaagggttcccttttgacatttttgtattctgattataattttgctgggaaccagggaatgaggtcactgccaaaacaacaggaccttggggcttgttggggcgtctaagctgtgggatcctcagatgggcccctggtgggtgttccgttggcctcagagcccccagcacaggtgcagggctttcgggggatggaggggagccagggcctgtggctgagggcacccgagcctcccgggccacagcacagcacccagcgctgtcttcaaagccggcaggccctagtttggggctctgctggcttgggtctgcccactgaaccttgggtggccctgccagcaccacccgagggaagggtgtggggcaggaacgccccagcagcctgggaggccgtgacaggaactggcatttgctggaggaggtgtgttgatctttgcttctgacaacagccccagggtaacggaaatgtcttcctgcccaccatgacaggaaggctcctgggtaccccttctcagtacctctccaccttcttggtgccagataaaagggtcccagccagctataatgttctcaggtcctgggaggtcagacccaggggcccaccccacctaggaagccctaagaccccccaaggagccgacctaggcctggtttgggcacctcccggatggagggaagggaacccaggggtggaacggccctgctgcccgctaggaggtgctgccggcctccagcaccaggctgaggcctgcttccgtcattttgcctctggggccgagggcctgtgagtgaccactgagccgcccctggctgtggatgcgtgggttaaggacggggtgggtgtgtatctggaaacaaaagggcaggaccccggcaactggtggcttgggcaagtcaggtgactttttttcccacctggcagggactgcagggctcctgggcaggcctagcacacagcttggcacccgcgggcatcaagccagctttctcttcctggcacacagcctggcacccgcgggcatccagccagctttctcttcctggctatgtttctgccacagagagacagggccaagcccagctctcctccaagcacaggctctgctcacggaggacctggggcacactggggcagagtgcacacaccgggtgtgtggggttctggtgtttgtgtgcgtgtacatttgcacgtgtgtatggtgtgtgcgtgtggtgtgtgtgtctgtgtggtgtgtatgtgtgtgtacgtgtgcatgtgtatatttgtgtgtggtgtgtagtgtcttgcggggagtatggtgtgggtaaggggtgtatacatctctgtgtgtacatatgtgtggtgtgatgcatgtatatgtgtggtgtgtgcatgcacgtggtgtgtacatgcagtcaggcacacatctgtatgcacgtacacgtgcatgtgtggtgtgtgtacacgtctgcatgtgtgtgtgtgcctgtgttgtgtgcctctgcaggggcccgctgcagctgtcctgggtgcctggctgagcaggtgtgctgcccgcactgctgagcccgggatccctccctccctggctgttggcagctgggcccagtgcagctgtgctggcctgaccctaacccaccccctgcagcagggacagggccccagctccttgtcccaggccagctggaggggagcttcatgggtggtcagccccaggggttgggcctgagaccgtcaccaagaccccttccctccacaggacatgctgggcctgcgccccccactgctcgccctggtggggctgctctccctcgggtgcggtgagttctgtgttccacggaggggactccacgcgtgacattccaatcagggagaacagggcctgccctcactttcccatagacagaagttcccggga

SEQ ID NO: 27625 - DNA, 2300 bp, Homo sapien
tgctcatggaggagcaacagtggggagaaggtggctccccaccagcccccttcctgtggtcaaggttggggtgccgtggtctctgagccaatcctgctggaatcaaggtgcaccccctctccctgtgggcaggtgggagtgcccggggtaactgggcaccaggtccatatcttgctgctgctggggccctcagtttccccatttgagggtatgaagtgtttgcatgccactggtcacgactgtgttaggggcggagacctcatgtctgcggccccagggagagcgtggagctggggtgtgagtccttaccagcctggctggggctgccaggggaggtctgcaccccctccccacttggcgcagctgcgacctgggggagtcctgaagccggctggaccctgcaccctgggggagtcctgaagccggctggaccctgcaccctgggggagtcctgaagccggctggaccctgcaccctgggggagtcctgaagccggctggaccctgcaccctgggggagtcctgaagccggctggaccctgcaccctgggggagtcctgaagccggctggaccctgcaccctgggggagtcctgaagccggctggaccctgcaccctgggggagtcctgaagccggctggaccctgcaccctgggggagtcctgaagccggctggaccctgcaccctgggggagtcctgaagccggctggaccctgcaccctgggggagtcctgaagctggctggaccctgcaccctggggtagctccagcacgcacagggcctccgatcagctgaggggctggtgggcactcgtggcaccgaggtcagtccaggcgcaggactttgagggggcccagatggagagctggaactggcctcggcctgaaccacaacccccaacgatcagagatatgggggctttcagacacagggtgggcccaatgtgaaccaaaaccacctcctccaggaagttacagcagggtgcaggttctgtttttgaccccaggacgggaaggatcaagggttcccttttgacatttttgtattctgattataattttgctgggaaccagggaatgaggtcactgccaaaacaacaggaccttggggcttgttggggcgtctaagctgtgggatcctcagatgggcccctggtgggtgttccgttggcctcagagcccccagcacaggtgcagggctttcgggggatggaggggagccagggcctgtggctgagggcacccgagcctcccgggccacagcacagcacccagcgctgtcttcaaagccggcaggccctagtttggggctctgctggcttgggtctgcccactgaaccttgggtggccctgccagcaccacccgagggaagggtgtggggcaggaacgccccagcagcctgggaggccgtgacaggaactggcatttgctggaggaggtgtgttgatctttgcttctgacaacagccccagggtaacggaaatgtcttcctgcccaccatgacaggaaggctcctgggtaccccttctcagtacctctccaccttcttggtgccagataaaagggtcccagccagctataatgttctcaggtcctgggaggtcagacccaggggcccaccccacctaggaagccctaagaccccccaaggagccgacctaggcctggtttgggcacctcccggatggagggaagggaacccaggggtggaacggccctgctgcccgctaggaggtgctgccggcctccagcaccaggctgaggcctgcttccgtcattttgcctctggggccgagggcctgtgagtgaccactgagccgcccctggctgtggatgcgtgggttaaggacggggtgggtgtgtatctggaaacaaaagggcaggaccccggcaactggtggcttgggcaagtcaggtgactttttttcccacctggcagggactgcagggctcctgggcaggcctagcacacagcttggcacccgcgggcatcaagccagctttctcttcctggcacacagcctggcacccgcgggcatccagccagctttctcttcctggctatgtttctgccacagagagacagggccaagcccagctctcctccaagcacaggctctgctcacggaggacctggggcacactggggcagagtgcacacaccgggtgtgtggggttctggtgtttgtgtgcgtgtacatttgcacgtgtgtatggtgtgtgcgtgtggtgtgtgtgtctgtgtggtgtgtatgtgtgtgtacgtgtgcatgtgtatatttgtgtgtggtgtgtagtg

SEQ ID NO: 27626 - DNA, 2300 bp, Homo sapien
agcactcggagctgagcgtcccctctcccagcactcggagctgagcattcccctctcccagcactcggaggcacctgcagttgctcagctgttcattgagtgctgggagtggaaactcatacgctgagcggcagtgacgctgcggagctgacaaaccccacagcccgcccggtcacctgcttcaccgagggccacagcccccccggggtcaggtggccacaggggtcctggccatgtgggacatctgttctgtggccctgctcaggatggcacccggcggggactggccctggggccgaggcatgggctcagccgccgccctgcagggacgtagccagggacctcttcccagcagagggactcccccactcatccccagaatactgaggggcacgctgggtgccaggctggcagggaccctggggattctgctgtgagctggatggggaaggagttccttcctaaaatgtggagtctggaggccactcttggtaaagtgctggcccccggggattctgcagtgagctgggcatggattctgcagtgagctgggcttcactcatggtgaaacgctggggtgacggcagacagcccagagcttctagcagctcatttctgtgaagcctccagaatccggcctcagcccccaaacccgcaggcgttgcgccaccgtcacggggaaggcgagtgacagcgagtgtcccctatgcccccacagctcgctcccaggctgagctctccggccatccccccccttccccattgcagccatgccacccctccttctccccacccaggaactgacagaggagaggggccccggatggacagggacagcagggcagaatcccagctcccagatccaggggaggggggattgggtgtggggacggtggtgcaaggggtggtgccaggggtggaggatgcatggggagggctggccccaagagtgcagtgttgggggaagggggccaggtgggcctgggacccaggggcgtggcttcaatccccctcccaccaggaccttgggaatggcctccaggagcctgttgtggggaggccagggtcaccagctgaaccaactcgaccagaatcgcacagcggtgcccgctcccctacagcaagacgtcacccaggggtccccacggaggaggcagggaagctcgagggtcccagaggagcatggagcatgtgccacaccacaccacactacattacacatgtgcaccatacatgtacatacaacagactccccacatcacatgcgcacactcgcacaccatacatgcacacacacacaccacactacgctatgccacacacgtgcaccatacatgcacaccatgccacactacacacacgacactacacaccacgaaccacaccacaccatatcacacaccacacactgcgagtcgatctggagatggaatcgctgtagccaggcggggcagcatgcagacaggagggcctaacacaggcaggcgcagcaggttcacagaggaggccccgggaacctgcctcctgcccagcccggagcaccaggaccccccagccgtccccctaggggcttgtgggcccagcctcttcctggccttgccggcctcacagccccttgtcctcccatgccggccccatcctcagccgcaagcgctcccagcacaccatgtggctctgctcttggtggcaggcacttccccttgccgggtctcaaaggggaccctggagcagacggtctggagaccccttcctgccagacacccctgggccggggctataagcagggccaccagggtcactccaggctggggcaggagagtgcttccctccaaaaatcaccgtggacatagcggggcctctgcacactcaccctcggtgtgctggagtcctcggcggtgctcctggctgggcgtgggggctttgctaccagtctgccctgggtcacgtctagaaacctcagctggaggcgcgggtcgtaaagtcctgacacttcctgttcctctcagctcctccttggaggaagtggtgggttgcaccaccgtggcccttcacccctgcccctctccgctctacagcagctctgatgtcagagagcggccccttgagacaggtgggacatgtcatttctcacatgaggtcccggcgagaaggacctgcttccatcagattcacacttgggagaggggcccggcctccaggagcgccaggcagaaagggcacccattaggaagaagaacacagaggccatgggagtgaaaagtttgatgctggaaagcaacagtagcacattctgctacaga

SEQ ID NO: 27627 - DNA, 2300 bp, Homo sapien
atcaagactaattcattaaaggtgtgtgcataacgtctgctgcgtccgtgacgttcgcagcgagggtcattgcttactttaagtcatcagcgggtgtagtagaatggtattctctttctgtccttcttcattattttctaggctaagtctgtaatgagaagatacccttgacagagaacatttcattggaacttgttttgtctctttatttctaaaacccaacgcaagaccttgttgatttaaaacaagaaaatgtaacccattcacaggtgctgtgattcctgatgggtttgaaattattcccaatgttttattgtttggtttttatttacctttcttgtttgttctattttcccttacttttttcttttaaaggatttgcctttttttttttttttttttctcagttacccagactggagtgcagtggtgtaagcatggttcaccgtagcctcaacctcttgggctcaagcaattctcccacctcagcctcccaagtagcctggaccatatcgcgtgctaccatgcctggcgaattcttagaaaatttttttgtagagatgagggtctgggtctccaaatgttgcctaggctggtctcgaactcctgggctcaagtgatcctcccacctcggcctcccaaagtgctgggattacaagtttgagccaccatgcccaaaataaagatttgtcatattttttttcaggtatatacatgctatttttattcttaaggagactcttgaattgttagcatatatacttagatattttctatcaaaatgcccactgacaagcatctatattcctccccagataggatggaacggcaatgtgctccctggcccctcccaacccagtcctctaggcgttttgtttcacagcgttaatattcttaccactattttttaaatcaacaggttatgacatcataatttttacttatttctttgcccaactttgtatcatctgctcttgtatttctcatggatttcttcatgtctatttctgcaagacatctttaaaacagagtttaggagccgggagccatggctcacgccagtaatcccagcactttggaaggcagaggtggatggatcacttgaagccaggagttcaagaccagcctggtcaacatagtgaaaccctgtctctactaagaatacaaaaattacccaggcgtggtggtacatgtgcctgtaatcccagctacttgggaggctgaggcaggagaattgcttgaacccgggaggcagaggttgcagtgagctgagatcacgccactgcactccagcctgggtgacaaaagcaaaactctgtctcaaaaaaaactgaaaacataaaaataaataaataaataaaacagagtttagggtagtaatgtgtctgagtccttgctctgaagatgtctgatttgggttttttttctaggtataatctctttccctcctcttcctcctcctcctcctctcccttctctctctctctgagcctgtagtattttccctttcgtgttctgtggtatcctcctaatgtccctagttaacaggacctcatccatccatccctggggtgttcagtggcctcgcaatccacgtccccgcccagatccgcagccttcctcctgtgacctgagtgtctcctcctcgctgtccctgttctgtcccctcccgccctcacatgcaggtggatgtcaatgcgtgcacgcacccaggttttcttgcctgttcccacctctttatcctccttggctggttcctccgctccattctctggctcaggaatttgctccccagggtttttcattccgctctgtagcagaatgtgctactgttgctttccagcatcaaacttttcactcccatggcctctgtgttcttcttcctaatgggtgccctttctgcctggcgctcctggaggccgggcccctctcccaagtgtgaatctgatggaagcaggtccttctcgccgggacctcatgtgagaaatgacatgtcccacctgtctcaaggggccgctctctgacatcagagctgctgtagagcggagaggggcaggggtgaagggccacggtggtgcaacccaccacttcctccaaggaggagctgagaggaacaggaagtgtcaggactttacgacccgcgcctccagctgaggtttctagacgtgacccagggcagactggtagcaaagcccccacgcccagccaggagcaccgccgaggactccagcacaccgagggtgagtgtgcagaggccccgctatgtccacggtgatttttggagggaagcactctcctgc

SEQ ID NO: 27628 - DNA, 2300 bp, Homo sapien
ctggtgaggactgcagtgaagcccagctggccaccccttccggggcctctgttctccccagggccttgcagcctctctgggcttggcattgctatggctaaagtgtgaaagggtcatgcaaggctgtcagccctgcgtcccccacgtgtgactgcatggggtcccacccaaatcggagtaatatacccactcagcctcacccctgctctgctggccccagggaggaaatgctcatcattgcatccgcccaccccacccctgcagtgccacattcaccagcctcgctgggcatcttccccctccccgccctctgcccctggcgcattcaccagcctcactgggcatattctgccctccccgcccctgcggtggcatattcaccagccccgctgggcatgtcccccaccctgcccctgcagtgccacattcaccagcctcgctgggcatgttcccccaccctgtcttctgcccctgcctcattcaccagcttcactgcccctagccttccctcactcagcagcctctgggccccagtccccactgccactccgtgttcccaggctctgcactcccaacccttcatctgctcatccctgggaggcagacctgtcacctcatttacaaatggaaaaaggtgcctttcaggaactgacctgaggctgtgcagccccctgcctagcaggtgcctagcggttgctgctgtttctatcagaaagaaaaactaacagggggagggaggggggagggctgccctccagccttcaggggcttcctgggtggagggggccagacctttctggtcaggtccctctgggttgagaggtcatctccgggacaggactcagaactggaagagggaggggcagcgaggaaaggtccctgcctggcggtgctgccttccatgggggccttgtggggcagaggctggaacacccacttggggtttctggtgggaactggggagcagggtggggagcctgagtcccctcagaggaggagtcattttgaaactggagggagaggctaaaagaggaggctgtggagagacctagtgttgaccagggtccagcgtcagtgtttaggttctctagctcttccccacctccaatgtcctccatgtccgcaccattcccacgtgcctgtgtcccacctcttctcccacacactgtccccactccccatgccccattcctctccagagaatcactggtctagaatagagacctacaaacttgggcccttaggctggccctccacctgtttttgtcaataaagttttattggaacacagtcatactcattcactttcagaaggtctatggtcactctgcagccacaatggcagagctgagtagtcgcggcagagaccatttggccagcaaagcctaaaacacatactgtctgcaggggcttcctgggtggagggggggtgaaccttcctggtcagatccctctgggttgagagctcttccccctccagggaagagcttgcccacctccgcatcgcagctcacttttacggagcactttctctctgttctgtgccacccgagcccatatccaggcccagtgagctctgcacattggtcatcccctcactgcagggggaggcccagataccacccacaggacacatttgtgtgtgaagtgccacactagggcccagaagggacagctccccaccaggtagggacaaagcaggggtaaagggaacacatgggccggcctatgagctggacccttcaggatgggaaatgcgtgggccgggttgcagagggggttggtgaggggctcggggacaacacaggtgtgttcagagacaaggcgggtcattagatttgatggaggcttggggtccctgagcttaggaagcccccatggaaaccaagtcacaggcatccagggtgaggaaggctgcccacaggcatccagggtgaggaaggctgcccacaggcatccagggtgaggaaggcagcccacaggcatccagggtgaggaaggctgcccacaggcatccagggtgaggaaggcagcccacaggcatccagggtgaggaaggctgcccacaggcatccagggtgaggaaggctgcccacaggcatccagggtgaggaaggcagcccacacttttcttggagacacatccccaaagaagtcctcacgtggctccgtttgggcagaaaccatgaattgaacgggaaaagaaatatgtcaagtatcagaaagaagagtggcatgctttgacagcaagtggactccgagtccagggcagagcctcagttagggtaagaggcacccac

SEQ ID NO: 27629 - DNA, 2300 bp, Homo sapien
tgatgtcacacaggaccctcctaaggaagcaaagacccaaagaagtgacgaaacctatgtgcttttgcaggaggctgaacaaagaggcagttgtggaaaagtaaaccgtgtggggaggcttaagaacgacaggaattactttaattactttaatgtctgtacagaattctgttggctatgacgtgcttccctgtagaggaatctttcttcgcccggtacagggaaggcatctttcacctgagcgtttttatctcctgtcttcaggaagaaaaggagagatccgatgatgctcttgcctgtgccatttttcaagtgccttaggtagaagtgattcttatgtcaaagtggcagagtgagccacccttcgatcccaatggaaacgtcctaaaaggtgttgacagtgaacagttccccttcctcccctgacgccagagcctagttctctgcccacttgaaaccatgattatgggtttcctatcgcaattctgtagacttttatacaaaaagagttttatctatgagaaaatatttttcagtgatcctgttcttcacaccaattaaacctgactgttccctgctccgcacctggcttctctcacgtcataaagatcttaccatttgcccctcattcctcctggcactccatagcggctgcagaggacactggatgtgacatggctccatcagttcccacatggcttgttccctctctcctgctgtaactgacatgctggcatgcacattgccttatacatacaaacagaagctttccaaagagaagtttcaggaaattcacgtggaatgtttggcagttggtgtatataaaaagctcaggcctggccgggtgcagtggcttacacctgtaatcccagcactttgggaggccgaggcgggcagatcacaatgtcaggagatcaagactatcctggctaacacggtgaaacgctgtctctactaaaaatacaaaaaattagctgggcgtggtggcgggcgcctgtagtcccagctactcaggaggctgaggcaggagaatggcatgaaccggggaggcggagcttgcagtgagccgagatcgcaccactgcactccagcctgggcgatggagcgagactctgtctcaaaaaaaaaaaaataagtaaaaataaaaaactcaggtctgcttctcccttcgtgttgtacccaggagtggccagaaggctcctctccaggcctcacagagggaaacactggtctagtgagagacctgcgtcctgcccatcaggaccgaagcggcacgcgtgaggatcctgcaggccaagagacaacagcgattacaaaccccagtcccagccttgcagctgaccttgcaggtgacgccctgcctgggtgtctcggtgcagctgcacatcaggggcctctgctggacagaagctctgagtccacacttggcccccaggcgctggagctggtaggtgacatgttgcactcttatttgggattctgctacctctttctgttcaacaagtgaagcctcagaatgcagagagggggctaggagaggcccctgcagacatgctgggcctcatggggcctcacagctgtccagagccaaaccatgcggtgctgctctgctccagccatggccagtggtgaaagggacagagggaatcactgatgcctgcaaggatgctctgacccctcaggaaggctgcccaggtgcccaccttcagggagacccacagatgccccatgctgggggggcacagtatgagtggctgaatccttgcagagccagtgctaggcttggacccctgcagatgcagggggtgccccagggagggtctccatggactcagagcctgcctctgccctggactgtctcctgctcctgctctctcctctctgcccctggagtggtgtgtgctggctctaggtcagtaggaggcttcattcagaaatgcctttcagcatgctgcccagaccacgtctctgtttcaggagcactgccacgagaggggatgctgccgtggctgcgccagcttcagccctttccctgcaccgagatgtcccagtgagcggctgggtgctcacagttcccgttgggccatcagaggaagatcaaagatcaaccctcccccatgggctcctgcctgcctgccaggtgggtttcctgcctgtctcccagcccccaagagctccacggactctgccagtagctgctttaaaggagggagggagttttctgatcctctggacatccctggggctggagctatgggctgagccataggagagccagcccagctccctgggggttgggg

SEQ ID NO: 27630 - DNA, 2300 bp, Homo sapien
cattaaccctttcctgacggtagagtccttgtggcctaatcacctcttaaaggtgccacatcttaatactagtatgatggcaattacatttcaacatgggtttcagaggggaccaacattcaaaccatagcagtctcaaacactgggctggcagtggaagaggaggctgatctttaaagaatataaattttttttttttgagacggagttttgctcttgttgcctaggccagagtgcaacggtgtgatcttgggtcattgcaacctctgcctccccggttcaagcgattctcctgcctcagcctcctgagtagctgggattacaggcatgcgccaccacgcctggctaattttgtatttttagtggagatggggtttctccacgttggtcaggctggtctcagactcctgacctcaggtgatccgcctgcctcagcctcccaaagtgctgggattacaggcgtgggccaccacgcccagccagaatatgttctttaaaaacaggcacaattccatgaagtaaactcacattggaatggttaacaggtaaagtgatccagctggctgaaacaataggcattcaccggcatccaaagtacataaagatgagcactttgagactgcgccactgcactccagcctgggcgacagagtgagactctctcaccaaaaaaaaaacgtgagcactttcacctcaagagtcgctaggctcagatgctgaatgcaccctgaaggaactctaaagataccagcctctggagttttcacagccaacagcattcctaggtagactggttgagaacacggctagttggagggtaaaaagaatgacttgtgaatgctcactaggtctttgaatatgtaagtagacacgacttcaagccagttgctcagccttgaatatatcctagagtccatcaccttgggctgtgagtggcttgtgcggtcatctgtccatctctcagctgggcgagaaacttgatgtcctttctgagaggtggccctggctctgcctgggacctgctactcttctccaaagtgcattttttgtgggtgggttttcactgtgggtcctgggcaggtgagtgctggtgcccagtgttggggagcagggtagatagaggtgtggctgctacctggctgggcccggacttggcagccttccttcatggccctcagccacagcctgttccatagtttgttctcgatgtgtcagctttgtgttcccatgagaacaatgggctccttgaggacaggcattgcatcgtacctgtggtctcttccctaacgccccccagtacgcccagcatagacagcacagggtgcaagcagtcagatgagcagggctcccgttcccagcacgggacccagcccgttacctcgctgctatgtttcccacgtaaacggagcaatacccaattctaaagaactgttctgaggactaaatggaatagtgtaaaaaataaattgacatgaagtgaaggtcaattaaaatgcactagcttggccaggcgcagtgtggctcatgcctgtaatcccagcgctttgggaggccgaggagggaggatcgctggagcccaggagtttaagaccagccagacaacacagcaagatcccggctctagcaaaacattaataaaaattagccgggcgtggcggtgcccaccggtggtcccaccttctcgagaggctgaggcgggaggatcgctcgagtcctggacgtcgaggctgcaatgagccgatttcgcgccattgcgctccagcctgggcgacagcgcgagactccttctcaaatatagaattttaaaaaggccatctcgactgccgcgggggtcgcgtcctctccatccccgaccttggacgcaaccccgggcttgggtcccccacgatctagacagaaactcgttgtttctcgtgctccgcgccacccgcgtcctccggtctgtttctcccaggtgcgtcggtgaaaggcggagcgccgccaccctacacccgcgaccctgcgcccgcccgagccgcttccgggtacttccggcggccgcggggctcccggcagccgcggctcctgtttccgccgggcggcgagaacgcaggaccagcttccgggaggcgctccgcacgtttgccgtgctccgccgggaagatggggaaagtgagggggttgcgcgcccgagtgcaccaggctgccgtgaggccgaaaggggaggccgcccccggccccgcgccccctgccccggaggcgacccctccgccggcctcggccgcggggaaggtgagctggggaggcgctggccgggggct

SEQ ID NO: 27631 - DNA, 2300 bp, Homo sapien
ctgagaagctgaagctgctcctgccccatctctggtgtcctgacacggagctcttgcccaggagcggtaggctgcaaaaaggaagaactccatagctctgccagaagggactcgccttgtctgcagctcgtgtgagggctctcacgcctaagggtgttgctgaccaggaaggagctctgggtggtgacagatgcagagggcagggtgcccaaggctcctgggtagacagtaagcccctctgacccaggaacaactcccaggaggtcgcatccctggcagtctggaggctgtgcgcatgttcaaggacgcaccctaccaggagtgagcagagggactctgtaagctactagtccttggctgtgcctctgagggcagaaatgaaggtcaaaaatgtgaacacgctgaatctgacagccacctccaagccagaggtatccagtggtaaaaggcaaaaaccccctggccaaggaggctttaagaacaattgctgaccagtgaggagcttaagcagatccaactagccaggctaaaagagaaaaacaggaagaaaaaaaaaaaaccaagggggcacatcagaggctgcacacagccagaaggggacaaggagagaggtcacatagttcagttccagatcaataaacaaagtaatcaagcagatactaatccctggttgctacaggactatccaaaatgcccaattttccacaaaaagtgatacattcaaagaaggcccacctgctcctacctgccagcatgagccaggcaacagaaactgctttgagcagcccacatgtaaagaattcagagtaggcattataaatatttctaaggactaaaagagaccgtgtctaaagaactaaacgaaggtataatgacattctcacatcaaacagaaaacatcagtaaagagtattttttaaaatgaggaggaacaggagaagagaaagaaagtaaataaattctggagtcaaaaaaaatgaaaatttcactggaaaggttcaaaagcacctctgggctggcagaacatcagtaaacttgaattaagatagattatgccatctgaagaaaagagaaaaactgagtgaacagcgcctcagagcactgtgggacaccattaagcacgacgtacatatttataatggaagtatccgaaagagaggagtgacagaaaggggcagaaaaaaatattcaaggaaataatggctgaagacttgccaatgtaacgaaaaacattaacctacacacgcaagaagctcagtgaacacgcaaaataaatgcagatacctacaccaagacacatcggtcaaaatatttaaggcaaaagccaaaaaaaaaaaaaaatcctgaaagcaataattccactcacatgcagtgtctagaataaagacaaaaggtagattcgtgcttgcttagggctgagggggatggagaaacaggccagccgactgctaaagggaacggggtctctcttcagtttgctctccgttcttctctaactctgggaacgtcctttcctttccggggagctcagtgcgattcaggaacctctggggtccgcgtggcaaccctggaccgcagcgggaggttcctggctctctcccctccccgggagcggcgcgagtccgtgtgcccaggacggcagcgcagagcggagcctcggagtttacgacgcttcgcgaagcaagaaggtcgcgtctgtagcgcagcaaatgcccgcagagcccgagggaaggccggggtcgcggaaccctcccggaggcggcgccccgcagctcacccgccctcggacccacgcggcagcccccggccagcgcctccccagctcaccttccccgcggccgaggccggcggaggggtcgcctccggggcagggggcgcggggccgggggcggcctcccctttcggcctcacggcagcctggtgcactcgggcgcgcaaccccctcactttccccatcttcccggcggagcacggcaaacgtgcggagcgcctcccggaagctggtcctgcgttctcgccgcccggcggaaacaggagccgcggctgccgggagccccgcggccgccggaagtacccggaagcggctcgggcgggcgcagggtcgcgggtgtagggtggcggcgctccgcctttcaccgacgcacctgggagaaacagaccggaggacgcgggtggcgcggagcacgagaaacaacgagtttctgtctagatcgtgggggacccaagcccggggttgcgtccaaggtcggggatggagaggacgcgacccccgcggcagtcgagatggcctttttaaaatt

SEQ ID NO: 27632 - DNA, 2300 bp, Homo sapien
ttttgatgtgcccttggatgcccttgttcagtgaggggggcaggcaggggcaggcggaacagacctcaccactgagcggcccccagaggtcctccccagcctcccgaggacctcagaggggggccctttctctcccctgcatcttggccaacgggtcctgcactggagctggggccttggtcagactctaggggcctgaaagtctcctccttccccactgaggctgggaaaggaggcaggtgggcctggaggctcaggcggggctgctgctgggcacctcactggctctgcacctacctgcccatggtgccagctgccttgccgctgcgtccccaggtcacacatactgggaaccccatgtggccgcccccgcaagttttgcagaacccgtcccgagcccccgcgtgtctttcccaacatgggtcccctgtggggggtgggtgggaccctgtctttcccaacatgggtcccctgtagggggtgggctgggaccctgtctttggctcccgttccacaccttgccctagccggcaagggctgcagacccggccgacaggccaagcttgccagaatcactggtcccatgcaaagccaacacccaactccaatgggcggcaaagcgccgcaggcacagagcctcctttcatctctgcagcaggctgagtttaaaaagcagattttctacacaatgtcgtacgcgagtctcagcagagctcaggccacgacctccagctgcctgcaagcctgcatcttcctctgggaggcttcccccctcaccctgcatcagggcccgggcttgaggggtgatggaggcaggttcccctgcagccggcggttctgggagcaggtgcccgaggcggaggccatggcctctgagcaggtggcagcttcgcccccaccagagcctgcagccctcacagcatcccacattgccccagcctctgcctgggccaggccctcaagctgctggctggggtgcccagactgtggaggcagtggttgaaggccaatggctcctggtgtcattaaagactctgtttttacctcctctgggcctcgggagaccagcctggcaccagaggaggggctggcagagccccaggctccagtccacacccaccggccccaggtctggccatgggctgggccctggtgtgcagacagcagtggccactgctccagggcctttgcaccagcctgctgcaggtccaggcggtcatggggagtggagccgcagcggcctcttgttttccttcccctcttgggagacggctgctcctcctggctgtttccagaaagtgtgtttgttatttggctcctggaaacaccatctgatgaaacaggctctgttgggctggcctgccaggcggaggctgtgggcgcccaggagtctcaccacgaagcaggtggcagaggcccgatagccccaccctgcaggccgggacctggcacctaaacggggagatggaagaacatggaaaattccctaagagcaaattgatgctcagcttccgcgggcaccaacttgctgcggaatcctgctttgcagatcatcgttcctcgagcattcggacgcctcgggccccagaagttcaagaacaagaaagctctgtttcatgcagacacgctcacgcatgcacacatgctcacacatgcacttatacgtgcacacacacacacacaacacacacacacgcacactcacacaaccatggccatgtagccccagtctcagcatcatgtcctctatttagaaatattggctaaacacctaataaataactaaacagaaatgtaatctttaataaagtctcataaaccaaaagccagctggcagttccatttggaacatccatgaacacagctgcatttataggaaaacttctccgtcagcgatgctcccatgtgtgacagccgcccccagatgtccttccttcccctccacaccccctcacagcccagggccctggggacaccggtgccgaagggctggatctgatggacaggccaaacccgggccacgggccacagtactgagcaggcggggccctcagggagggacggggctccctgggccagccctctgccagccgaccaagactcaccctcgatggtgccctcgacctgtcctccctcagcagcctgtggcatccagaccagttcgtggcccctaggaggggaaactgagtcccagccccagggtcctccctcggcttcactgggtgccccatggaggagacagccagggtgtgtcacctgacaggctcaccagaaccagcacaggtaggaggacggggcag

SEQ ID NO: 27633 - DNA, 2300 bp, Homo sapien
cggcatgccccatcactgtacggagctcctcagcatagacggagactcttcagttccagatgcttaaggaaatctctgcccaattattcgatggccactaagctaagcgagcagagacttcagtgggcacacatgataaagaatatagattcgacagaatttgtccagaaatcactaaacaaataacaacaataacaagtagaaacaacaaactcggggaagggaagagaatttgatttctagaattacaacattctattatattaaatgtccagttttcaaaaaagagttttagagatatacaaagaaattttaagaagtctcaaacatggggaaaaaagcaaacaatagaatctgtccctgagaaagcccagagattagagttacggacaaagactttaaatcagttgctttaaataggtccaaagaactaaaggaaactatgtataaagagctaaaagaaagtatgagaacagtgtatcaccaagtagaaaatacaacaaagagatgtaaattatttctttaaaaaaattctggaggtgaaaagtacaataactcaaatgaagctttcattgtaggggctcaccagaaatttgagcaggcagaagaatggacaaactagaagacaggtcagcctgtccagcttgagaaacagaacagcagcgaaaacaacatgaatgatgaaaaatgaacagagaccttcagagacctccgggacaccatcaaccacacaaacacacacatcatgaagtcccacaaggagaggagacagaggcaagggaagaaagaatatttgaaaaaataacagccaactcaactttgatgaaaacattaatctacacatcctagacgctcaacaaactccaagtagaataaactcagagagacccacacccagacacatcataatcaagctgtgaaacgtgaaaagcggagagaattctaaaaatagcaagagagaagggactcatctcatacaaggaatcctaaataagattaacagatgacttattagaagtcatgaggccagaaagcagtaggatgacatattcaaagtgctgaaagaaaaagactgccaaccgagaattgtataatagtatagctatccttcaggagtgaaggagaaattaatacaaataaataaacaaaataaaatgataaaatataaataaaattatataaataccatgtattatatataaaactatatatattaaaaattctaaatataaatacaatatatatgtgtgtgtgtatacatactatatatcaatatttttaacagtttttaaacaaaatctgagataattcatcactagcagaccagataactacaaggaggtctacaggctgaaatgtaaggacactagacagccactcacaccaacttgaagaaataaaaacattagtaaaggtaaccatggaagtcaatacagaagacggtgtgaatgtatttttttaatcttgtatgcttagacacagagttaccatacgtgttaagctgtttttatggagctataaatacctgagaccaggtcatttataagagaagaggattaagtggctcacagttctgcaggctgtacaggagcataagggcttcttcctctggggaggcctcaggaaactcttactcatggtggaaggtgaagggggagcaggcgagtcacgtggtgaaagcgggagcagcggggtcggggaggtgccacacacgtttaaacaccagatctcacaggaacccagagtgagagctcactcttcaccacggggatggctcaagccattcctgagggagtcacgcccgtgacctaaacacctgcccccaggccccacctccaacacgggggatgacagttcaacacgaggcttggcaaggacatgcgtttaaactgtatcaccatataacccgggaagtctaggcccgggctgatactcaggacaactgaaaacgggtccgcacaaaacttgtgaatcaatgttgatcaccgcgttattcatcatagccaaaagataaaatcagcccaaacgtccgtccgctgatggacaggttaaaaacgtggcccatccctgcaacgaaatgtggcccagccccgagaggcatgaagtgctgacgggtggagcgacacggaggagcctcagaaacacccaccatgctgctgcccggaagaggcaggcacggaaggccacgcgctctatgacctcatccatgggaaacgcacagaggcgaggcctgcccggggctgggaggagggggcacaggagcgccggctgtggggatggtgtttctcccgccgggggtg

SEQ ID NO: 27634 - DNA, 2300 bp, Homo sapien
gtgcccgtcccctgtgcggtgcctcacgtccactcaggccccggccatctcaccctcctggggagatggagggaagcaccatggggatttgctttttcttgctgccgacggagcccagccaccacgggagggaggcccggccagcctgcggtgggtgggtgacatgtggcccggatctgcccggggcgcctgcctgtaagtgggcccagcagacaccccatggagccgaggcaagccgtcccagctgaaccggcttaagctgcaggcccacagagtcatgagcagtgaagagaggttttcgccctctgaggtttggggtggcctgttacacagaaatacacacaacgtcctcaggcacgtatctctttaagaatgtgtcccgagaaggcgtcccaggagtcttgatttttatttagccgtccacggttgcccctttgggtgcttcgccttcagatggggtgaagggctcacttgttagctggctggccccaaagacaggcttgttttccaccaggcagtgactgaagccggcagcctgctgcataccgcgggccttcccctgacctgtccgggactgcgggctggcggctgacacctgcggagtgcttaccgcataccaggctcccaaacttccatctgtgttcgtcttttaagttttgttgttttccagagtcggagtctcagtgttgcccgggccagagcgcagcggccatttataggcgcggacctcggcctcgcacaccacagctccagctctgagacacaagcgacccgcacccccccaccgcccagccccagcctccagactggctgagatcacagtgtgcgccaccccatccctggcttgcgatggtctcttactccccactttacaagggaggaaagaggccgagggcagagtgggccgcctgaggtttggaggccagggctagtacaacctcaatttgaccctggaacctgccgcttcccccacccaggtgcgggacccacccgcttgtccacacctggctctgcccaccgcccccggctgctcctctgggctcaggtcgccgcggtcaggagctgccaagtttgcctatcaaactttatcttcgtgcagagaactgcagcctggagctggttattccggtcagtgaaaacgttgcatttctacatatgcttatcatcatctgtgtaaacatttcttggtataactgtggaacagtcagtaaatatagataaatcgaagagtaggtctattgcatatgctataaaaaaatgcttttactatcaacctaaaacaaacaaacaaacaaaaaaaatcaaacaaaaccaccatcacctaaacgttggtaactggagcagctgctagtgtcagtgcggactaaacaggagacggcgggaaccgtgtccagccagggtcctgggccgcgacctggttctcccggagtctacagtgaggatgacgggcggggagagggggccggcgggacccgcgtgtcccaggcaactccgggagagggagaagcaggggtggctcggcgggggctcggcgggggctcggcgggggctcggcgggggctcggcgggggctcggcgggggctcggcgggggcagcgcccgctgcagggaggagcgcgggggcccgggagcctgggcagcaccgcgagacgccacctccgcaaaacgcaaacgccaatcgccgggcgcctgcggtcccagctaccagggaggctgaggcggcaggatcgcgtgagctcggaggtccaccgcgctccagtctgggcgacagtgagaccccgtccccaaaacgaaggcgggcagagtctcctcagccgcgctcgggcgggcggcgccgcgacgccaggccggtcccgcgctctcgccccacgctccggagccgcccagccgcggtctctcagctccggccgcgctccagccccaacggccccgcgcccgtccgccgcaggtggtcgtgagggaggtgccacagctccggctgcccacgacagacacgggcgccccagcgcgcgcacgtccggcgtcgctgcgccgcccccgccccctcggcgtgcgcgcgcccggcgggccggcgggggcggggagggggcggagccgccggcggcggggctgaggcgctgaggcggccgtggcggcggcggcggcggcggcggcagcggcggccaagcggccaggttggcggccggggctccgggccgcgcgaggccacggccacgccgcgccgctgcgcacaaccaacgaggcagagcgccgcccggcgcgagactgcggccgaagcgtggggcgcgcgtgcggaggac

SEQ ID NO: 27635 - DNA, 2300 bp, Homo sapien
aatattgaggctgggaccctgcaaatatgatgttcccattctctgctggctttatattctgccaaaggtagtacaagagggaccatggcagacaggatgagggagaaggtgatttcctgccatttgcttgctgttgctgctcagccgcagtgcttctgcaactgcaaagctgctattggttctcatcagcaggttgctttggagtctcactgcccgccttcacaggtgccagtagcaggacagcagcactccacctcagaggctgaggtccagctctgcacagcccctcctgaacttctgtaatacgtagcaaaattaatgggggagggtttataaatgacttttatacttgatttttttaataagagatggggtctctgtcacccaggctggagtggagtagcacaaccgtagtccactgcagcctcaaactcctgggctcctcccaccccagcctcttgagtagctgggactacaggtgcatgctaccacacccagctaatttttaaattttttgtaggagtcttgccatctttctcagactagtttcgaactcctgggctcaagtgatcctcctaccttggccttccaaacagctaggattacaggtgtgagccactgcacctggcctatagttgattcttatttagtgttttgctcctaaaagtaatgttcaataaacatatacacacaagtcctcacttagtacatgacctgaacatttacccacatgcttcattaaagtgttacaaattaagtaagaagagtggtatatagatgtattttcttgtaatggcatatcataaagtgggtcaattaattatattagctctacacgtcttaaatcataactttattgcttttggtaatttaataagatgtcctctataatttatttctcagtggttttctttttttaatatccttgaaaaagcatgctaacacttttatttcaattgaaaaagtaggtcagacttttcctgacgaaaaatgtctaatttggttcactggtttgacaaggaggattagggtatatggaggacatctgccataaatagaatgaactacatcttcaaggattcaatgaaaacacatttaaaataatagtataataaaagcattttatcaaaaatattaaattggccccaaaaagcaatgaaattaacaacattttaatgttctcaaccccctcaaactatattagattaaataaggtgacagagaatcagggataaacgacagtcccttgataaactgagacaaggacagcctcttagtaaatgttccagaaattgagactgactggataacacatcctttggcaagtcaagtagtttctaatcctttgctttcaaaacacttgaatgaaaaaccgagttgatagctgataaagcattaaactaatttttacagttttaaaatttcagatcatcatcggatttaggaactattactcagaagagttcagaacacaattgagggccattgctatactatacctccttatctacatattcatgcaaacaaagtttcctaacatggtctataaaaatgaagagaaaaatatacttgagactgaagcctgcctcactggagctgagtcctcctgttccttgagtgtgggaaccaatcggctggaaaaacagccccactcttctcattaacgaggcagtttcaatcaaatgtgtttatgtgttaatagttatctatcagtttgtaacatacatatgttttctgaaaaactgaagtgatactacttgtgaaaataactcaggagatattaaaagcttttgatcacaaaataaattttaaatttttgaccccatttaaagctttttgttgtagagaagtagggcgaggtaagcacaaaagacttccaggaggcaaagtagatggcactggggtcaaattttgtgacagaagccgaatcacgtccaggaacgaccaaaacttccaaaggagcaaaagctagtccttttgcgggggcgcaggcagaagcggcggcagaagcggcggcagaagcggcaggcggaagcggcaggcggaagcggcaggcggaagcggaaggcgtccatctttaccgtgttcagacccggatgagtcctagtccccgccacacacaggtcgtgggttctcctttgagagtgaccactggttcctagagcttttcctaaactggagacggatcctgccctgggggtctcagtcaccgcgaggactcgagggtaactgccagaggtcccaggtggcccgaggtgatgccgggcgcagggaggggctggggcggagagagggctggg

SEQ ID NO: 27636 - DNA, 2300 bp, Homo sapien
tacactttaaaagccttttgaaatgttattctataaaatgccaacttagatatgttgctcattttttctctgtagagattacatttttttgtttgtttgttttttgtattttttttgagactgagtcttgctctgttgcccaggctggagtgcagtggcgcgatctcggctcactgcaacctcagtctcctgggttcaagcgattctcctgtctcagcctcccaagtagctggggctacttgtggcatgcaccaccgcgcccggctaatttttttgtatttttagtagagacggggtttcaccgtcttagccaggatggtctcgatctcctgacctcgtgatccgcccaccttggcctcccaaagtgctgggattagaggcgtgagccactgcgcctggccaaaattaaaatttttatttttccttaaaaatttctgcgtttttgtattccagcctttaccaccccaatattcaggtctatttgctcacggtccattttgtgtgtttcgtttttattttgcatcaagagccctggggggagtttggtgagacggttggctcaatggctggaataggagaggcacttcccacgtggaattaggtaacgtgacagtcacaggcaccaggatgacttgtcagacccaaactggagcaaggaaggcactgaggaggaggcacctgcctgcgagtctgagataaaggccagctggagggctctctgaaataaccccaggacgttcctcacgtgcttcacgcacctcacctttcacagccgctgcttcagtcgtgtgcccgtgttcctgggactaggtttgccaccggacaagggttgcagtaattcggacgagacgctgtggaaagaatgcctgcccaggaatggcgtctctaccacggaacagatgcagctccggctttgagctcgagtcagtgaatttgtttccaggcagcttatgtgaacctctcctttttgtcaaagaaaaccttcccccaccctcccctcctcaggcacgcctgcagcttgccatagccgtcggtggatcctggattccaagccttttgcccactgtcaaatacactcctcaaattaggagatacttttctctgatgtcattctgttcgttgacagtaggcattaaagccctctcagaaccgtggtgtggaggccagacagcagcctgcctgtgtctcagccataaccacccaacgcgccctggttagtgtccctcggagacttggtctctgcttcctcggcccggggttctcccagtttgtgctctgagagtgtgaatgtcatcatccttaactcttataactgtttattcttctgttgtttaaaaacaggtccgtgatgttagacagagccgagaacctacttcacgaccactatggagggaaagaatactgggatgtgagtgtttcctcgggagcgtttttctcagttagtgtatgttgcccattatttagcttttgaaaatttaaaacagtcgacagctctttttgaaccttgctgattaaaaccatcattttaagccatggatttgggcaactgcggtgactgtgccacccccaagcctcacgtggctgcagagccaggtcctcgggagcccgcagggccacccagctctcccctctgatgccacaggccctgaatgcggtggcagcgccctggagtcagccccggagtcagtgactccgtcagtggctggaacgtagacccctcctttctcctctctttagctttgaaaggtgggactattctctgcagcgggtcttttccgttggcgttgatttccgcattgatggggtgacttcccatagccacccctggttctgtgagtgagtgggagcagagggcgggaagtggctgccccctcccgtggacacagcaggcctgctgacgtgttcaccagggcagcagcttgtaaagccggaacctgcctgcaggagacacagtccctgctcacgtgggactttgtgcaggtcagtcccaccccgtttggcaaagcaggatgtgctaaccgcctaagctagaagtcgagttggggagagactgaggggaaggagctgcacacagttgtgccagccaggggcaacggccagctgagcccagtgtgtgccgcagcttcccacggcaggggctggcagagccggcaggggtgggcggcttgccctgcgttggcttcatgcaggagaccctccaagagcctccaccgtggatggcgctgcttctcaggcgaccgtggatgacgtgtctgaggggcttgttccagctgcgggggtgggtggtggcagcgacagga

SEQ ID NO: 27637 - DNA, 2300 bp, Homo sapien
caggtctcaaatgctgaggtttctgcacggaaaacccgactgctcacaagtctcagcgcgtggcccgactctaggcacttaacaatggttcctagtttgtgaaggcagtgagtggcctgtttctctatgaccagttacttacggagcctgtaagcagaagcagcagacatgctaacatcgttttaacaattagcaatagttcaacactaaggcagaggaatcccagtgactggaacccaagaatcagtacccacatggttctcaaactgtttggtttaaagacccctttacactggaaacaatgactgacggctggttatgtgcactatgtctattgatacgtcctatgttagacgttaaagctacaagtatttaattcagctaaaaataagaagccattacatgttaacaaaaaccacatatttaaataaaaaataagtgtattttaaaaaatgaattagaagaactgtgatgatgttcttaatttttgcaaatctcttttgggtttggtgacagctggattcccatacccgtttctgcattcaatctgttgtgacatcacagatcaagtggtttctaggaaaactccacagtgcattcatgagaagtgaaaaaggcgtataatactctggtactactattaaaacggctacaaaagctcagagatccaggacacactttaagatcactgccctagaggaaggacacaaagcgccccaaggcacagacaagtccccaaggcacagacaagtccccaagggctacagaaaccctgtccctggcgctctcctttccctgctctgcgctggttttccatactcccatcgtcgcgagtgaagctgcgtgcagcgcccaggcctgcgaacgccacgaggggccgtgcacacctctgcgtccaggcccctcccggggtccgcttggagatcccacagccacagggcggccgcgaagctcgtcttggccctgagaattcactgcggagcgcccgcccggcactgactcccggctccgcacacccaggcctggacccgtgtcacttgcaggggcctccggagccagcccacgctcagcctgagcaacccggcccccttcctgggctcccgaggctgcgccccgggcctcgcagacgaccccgcctgcagacccgggccgcagtgacgcagcctcgactacagccaacccgctggcccgaccctgcccccagcccccgccccatcccatcccccagactccagcccggccccggcccctgcccctgcccctgcccctgtcccgtccccgtcccatccttcttggccccggctcccgccccgcccccatcccatccctcgggcccccgttcctgcccccatcccatcccacccctcctggccctagcccctgccccgcccccatcccatcccatcaccctggcccctgccccgcccccatcccatcccatcgccctgatccctgccccgcccccatcccatccctcctggcccctgccccctgcccctataccatcaccctggccccttactccgccacattccttgccccagaaccctgaccccatcccattcccctgacccctgccccctgaccccgctccatcccatccccctggcccctgccccataactccgctccattccatctccctggccccggaccaccctccatcccgtgggcctgcccctgaccccatcccatctccctggcccctgaccccgccccgcccccatcccatcctctgaccctgcccggtcctggaaccccagcgttggcaccgtggacgcgcgtttaccgtctgcgggaagccgcccccgacagaatatcggccgccgattgtccgggccagaactcctggccggaggcagaagccggaggccaggacactgcccccagcagcaggaagacgaagctgagtgtcgccatggccccgggcggccacgcacttccggcggccgcgccccgccccggaaccacgccccgcccccgtgaaatgcgttcccagtagccacggcaacgcccagctccgccctccccgcgcatgcgttatgcgccatcaccggcaagcaggggcgggagggggaactgcgcgtgcgcagagtctccgccctcctgaccgcagcggctagaggttccattgcagacccggaggccgtggctgtggttcgcggcggtgctgtcgcgggcgccctggcgcagcccacgcaggggctcctgagggtccgcgaggccgggaggtccgggggtcgggaggtcccggggtcgggaagtcggtggaccctgcaggccagtggggagggtacgcg

SEQ ID NO: 27638 - DNA, 2300 bp, Homo sapien
caccagggggattctgaagaacctgaaaaatgagctcaggccaggaagggacggggattggacatggctcattatacccacctccctttggagttcaggtgcagctgaccagactgacagcagactccatagcagcaagacaccaagttccaatctgacgctggtatagcatcacgtgacaacaggccctcaaagtatcaatgtattttaccccaaaatatatctctttgacaaattttgaaatggccccgcaaagcggtgtcttgtggggaaattcatattctgtagactccccttccctttccagctctttttctgatcctgaggagactggctgagagtctagtgccttttgaaggtctgaataggaaacatttgccatgtattgcctctgagggcggacacctatgagatttcatccacataataaggacctcggtctccacagccccttctcttaacccagacactcctttctattgattccaagccttcagatagtaacttctttcaaccaactgccaatcagaaacatctttgaatccacctattacctggaggcctttccacttggagtcgtcctgactttctggatcaatccaatgcacacctcacatgtactgactgatgtcttatgtctccctgaaatgaataaaaccaagcagtaaaacaaccgccttgggccaagttctcaggacgtcctgaggctgtgtcatgggtcatatttggctcagaataaatctcttcaagtattttacaaagtttggctttttttgtaaacaataggcagatataaattccatttgctaatttttttaaatgctgtgtcttggttcatgaaagacattggtctgtggttctactgtctggtgatgtctgactttgctatcaaggcaatgctggcccatacatcgagcagggaagtgcccctcctcgtccatcgtctgagtggctggattcctattatttcttctctaagtaggattcaccagcttggccctctgggcctggaattttctgtgtgagaaaatttgataacaaattgatctcaaatttaacagataataagcattagtattttcttttttggtaactggcatccttcaagaaattcgtccaattataccgttttgggggctgcctgcactagagtcagcgtggcgtcccctcagaaggccgggtttgccagcgccgcgccccaagccaggtcggtcggccagtgctggtgccctcggggaacagcgggagctgcctggaggctgcggggagcggcggcggcgggcacgcacctggctcccgaaaccagacctttaataacgcctcgcagaaggggcggggtgggaggttggcagcgcaggggcggcagccccggatccccccaggtctccagatcaccccatcgagccccgcgccctagcagcacagtccctccagggctccttggagggccaggcctcagcccgggtgccccctcgccggggctccagggttgggggcacccaggaggccgcaggtgtggagctcgacggcgccccccgactagaaacccaggctctcatgcgcggctcccgccccgaccccagctccagaggggcgagagcacccggcgccgaccccgtctacggaccccctcctccgccccgcccccgccgtccagccctcccgcccctaccagccccgggcctcctccccacggacccgccccgcgccaccagccgtcagccctcccggcccccagtctcgcgtaccctccccactggcctgcagggtccaccgacttcccgaccccgggacctcccgacccccggacctcccggcctcgcggaccctcaggagcccctgcgtgggctgcgccagggcgcccgcgacagcaccgccgcgaaccacagccacggcctccgggtctgcaatggaacctctagccgctgcggtcaggagggcggagactctgcgcacgcgcagttccccctcccgcccctgcttgccggtgatggcgcataacgcatgcgcggggagggcggagctgggcgttgccgtggctactgggaacgcatttcacgggggcggggcgtggttccggggcggggcgcggccgccggaagtgcgtggccgcccggggccatggcgacactcagcttcgtcttcctgctgctgggggcagtgtcctggcctccggcttctgcctccggccaggagttctggcccggacaatcggcggccgatattctgtcgggggcggcttcccgcagacggtaaacgcgcgtccacggtgccaacgctggggttccaggaccgggcag

SEQ ID NO: 27639 - DNA, 2300 bp, Homo sapien
ttcccaggtgacagaggcgggagagcaggcgagccacgtgccgggcgccgcagcagggggcactccaggctggcgcccctctgcctctccgtgggctctgacctttcttctccctgcctgggcagcctccttcaggttggggagtcttttgttgacccctggattaaagtcctaatcaggaatgacccggaagaggtcttatgaggctttcctcaagagaagaaaatctgtccctgagtatcaggaagtggcccctttccctgcaccgcagtcttctgtgaccagcggctcacacagcgaaggaggggctggcggcccccacaggccactgccccgaggccgccacgagagggcaggagagcccttcctgggagctctgtgccacggggaaacgcagccccgccaagcacagcatggatgtttccagcagggaatgaagagagaggccccagcacatgagagaagagcacactgggcggcccctgtcggagcctctcctgtccccagcgacccctgagagcaggccctgggcctctgcggcccctcccggagccactcttcaactgctgacctgctcccagctcttctgtgccccgcccagctccctgcaaaacctcacctgaggggaaggaggccctgtttgggctcagacgcagcaggtgcagcttgtggtcctggggccacacctgttagagcccatccttctacccctgctgggccctgagtgtcgtccgtccccacagaactcagcagggtcaggtctgggcactccaggccgccagccccctgagtgagccctgggccggaggtagttgtgggtcacaggcaccccagccagaacacccacagtgggtagatgtgtggggaccggatgtgggtcctctcctgagagacgtgcagatggggagaggctgggcagttctcagcacagctggagcatctacctgtcaccacctcggagcctcctggccccgtgggggcggccctgggagcagggtcggcagtgaagagcagagaaaggcagttggggatgttgccactgtcccccgagaccaccctgccatggagacgagggagctgtcccttcgcggaagggggctggccagcaagaaggacagagagtggactggccgaggaccgctgagctcaggacccaaggaggactcttctaggagacgagagagcgaacgccagggaccctgtgcaggcctgctcctccgtttgcaaggtgagttaccaggttcacgtgtttggagtttctggactcattgcggagttccacccctgcacgttgcggttccccagtaatcaaatcctggcttttgtgcctggaagtgcacagggaggggacaactttgtgagtcagtggcagggcagggagttctggttctccagagccagaggccgtgctcagaaggatttcttagcaggagccttggggcccccagtcaacacttccctacggacagcctggccagctctgtgcacggagcaggcgcccgagggtcccaggtcaccaagtgaccaagtcgtgaaggcgcccagggtttcctgggggtgcgctgatcccaaggaagccacgtgtggtcagcatgggggaggggaccagcgccccggggggcctgcagcacagcagggcctgccctcctgggtgagactggccggtgcctgtggggatctggggggctacagtcagggctctgtgctcccgagggccacgccagcccacctgccctggaacagaacccgaggcttctgcctaggggagtacctgggcacctgcctcctgtgctgccctggacacatcccagcggctgcacataggggaggcacagcctgggctcagggccagggtccactctgtggggatactagacccgggggtgacaatgccagctcagaacttccccccacacctgggctcctccagcctggcctttcctggggaagggagggcctgtccttcctcagcactgtgggagggaggcaaggcctgcggttgaagcgtccccaacacggggctccaggagagaaagcaccacatctcagggaatgaaaacagagacggggccgcccagtgcactcggtggctcggaaatcattaaagaatgttctgagcccccgattttggctgtaaaagggactggccggcttgtgaccgctcccctgtctgtgccttgagacgggagtgttcagcgttgggggcagctttccctccaagaggagcttcacaaacatccgctctctgcggggccgcctctccgtggcctggggccgctgtcggaggaaggctctccagc

SEQ ID NO: 27640 - DNA, 2300 bp, Homo sapien
ttcaattataaaaccaccatgttctggcttatactgacacattttaaaagccaggttaaacagatgattttcttagaaaatataaagtatggctgggcacagtagctcatgcctgtaatctctgcacttcgggaggccgaggcaggtggatcacttgaggtcaggagttcaagaccagcctggccaacatggtaaaaccccatctctactaaaaatacaaaaattagccgggtgtggtggcacacacctgtaatcccagctactcagaaggctgaggcaggagaattgcttgagcctgagaggcagaggttgcaataagcagagatcactccagcctgggcaacagagcgagactctatctcaaaaaatagtgtaacatttaaaaacaacaaaaatgaaaatataaagtataacattgactcaagtagaaatagaaaatctgattagccctatgggacatgggcaggaaacagaaaaaaaaaaaagtagtcaaatgatatcctttaaaaaagcaccaagctcaggcagttttttacaggaatatgcaggactgatctctgcaacagagagacagaatgaccgtttaggaacctgtcctctgaaggccaacggctcagttcaaattccatcttcgcccccatggctggtgaccttaggcagactacttaaactctcagcctcttcatctgtcagatggacacgaaagcaatacctagttcacagggatgacttccaggttaaggacttaactcatgtaaaatatatagaattgtgtttgttgcaataggaagaacttgatacaggtgaatttttactaagaattactatcatttccaggcacagacaaagacaaaagtatcacaattcattctgtaatatatagttgtatgagtctattctcacattgctatagagaaatacctgagactgggtaatttataaggaaaagaggttaaattggctcatggttctgcaggctgtatgggaaccttcggggcggcctcaggaaaccttcaatcgtggcagaaggtgaaaggggagctggtgcgtcttacatggccagagcaaaagcaggagggtcagggaggtgccacacacatttaaacgaccagatctcgcgagaactcactattgcgagaacagtaccaagaggaaggtactaaaccattcatgagaaattcactcccatgatccaaccacctcccaccaggccacacctccaacactggggattacaattcaacatcggatttgggtggggacacagatccaaaccatatcaatagttaaccaaaaacctgagaaactaatggcaagaataacacacacacatctacacacaatgatgctgacatattatttataatagggatgtaattacccaaaaataaaagtattaacaaacagaatccaatccaccaggagcaagtaaagtctatctccggaaagcaaagacggttcaacattagagaatctgttagtacaactcactacatgaagagactaaaaaagggaaactttgggcatctcaaaagataggcccctaacaagcaactggtaaatttaatatttagtcctaattttaaagcacacacaaccacaagatattcagaaagctaaaaatagtcagaaacttccttaacctgtaacaaacattgtatttaatgcatgagaacagatattagcaaattttcccgtaaaagctcagatggtgaatattctaggtttttcgggcaataccgcctctgtctggactatttaacagcattgctgtggcgtgacagtagccatcagacaatatgtagaaaaatgtgtgtaactgtgttccaataaaactttatttacaagaagagaccattggctggatttggccccccggccaccagtttggaaacccctgcattagaatcattcgcattagtcagaaacaagagaaagacgcttgagtcctggccaacatgataatatacacaaagtataaatattagaaaggcagagacacaactataattatttgcataattatatgactgtttacctaaaaagttcaaaataatgaacggacaaactattacaagtgaccaagtgtaacatcaatatacatcaatcaacagtgtttactaaaacagcaatacagaattacaacattttatgggaaagtgtcccattcattataacaaaaactttgtggatttcataaaaatccacaaaatactcaagaacaaaccaagaaatgagcacatcggacatcaaagaaatcttaaaaattttgccaaagctctaaattcgttgagagctgg

SEQ ID NO: 27641 - DNA, 2300 bp, Homo sapien
aatgtcaaatgcagccctaaggaaaatagttcccacacctaatcatgtccgggagaggtcggtgggggggcgccgggagcacatgctgggtgggaacaagggccctttgtgtgccatgggcagctgtggccgcagcagcgaagctaagtggaccggctgtctggccgcctggctgcccggagacaagcgctctccttgttgcgtcagcgcccgagcccagcccctgcctgggctgcgggggagtctgggacactggctgcagggaggggcacgttctcactcgtggaacattctcaggccaagacagtcacaaatggggtcacttctgatggtgctcagctgccgcagcggcgagccatgaatcgcccacgctagctttggctggggcagagtcctagggcctgagtgagagatgaagcaggagggacagtggaccagccaggctccctgcgaggtcctccccatgtcacctgaggatggggcagcaagggtggcctgaggtaccctgcagcctctgtaggcaccccttcctctgttgcctggcctgagcacagctgccctaggaccagcagagcctgcacctcaccgctccctcccgcagagggtgcggcagagcgagggccccccttccaccagagactccaccctcatttcagagaaagctgaattcagaaagacccactccttcccacgcaggcagggagggtgcccggtgggggtctgggctccatggaggaggtattggagcaggacagcgggcagctttaggggacgcagcctctaggccggtctgagccccaagggtcagaagaccggttacgcacaggagaccgagcacgtgagcacatgcagggaggccggcggggctgacgggaggtgcgatgtagagaggacggcagccacagcggcgcacacggtattagattcacctcggtagcaccggaatgcagggttcccaatacaaataggtagaagaatctgcagatgaaatgtgtgtgtgcgtgcgtctgcaaagtaagaaaatgccaggaaacatggatggaaaagacacagatgccagcctgaagggtcccccgctgagacaaacttaacaacaaaataaactgaagaaggacaggaacagatgatggcccatgcataaaatgagactctgtggttctatatagatgtcaatatacttaattaataaatgggggaaaaagaaagctcacccaccccggtagaattccagttgataagtgaccgcatgaggaattccccccagcagccgttgctgtcacaattaattcaggcaacaagaacatcagtcagtgccaaacctggtggtgaacgtggagtgaagaatggggttttacatcacctctgagtgtccccacgaaatgtgcatgaatgacagagaaggaaggaatttccagtggagacccctgcagacgccacgttccccagatggtcaaggtcaatgccccctggagtggacacatcggtacgcccacctcccaacccagatgaaccagctccctccaccgacaacctgcgtctaaccatgaaataaaccgaaactgacagtatttctcttttccacagagtcaaggtcttagaagtcaaggaaagactgaggactgttccaggttgaggatgagcatgaagtcttataatccctgtaatcccagcactttgggaggccgaggtggacagatcacttgaggtcaggagttcgacaccagcctggccaaccaacatggtgaaaccacgtctctactacaaatacaaaaattagccagatgtggtggcacatgtctgtagtaccagttactcgagaggctgaggcaggagaatcacttgaacctgggaggcggagcttgcagtgagctgagatcgcaccactgcactccagcctgggcgacagagtgagattccttctcaaaaaaaaaaaaaaagaaagaaagaaaaaaggcattattgggacagttggtaaaacctgaataggtctctaggtgaagaatacgtactctttgtactattcttgcaactttttggtgtatttgaaattgttttgaaataaaaagtaaaattaaaagcgagaagcaccctgtgtggctggcaccctggctgctcgcatctgcaggaagcatggtggggctgggcggtcccaggctgccgtggcccctttgtgctgctgtaagaaggtacctgtgactgggtgactcataaggagcagaaatgtactgctcacagctctggagtctgggaagtctgaaaccagggccccggcaggtttggtgtttggcgaggactgctct

SEQ ID NO: 27642 - DNA, 2300 bp, Homo sapien
agaggggatgctacagagcctatggggacacagccatgaggccaaggtaaggccccaagtgaaacgaatgagcaaaaagagttcgtacagctaccaggtaagcagtcacatgtgtttcatagtagctgtgtctcctactgatcacacccccatagtccccaaaggtggagagtggggcaggagagaggtaggccaactcaggccacaggtgggctggcacccgccctgccccagcccctccctcctgggagccgcagacaggcccccagggcagtgcatcaggccacacctgcagagacctgcttcccctggcagcaggcacctgccctgacggaagacttaggaatgggttgggttgggtggaagtggtgccccagggcaggtgagatggaagaggtgaaagagacctgcactgcagggttaatggacaggggccagacagaccaggagcctcgggaggagaagccaccaggacccaggacacatgaacacccctgacacacactcacacgcacacaggctgacacacatgcacacactgtacatagttacagaaacacacacatgcacacacacagcacagagagacatgcacacacatgcacacaaggtacggtcacagacacacacacagcagacacacagacacacccactgcactgcagagacaccaccaaaccctgatagacacacacagactcactcctccatccacctgagaaacaaaagttttgcagaagtgtgcgatgaccacttctactctatgctgttctccttaatctttttatttttaaaaaatgtgggtcataatcctttacattgatttccttcctcacagtgcaccgcaagcactcagggaaggactccaggtttgaaggcagatgctggtcgggacccgaccaggtggctgggcgggaagaggtgagatcgggcaggattgggcctgggaaggctgaggcaggcagggatgatgccagcagaggagaatcccaagcaggccccgcggctgcggctggagagctccaggggcggagaggaggtgggaggcagcagtcaggttgggaggaccctggcaagcaagcccagagaggagggccgggagggccgggcactagaagtgtgaagtcactgctgcctcctggggctgcttcagaggatgggtggggccacgtgtggggagatcagggagactggagactacgctgtttggtccaggcataggagatgagccctggccgggaagggacagtgtggatgggccaggcggaatcagagggtttcagagaaagccgtcaagccagtgccatgagtttcgcgcacacgaggagggagcaggctggggggtgttgctggtgtgagggctctctggttgcagggagcggtccggtcgggtgggggcacagctgccaggaggaaagcgcccagggcctgcaggtggggctcaggatgctggccctgaagaaatagaaacagggttttcacctgggagggaggaggagcctgggaactggggaggaagaggctctgctgggccgcgccctgggaacagggggacctggggacagatctggccctcgcacgcccctcctgtctcgcgtccgtccctccgtgcagccggggcaggaccctgcaggggccttgcgggccggaggtgccggcttcctcctccgtcccgtcccccccgcggtgactctattcaaatctccccccttcccgctgccccaccggactcaggggctggggtcgtagcccggcgggcagcggtgttcaccttccgcataaacctgggcttcctcgcggggcagcccccgggccctgtgctgggtcgcagcctcgggcggttccctcggggcgggacgtgtccccgtccgtcctcgcccgtccccgccgcccccgggtcccggcccgccccgtcctcgcagccgcaggtccgctgcggcgcccgcccccctctcccctccccgggccttgccctgctcgtcgctccgccccctgcccggcccctgcccggccccgccccgcgcccgccccctgcccgcgcccgccccgccccctgcccggcccctgcccggcccctgcccgccccctgcccggcctcccagcggcggcggctgcagcgcggcggtccgagcgggtgcaccgcggcggaggaggcagcatcccgcggcgctgacggtcctggggagagcatggcgccgaggtgaggccggggctgcgggcaggggttgggggacgccaagatgcggctgcgggggtcgcgggggtcgcggggctcggccgggtcctgcgggggtcgcggg

SEQ ID NO: 27643 - DNA, 2300 bp, Homo sapien
cgtggctgccattaacactgagtccagatattccagtgaccaggccctacacacgctccggagagagcccggctttttaaactgcagcagaaagcaaacgcacagacatcgccttccagaagtgtgagcgtgaagctggggtgtctgcacctcaggagtctgccctgctggagtgcagccctgggacagcagggctgagaagcccctgcgtcctgagagcacctgtgtgcacggcacccccgcatcccctcccctctgctcagccccctgctgttcaagaggcagctccttccaccgcggggagcatcagtcccagcagcatgggtaccctccaaggcctccctcccagacccctcaacagaggagaaaagacagagaggaggccccagaatgggcaagtgtctgcaggaggatgcagccacaagctcccaaacctgctggacgaagtgggcaatcagcagcacgtgcagagggcggacactcccgtggtctcacgcaagggctgagcatgcagtgtcgctgctgtcccggccaggcctggcacccaagggtttctgggggcttccagggccggaaagggacctgcgctctcccactcagggcgtggcagggtttccgggggcttccagggccggacgtgatgggggagcgctgcaggggtttgggcttctccatctcggcgaggagggtgtggacgcccgcccgggagagcaagcgcagcctcgccacgctgaaccaggggctgccctctcccaaaataactccaggccaggctcggtggctcacacctgtaatcccagcactttgggaggccaaggcaggcggatcacctgaggtcaggagttcgagaccagcctggccaacatggtgaaaccccatctctactaaaaacacaaaaattagccaggtgtggtggcgggcgcctgtaattccagctactccagaggctgagatgtgagaatcgcttgaacccgggaggtagaggttgcagtgagccaagattacaccactgcagtccaccctgggcgacagagcgagactctgtctcaaaaaaagaaaaaaagtaactcgaaagtcactcaaactaaatgctgtcaattcacttacgccccagccaggcaactgtgaaaaggtggggaagcaggagggggcggggcgggggcagtgctctctaaaaaccagaggagtcacactcagccccttcctgggttctcatcccacatgaaagaagcaacagggatgcagggatgaggcctcacggtgctttgggcaagaaggacagccggccgaagtcagaatgaagtttgcacgcacagatgtgctgttctaacttgggataaatgtggatctcgtgaatcccgagagcccttggcgctctggctttgctttggaaaacagtgtcccctgccagaccaccctggggaggatgggggtcaccacaggcccccagggatgtttcctttctgctgcccaagtccagagaccaaaggccccgaacctccccctgaggagccggggaggctggacgacgagagggaccctctgactccagacacaggaccccaccttgtgcaagtctgcagcccagctccacacctcacagggcagcccacgggaggtagctgtgcagtgttcatgcaggagggtgtgggtgagtggggttgtgacccctgccgtgacggttttcagaggccttgggccacccgagggtgaggcagggggtccacctccatgcacacctcttgggggacagttgcagggaccccagggacccgctgactctgtgtcagcaccagggtcctccaggggagcccagtctggggctctgacaggcgtgtccagggagacaggtggacgcggtcacactgcactcacagcacacacacacacacggccggggctccaacaggcgtgtccggggagacgggcggacgcggtcacactgcactcagcacacacatggctggggctctgcgcagcccaagactggtgtgaggaaggaggcggtgggtggtgctgcccacccattggctcacaggcccagcagcaccgatggagaggccgcgatgccacaagtcagacccaccccgtcctcatgagactgactggcccccgagcccggggcatctgagaaacctcctgcgaatggctacagaggaaattttcaggtgcgagagatctgaagaaagttctggaacccgcgcctggaccggtttggaccctcagtggaaacacatcaaagagaaggaaaaccagctggggaaggatcctggcagcggtggctcaggtctgggagaaag

SEQ ID NO: 27644 - DNA, 2300 bp, Homo sapien
gtgtgcatatgtgggtgttcgtgtgtgagcatgtgcgtacacatgcgtgcgtttgagtgatgatgtgaggaggcttatgtagtagccacccttgccaggtgcttcctggtgggaaccagatcccgggggctgagctgtggagccgtggcagagccgcactaggatttccaggaggttaaacgtgcgatgctgtggaggtgcttggaggtgagggaaccccaatggtggacaggaagctctcaaagcacttagaggtggaggagtcctggacagtgggcaggaagggtggggtcaggaatggagtgggcaggggaagggtggagggagctgggcaccctgcagatggcagggtgggtgctcagtgccatggggctgccaccatcctccaagtgtggccccgagggccggagctgctctccctccattgctaggcgtaatcagttccttgtgcctggctctgcccaggaggtgtatattggggggcatgaatgtagggccagcccagctggccagtgaccctctgagcacagagccttcgggatggggctgggggtgtcccccacaacagagttcccttcctgagatgcgctggtggaggagggggcagtctctggaatttctgtttggagactttccggaggcgtgttcagacataaaatcacagcagcagcagtcagttttcaagcaaagagacttctctgggcatctctgagacgagtttgagcagtgtggggattcgttttgggagcacggcctcactgacatgcagatgtttgcttgtggaatgcctgcgcctgccctcgagaaggaggtggcactcagctgcttgaaacaaggctgggtcccaagcagcccagccctgccctgtggacagcaatcgaccgatggctacagcatgtcctgacctggggacagctggggacaggttgtggggctgtttcgtcacagctgctgtcacattaactgaccccagccctgggggagggtggctgcaaccccagccgcacagcctggaggaggcagggtgacgagggactccagctgggggagctggcgtgcagagcactgagggggtgggtggattgtggggtgaaacctgggtgtgtgcgtgtgaggatgcacatgtgtgaacgtgtgtgtgagtgagcacgcctgtgtaaactgcctggctccacctctgatgggctccgtgatcttgagcggggtcaccaggctcatgcctcagttttcttcatctgtgaaatgggccgatggccaggctgcacacaggtcctcagagggcataaggcacactcagcacccactgctgtgcctgggcagctggcgggggggcacagcagccactcacatgccactcacatccctgtgggttaccggctgcctggaatgttccagtctaaccggatccttttgtggacggggagactgaggccgggaaggagtatgcattcctgccctggtcccgggctccgtctctgctgggtctcctgggcagaaggtcaggaagggctgagagggacacagtccaaggcaggtaaagccccagctttgaggggaggcacagcagctctgagagggtctgagcccctcgagaccctccccgggatgtttaacgacttgggcagccattgcaacagtggaattggcactgcagcaagctgagcattttttcggttccaagtttcccacaacacaatggctccaggccaggcgcctctgggcgttccaggtcagagggggagcaggggctgggggccgctgcctcagtgcttctgggatggggtcctggcttggagccccaatccagagactcagcagccctgccccggcagagcctagcggagcacgttgggaaccctgtggacactgcacacagcaccctctgtcctcacggagcctggggctgctgcagggccgtgggaaagaagttataaatccttgggtgctggaacccccgggtgctgggcaccttgattccaaggctggtgccttctttccttctgcaagagtggggggtggaagacagccggccagaggctgggaagcctgcacaggggagggcaggagggcgtgagcctggctagccccacctccaggcacagaggccctcccgccgcccgcagctccagccgcactgccccgatggctccctacccctgtggctgccacatcctgctgctgctcttctgctgcctggcggctgcccgggccaacctgctgaacctgaactggctttggttcaataatgaggacaccagccatgcagctaccacgatccctgagccccaggggcccctgcc

SEQ ID NO: 27645 - DNA, 2300 bp, Homo sapien
tcgtcgcaaaacacgcagttcagtctttaaaaatcagcaaacaccgtttccaagcacagtaatgacgtgatcgactgcgaataaagacctgggaacagcctgcccagcaaatggtaacactcggcagaaagtggggccgtcacgaacgctggacaggagggttcaagttaaaaacagtctagaaggtctgaaaggacagggagggcatctcatggtgcccaccgaacggtcattaccgaccgcctggcaccccacagccaagctgcctgcgatgaggaccacggcagacaaaggacagtcggctggggggcggcacggggcccacccactgcaacagggtacacgcacgcgtgtgagtgtggggtgatgatccacggggcccacccacagggcacacacacgtgtgtatgtatgtgcatgtgtttgagtgtgtgaatgtgtgactgcgcgtgtgtgtgggggggtgaggatccacacgtacacataccacacatgcacacacagcacatatcacacaccacacattacacaccacacgtggacacatgcacacacattacacacatgtgtgcacacaccacacattacaccacacgtggatacacttgcatacacacactacacacacgtgtgtgcacacacaccacaggtggacgcatgcacacatgctacacgcacgtgcacacatcacacgtggacacatgcacacacaccacacattacacataccacacgtggatacacacatacacataccacgtgtgcacacatgtgcacaccatggattatgcacaccatacatgcacactcacacatcacacatacatatcacacatgtacacaccacactcctcacacacacaccatgcataccacacacacacacacatgtatgtaacacccaagcaccagctgttgtggaggccttcggggaacctgctgtgacctcccgagggatgctgcccgcagcttcccccaggcgtggctggcgaaatgggctcaggcgggagacagtctgctgggcctggcgccctcgtactttccgggccccagagactcccctgaagggctcagctcccgtccgtcccctgcttgggggaggagcactgagagtgctgggtgcggcccatggtggtgccttccctgaccgggcccccggatgttgtgttccagggcgacaccgggccacaaggcttccccgggactccaggggacgtaggtcccaagggcgacaaggtgagtctccgtggctgggtggggccccttcctgtgttggcccttggctcaaggtgggggctgtgtgcgtgcccagggtatgataggcttgtcttgtgttcccagggagaccctggggttggagagagagggcccccaggaccccaagggcctccagggcccccaggaccctccttcagacacgacaagctggtaagtcccgcccttggcttcctgcgacccggggtctgccctcctcaaaagcaggcactgcctctggcccagaagtatcagctccaccctcaggggcttgcgtggggtcttggctgagctgaggggtcacaggtgtggtgggagcccccatccacctgccttcaggcttctctgggggcagcagaggggccgtggtttctcagctccttgtagaaacagctcgatatgcagcttgcggggcaggggccaggagtaggccaggcggggggccgagctcagggcaacgtgtctctccggctcttttcctcagaccttcattgacatggagggatctggcttcgggggcgatctggaggccctgcgggtgagtggcccttaaactgcagcgctgcccgatgtctgtgcccatgaggaacaggccatggacccccaagattcagctggggtcctgtggggggtggggatgaggcccgttctgggggtggtggtcatccctggtgggtgccacatgggctgtgactatctgtgttcgcccacgtccagggtcctcgaggcttccctggacctcccggaccccccggtgtcccaggcctgcccggcgagccaggccgctttggggtgaacagctccgacgtcccaggacccgccggccttcctggtgtgcctgggcgcgagggtccccccgggtttcctggcctcccggtaagtcctgcctccaccgtcagtgtcgggagccctgtctgctgggagtgaggggtgaacaccccacatgggagcccctgccccgcctcaggcctccccagtccccgcctcctcacctcatctcctctaggagctggcgggcagttgctgactcggggccaccctggggt

SEQ ID NO: 27646 - DNA, 2300 bp, Homo sapien
tcaggcaaacccaccagtgctgggggctgcagagggaacccggcgctgtcagacaccacctcagcgagaccccgcctgtctctctcttgcagggcagtttccgtttgactttcttcagttggaggctgaaatgaaggtgggtgacctccctgtggggttgggggcccccaaggtcctgtacatcccgctgggtggctgctcccaatttctcgccccatccggcccaagcccccttcctgttcagccctgcgaggggcgctggctccagagggtgtcgagggcgtccctcaggatgttcctgtccccggctcagtttttgggggactcggctgatgcagtgggaggtggggagtcgagccctattctatgcagccagcagctcccaggcctgggctccggaagcttctgactgcccagccctggctcggggggatgggaggccacctgtggcttgtaggggttcagggctcccgtgtaacaagtgtttccgtccacagggggagaagggagaccgaggtgatgcaggacagaaaggcgaaaggggggagcccgggggcggcggtttcttcggctccagcctgcccggcccccccggccccccaggccccccaggcccacgtggctaccctgggattccagtaagtcccagcctgtgcaggcagagcccatgtcccaggggtctgggtgcaggagccgagggcaggtccagcccggccttcgacacccgcgaaggccggagctgcccctgcaagctcagcagccccgacatgtccctgtccccgtgtggggacgcagcaggccacatgggtgtgggtgcactgaccccggacaccccccgtccccctgcagcgttccatggcctgccctcctgctggggccacgtgcatccacctctgctcctgggccgggtcaggtcagatcagggtttaggcccatcagtcctgaaagactccagagagccatgggccccagctactgcctgggggcccacactgttgtcaggtctctgctggtctctcccccgggatcgcacccccagggaagaaggggtgatggtgtgggggtttctcaggctatggcgtgggcagggaggggaccggtgactcagaggctgcgctcgccaagggggtcttggcagctgcagccccacaagcttgcccgcccccagtccagggcacgaggtaaccaggaagcgtctcttgtcgccgtccgtagggtcccaagggagagagcatccggggccagcccggcccacctggacctcagggaccccccggcatcggctacgaggggcgccagggccctcccggccccccaggccccccagggcccccttcatttcctggccctcacaggcagagtaagtcagtggggagtgggccccgggcagaggccgcctcgtgtggcttcgtgttcccaccttggtttctctcctgcagctatcagcgttcccggccctccgggcccccctgggccccctgggccccctggaaccatgggcgcctcctcaggggtaagtgtctgggcagccggctgggcacctgcgtcccgtgccctggctggttctgcagcccctgcccctcagagacactctcccacggaccccacagggagatatacaggaggccaagatgcggtttccagggtggaagcggggccaggccatgggggaatcaggtggacccaggaggacgaccaccagccgggaagtgcccagggcctgtacattgtccacggaggcgcaggagctggcggcaggcaggggtccccatggtgctcatgggggcagccgcctcagtccacacctgtccaaagccctgcggcccctgcccagcaccctgaaacgggcattccttccttccgcccctgccccccgccctccccgccaagccccacacctctgcatttggtcccagcaggtgaggctctgggctacacgccaggccatgctgggccaggtgcacgaggttcccgagggctggctcatcttcgtggccgagcaggaggagctctacgtccgcgtgcagaacgggttccggaaggtccaggtgagcgctctgtgtgacgggttctggacccgtggaagggccgaagccgcctcctggggcttaaggaaggcgagaggctcaggccccggacagggatgggagcaggtggcagccagcgcttcttaaactttcaaacttttggtaaagtttagtaaaatacttttgtgagcagttttgggtttaaagaaaagtgagctcaagcttctgaaagtggatgaacacatggcgtgtgaggggctcctggtgggtcat

SEQ ID NO: 27647 - DNA, 2300 bp, Homo sapien
ggcacgtggtgagtgattgctgcggcttctgagcacggctgggtctgtggggcctgagcagaggtgacccgcgatccggcgccacggcaggcaggactccccacccttgctgctgcctacacccccagggcagccccagagtcgggggcgcagctccctgcttgccagttcagagcccagcccctctcacccagcccagaggaggacacagatggaggaggggcacccggagggtccccccgccgacaggccccacgtctcccacctgcaggacaatgaagtggccgccttgcagccccccgtggtgcagctgcacgacagcaacccctacccgcggcgggagcacccccaccccaccgcgcggccctggcgggcagatgacatcctggccagcccccctcgcctgcccgagccccagccctaccccggagccccgcaccacagctcctacgtgcacctgcggccggcgcgacccacaagcccacccgcccacagccaccgcgacttccagccggtggtgagtgcccccccaaagtgggcttggctccatctagcccctcggctctcggcagcagaagagggcccagcccctgcagagctgctgggggtcccaggcttcggccatgggtgggggtctggcggctcagggccactcagggcggcttggctggccctgggacttgccctctggtggccaagcagtggtcatgaaagtccagccgctgtcacatccttgaggaaccggcgtacctccgcctacagcggcagctgggggcacccacgtggcccggggctgctctgacctggcagcgtatgggggctgctgcctgggcccctcagtgtgtcacttgcgcgcctcccgctcagcgcccctcggccgtgcctgtccacacaggtgcggggccggggtggtgcgcccggggcctgggtgcagggggcagcgtgggacacagcccgtgacgcgcccctctccccgcagctccacctggttgcgctcaacagccccctgtcaggcggcatgcggggcatccgcggggccgacttccagtgcttccagcaggcgcgggccgtggggctggcgggcaccttccgcgccttcctgtcctcgcgcctgcaggacctgtacagcatcgtgcgccgtgccgaccgcgcagccgtgcccatcgtcaacctcaaggtgggtcagtccagtcctgagggcgcgggctcctcggcccccacttgacctctggggtgaactcccagcggggagctcccctctagggcctctggaggccaccatgttacagacactggcgcctaggctggcgacttcagggcaggctccgggtgggtcacacccctccaggctcaggccaggcctctgcatccctgggcactgccacgtcccccagggcatcccatgaggcccccccgtggccccctgaccccccgctcccccggcagtgcccctcagagggtcccatgctgctggaccaagtgtccacacaggtgatagggctcacatacaagcctggaatcaggaaccgtcctttgggcctctagtgccatgcgggctggtggcccctctgccacagcacccatgtggctttattctgtggccccttttcgtgcactgggctgtggcttctgggtgccccggggagcacccacattccccagaaccaacagcagaggggtcagagacccagggctgggagcaggcggctgtggcctggcgttaggggacagggtcccctgccttagccaaggcctcttggggtctgcagaggctgcctggccaggcctggctcccccacgcttgttccctggcaggacatgcccaggggctgcagaaccccaccccccaaaaaaacacacacccacaacaccccacatacacccccaaacaccccccacaccccacacacacaacacaccccccccccacacatccacaccccacatccacacacccccccacaaacacccacacccatccacacccccacacaccacacacacatacacacggtttctcttccaggacgagctgctgtttcccagctgggaggctctgttctcaggctctgagggtccgctgaagcccggggcacgcatcttctcctttgacggcaaggacgtcctgaggcaccccacctggtaggttcccagtgccgtgtgagcagctctgagagccccagccagggaaggcgggcgggcgggctcctatctgcagtttccccccgagtttttggacaaatcttatacatgctcattactttaaaattacaaaatccaaaagagcattgagaaaaatg

SEQ ID NO: 27648 - DNA, 2300 bp, Homo sapien
actgcagcctcctgaaccctctgcacctccgggaatgatcaggtccctccctggtgtcccagggacatctccagtccctcctgcccctggcagctgcgagaatcaggagagatgtggccaacgctggtgctgctccttctggtcatcgtagcacagcttccgctgccgagatggagacgggctccatgtgcaggctgctgggggttgctctgggcgcgaagccctggggatcagctcctggtcacctgctgtggctctcctcaccctgctctgccaggcgggacgttctggccctcatgggcacccttccgctgtctcagcaccatgggggggcagcaagcaccaccaagcaggggactcgggagcagacaccgcaggccacgcagaagcaggccacctgccaggttccgaggggttcttgggaaatggtgggaaccccccttcaggcctgtgccaggtggtggaggtcgggggggctgtggtgagcactgtggcacctgctcctggggctggcctctgaccgctgtgcagtgttcagggtcagcctctgagctggaggagggtgagcctgggagcaggcgtcggggtgtagggtgccagtgtcccagccaggccctccccacccgcctcacccggcctctctttccagttccagttatactccgtgtacttcctgatcctgtccatcatctacttcttgggggccatgctggatggcctgcggcactgccagcggggccaccacccgcggcagcccccggcccagggcctgaggagtgccgcggaggagaaggcagcacaggcactgagcgtgcaggacaagggcctcggaggcctgcagccagcccagagcccgccgctttccccagaagacagcctgggggctgtggggccagcctccctggagcagagacagagcgacccatacctggcccaggccccggccccgcaggcagctgaattcctgagcccagtgacaaccccttccccctgcactctgtgctccgcccaagcctcaggccctgaggctgcagatgagacttgtccccagctggctgtccatcctcctggtgtcagcaagctgggtttgcagtgtcttccaagcgacggtgttcagaatgtgaaccagtgactctcgggcgcccctgtggtaactttgcaggcggccctcagtgcatccccacgacccctgcctcgagggccgcctgccttagcaatgggggcctccgcttatcctgctagcaggccccctaggattccccctgccctgtgccgcactctggcggtggccacagcgtgctggcgacactcagggcagctgcctggccatgctgtccctgcactgtgccccgcgggctttgttgctggaagaggtgggtggtgggcttctgcgtccaccaggcctcactggctcatgccccttggggggcttgagacaaatcctttctgccccccagggctagtgaagtggcctcttggataccagctcaggggacactggccccacaggagttgtgagccctctagggcagggtgggagccgggaccctcaggtgtagctgagctgtgacattgctggtcatccttggtgctcttgcttttttgaaagatgctttttttttttttaactgacgtagaatgaagaactgcatgtggcttctctgtctctgtggaaaagccatctcaggttggcggcagacacattgtcatcagaggggagcagcggctctggtcctcggagctggttcctctctcccaccctaagggcagccctccatggtcctgtctgtccttctgaagtgtgtccatcctgacctgcgggtcctcagctgctcccacacttgtgccagcccggaggggactggtcccggtcaccgcggacgtgctggccttggtatgtgccaggcttgcctgggctgggcagccttgggggggctgcctttgtggtgggcgctggggaagtacgtcccagcggcctcagggtctaaggagcgctagtgccttgcccacaggtgcgggaccatctgatgtgatgtgaatactcttcccacatacattaaacacacttaagtgagtgtgcgcagggcttctgattcagggccggcctggcctgggggttgagggtcagcagtcagtgaggaggccaggagaggcgtcccagccttctcccgcctccagcccacgcagggccttggtgcccatgagctgagcacccccacaaccctagtcaacggccctatcctgtggggcctctgccacatctcagcggccccaggtgaatggctggctgctcagcacgg

SEQ ID NO: 27649 - DNA, 2300 bp, Homo sapien
aggctcgtgagggcccaagcacaggatccattcccagatgccagtgtcactcccaagtcacctgcgtttgtaaatctctattttgggtggagccctctggaagcccacgccccactgtctgtggccactcctcgcagtcctcaatggaggtttctgtaagttcttcacgagtctcctggctcttccctcagagcagctgcctctagattacaactgccaagtgctgttggtggcagaagccctacctccccactccgaagcagctcctgcaggaaacctgggccttgtgtggctggggaactcccaggactcctgccacgcagggggacccgagggcagcttgggcaggcccctcgcggccgggggcggattcgctcggctacacctgaccggagagacaggtgagggactggtctttgtgggtcctgcggggtccccttggggctgtggctccctgccttgctgtctccaggcgggaagggggtgggagccatccttctgtgggaaggggtctaggagccccgctgctgttcatccccacttcccctcggcttcctggcctgtcctgcgtgtaaagggagcaggctgccctggcgagctggccccatggctggctcctctctgcctggagggaaggaagggcccctcctcctccgcgttgcccctcctgtcttccagcagggccaggttctgcccacccgtggagaaggccagtacaggggagagagccagggctcccacaaagcagggggtccctccaggtgaggcgctccatcctgtagtgttcccttaaattctgcaagctaccccagatcccccatttccagccaacaaatcctttttaagttcctttgagatttgttcgtgtggcttgctacactcaggactctggaaagaaggcccaggccagagctttgggcaggcggccatttagggcaagggccctgtgttggcttcctggtggggttgccctgctggtgggcgggagaccaagagcacccccgcaacaccaggaggcaggtcgcggattgtgctgtctacactccggaaggggtacattccaggggctgctgccccagactcacccctcgcctgggacccgcactcttgagctgtgggtaccacggtggccgtccccttctgttctgtgcagtggacttcctggctcctccttagccttggggcccccacagccctcggcttggcttccctccccatagccaggccctgggtaactccaggggaaagtgaccctgaggccccccacttctccccgtgtcctgcacaggccttgggctttcggcggtgctgtctgccgcagccccacgccttcctgggagagtggcccaggccccccttcctgagtgtgactgcgctgccgtctgcgaggcctgcgcgggtctcccccgggctgtccctgctgggatggggactggtggccccgggccacgtcctggatccggcttgctccttggtacaagcccgtacgggtcacggtcaggcaggagggcgggcggcggggtcccgggggcgccgagttcggggccgtgcggtccccaagagcaggctgtgcgtgtccctgttggagccccacgaaggcggcccagggccacccctgagggcgcgtgggcccgacccgcgtcccggatccagcttgcggccaggaatgcaggtgttccagggtgccaaaaggaaaacgcacaaggcctcgtcgaggagggggggtcaggaggggaccgggggtgggaagaacgcgggggagagggatggcagggtgcccgcccgagggaccgacacctccgcgagtggcaccccaggatgctgacgccggcgggggtgggggcccgaggggcggtcggggtcagggggcggccccaggggtagggccgcagcacgaggggccgcgtgaccccggcggtgaccgggtggggagaggccggcgccggggctgggagacggccgtgggtgggagggtgccccgtggggacgctcctgccgcagcgcccggccacgcgcgaggccccgccctcaggacgcgttcggcgggacggacccgcccaccccgcagccgcgcgcccgccgcgccgccttgtgggcgctgtagtcccggagtccgcgtgcgcggggccgggtccgggagccccagggcagccgccccgccgagtcgcaggtaccggtggggaacggggccacggggccgcgtgtcgggggctgcggggtgtctcggggccctggggtgagtgcggggcgcgggccgaggtttgcagggccctgtgaggtgagtgtgggggctggcgctg

SEQ ID NO: 27650 - DNA, 2300 bp, Homo sapien
ccttgaagaggtctctgggtgcaaggcaggtgctttgtgaaatactgtcataaatgtttaatgcagcataaggagccacctacgaacttagtggcctgaaaccccaatgtgttatctctcactgtgctgggggccggcaggatcagcccggtgttctgttctcatgttggtccttcacatgggtgcagtcagatggcggccgaggctggaatcatccgaaagcttcttcactgggacgcggtcagatggcggccgaggctggaatcgtccgaaagcttcttcactgggatgcggtcagatggcggccgaggctggaatcgtccgaaagcttcttcactgggacgcggtcagatggtggccgaggctggaatcgtctgaaagcttcttcactgggacgctgtatctgctgcagggatctctccttctatgaagcccctccctttgtccagctggggtttcctcacggcatggtaaggccagcacagttggatcttatgtgctggctggcttttcccagagtgagcaatcccagagggaagaatttgaaggtcgaccccagaaatggcacagcattgcttctactatactgtattggccaaagaacccgcccagtttcaaagacaaggaacacaggtttcaccttttgatgggagggctgtcaaagaatttgtgagcgtctttaatcttctatgtcagcaagtcagtgaggttcaaattctgaaagccactgccaggggagctggaagacacagggagggtgggaagacagccccacaccccgagtgcgggtcaagttctgtaaggatgagttgccctctcctccaaggcgagaggagtttgaggtcattggtttgcctccacgaggcaggctggtctcccccaagagcagggccaggtcagaaacggtgctggtccgtgctctagcaagccagccttgatgaggagacccatgctgctgggcccaggccaagctttcagcctttctctctggtgtgctctgttcctggctcagttggctgatggcacaggctggctcgtggccactgtccggccatccagtcagcctggtggcctattgcgtcctctgcaggagatgcttcctggcgtgtgttaacgtaagacacaaatgcctccatgtgtggggccctcttttgtaggaccacctgcctgcctcttccctcacatttattatttccaatgttctgatcttgctccttttgggttgcttgcctaggagcctgtgaagatacttaccatgcggtgtttagcatttgttccacagaactgtggccttgagtgctgtgtgcacagctctgaccaggaggacttcctgcacccagaggggtcgtagggtggcagcatccatgcccagctggaaccaacatattgtgctgctgcatctgtgtttctggctagaaacgtggcagtgtttccgtcttcctctatcagttaccacagggaacccccgcgagagtgtggctataatcagacaaagagtaacggtgcatgggggcagacagcacagactccgcagcacccggaatgcacctgtgtcctctgaacctgctcaggctgtttcccttgtgcgctgggctgtccctgcagtcacccacctgtggctcggtgcactgatgatagccagctcacatggcagctctgctcacacagtcacttgaccgttgagttgcgtagtcagtctctgctaacgccaagcatgcccacagttgcttttgaaatggagggtggttctttggcactgaaggcacggccttgcttgataactccaagggatgttctgtgactgtcatatcagtattcaccagaagcactgccatgctgttctctccacaggaacttccagaaccattgactctgctgatcccacagaacaagtggctcaacagcttgcactgtggcctggacctgatgcggagccttcccttgctctgcgtcccactggaaacaggtactttctggctctgatactaggtgggttggaactcgttccagttgtggcatacgctatctctgaaatctagaggcccaccaaagccggtgcctccttcttaaaggaagaagattcaaggtgcaacaacttgccatttacatagaagacatgtcctggcatgccctgagtcactagatcccccaggtcttcactcctgggtaggtccctgagtcttcctgggggttggctcccagtgtcccgtgcacaggtatttcctagggcagataggacacccccgtgttctgctcaccaggcccagttaggatgcagcaatgcagcagcccccagcctt

SEQ ID NO: 27651 - DNA, 2300 bp, Homo sapien
tcaggaacatgaaggaagcacatcgccagtgcttattcaggaggaatgacttgtttctgtattttcttatcaacatcatccacagttactccagagaacagtcgtccctgtggaagtccccatagccctaaactgaagccgatgtctggacatgaggggcctcctagggaccatccaggaggcaggagccaggagacaagcccccgacccctcaggaaggcagacaatggaagagccgcgctggcaaaccctcccaggaccagcatggcactgtcctcggtgccctcaccagtcccaggagccccacggggaggggcagcgcgcaccctggggtctggcaggcccagcccgccgggagagcacattcgcagctcctcactgtagctgctgacttggtgtgactgaggggttttctctatttgagctgtcctcctatttaacttgttgtttctaccaacttcacttcaggaccataatttttatgaaacaaaaaatctgattacctcacctgttttcatctggccaatgcccgccccaacctgatgatgcagatggtgctgtgggaagggtttcccaggccccagcctggccaccctctcctctcagcacagatatcctggcacccctggagggtcaccctggtgcccagtcacccaagtccacagggatatctgctcatgcctctctgtctatccccaccttcccctaaagggcaccatccccaactcagcagctgcccactgaccctgcaccatgctgtttcaggcacacccatgccctctgcacacacaccagcaggtgtccattctatgggctgtactcacacatggacagcagcaagtccacgtctcgccacaggctggcccaggccccatggcccacccggggcctcgaccactgatccttcctgtccagctccaaggctctgcagccaaactcccagacctccccccttccaagagcaaagcttctccggcatagccccagcccgttcccaggaagcgcacatctgtctccacgcttataattatcacttagcaagcacacagacgatggcaccactctttcccttgctagaatgtggtaaatggaaaactaacattataaagctattttttacattctgtgatttgttttaaattaaaagcttgaaaacactcttgagctggctgactccatgtaccccaggtgtactcctaagcacagctgcctgcccaccgtccagaaaactgcagcaaaagcttctctgcaagccccctgccttcagcctgcagctgaagtttctgagagaggctccatggtgggcagcagggttaacggaagtggtcagaaatagggtcagaacatgcagcacccctcacttggcgggttaactaatacacagccagcttgttttgctatagcacaattgttgaattcaagaaactttgtattactggccgaccacggtggctcacgcctgtaatcccagcactttgggaggcggaggcgggtagactgcctgaggtcgggagttcgagaccagcctggccaacatggagaaaccccatttctactaaaaatacataattagccgggcgtggtggcgcatgcctgtaatcccagctactcggaaggctgaggcaggagaatcgcttgaacccgggaggcggaggttgcggtgagccaagattgcgccattgcactccagcccaggcaacaagagcaaaacttcatctcaaaaacaaaaaaaaaaaaaagaaaaaaaaaagaatgagaaactttgtattacaaaagcaattatctcactaagaacaaaagggaggagctagacagcttcactcacaaataataaagctattttttttctgcagatgtttcaacaggaaaagccatgtatgacattcaaaacaccgtattattagaagctcatttaattgtttaatgcagacaaaaatcaaggctaactaaaagcagatccaatgacccagtgatcaacctagaggttcccacggccaagggcaaagggagggagtgccatgaagcagcttccggggagagagaggaagggggcctgcctgagaattcgctctgtgtgggcagtgcccacgtgcaaccagcgacactcgccagggcactgatgaaaccaaccgccagcgagcagcacgggagacccgcggggagggcgcggccctggctctgccacctccctgctcccggaccacactggtgggcgcaggcagacgatcctgatgctcgaccacggccgcatctcatctgggggtgccctctgctattcttatcctacaggcgttcaaccc

SEQ ID NO: 27652 - DNA, 2300 bp, Homo sapien
ttatttctgttcactaaattataaaaaatcaatgacaacccaattgcaataagcactcctaatactcacgctgtggtctctaaatactacttcccaaatagtattattattattattattagaacaaaaacaggtctcccaaaagagtttgattccaggtggtctgtggaagaaaatataaaaggtaaggtgggaacacatacgacagaaggcaataaagccatccaagactgatgtggttacatcagaaagcgaggggagcccaaaaactacagaacagtttgagtaaagaaatggcagctgcactggccaaactccactgtgtgtataacatccaccagttaacaatgatgcttcacagggagagaaaagcagggaaagacacaaattcacaggacaacactggggcttccagaaaccaactcatcgcagtgagaacaactgagtgcaaagaatgaagcatctatcctgcctttctggcatgaaccatagtttaggtaaccaaacagccctagtggatgaggcaaacgttattccacatagatgaatcccaactaataagtacagaaagaacaacacaattagaaaatcaccgttctgcagcccctaatgtgtactgcatccaggcaatgaccatcaatgaatattgacagcaagctgcaaggctggtggggaacccagcagtggcggatcaggctgaccccctaagctcaatcctcagtctcagcaccagtgaaggagcggccagaccacacgcctcatcatgccatgcggtgcaacgtgcagtgccacctaggaagctcgctcgcctcacaggaaaaataaatctgagtggaatcgcacctcagacctaccagggcaaatatggggttgcaggtgggctctgcaccatgccagaggaggcagccagccaaatccagaacgcaggcattccacacagccgctacccccaagaggcagacaacccagggctacaggtaggccttcgacatgaaaccgcccgcaggagaatttccacaggcacgtagccatgccctataacctgaagctagggcgccgtggcctgttctcacagcgccatccctaggctccaagagccagcatcctgggagctctgcagcgctgtgctgctgcctgtggcttgcacacagatgtcacataacatcatttccgctggaggcacatgcctgcccagattaaagggagggtcacgatcccctccctggcgggaggtgcatcaaagtcacagcacaagagcatgtggaacgggagatacagaccacagtgaaacgttatttacattcactgcattggcaaacattcagaatgttggtggactgtagatcatccgtggcgctaacacgctgctgggggatgggaattggtacccgcgctttgaaacaaaaactgacatggtcctgaaagttcctgaaagttcacctttcacagactttatgatgcagcaattccacttccttaaaccaaaaacacctcatgtgtgcaccaaaagaaacacacaggaatgtccacggaagcatcactcacaatggcaagcgagccgcatgaccctgctggaaaaacaaataaatgatgcctattcacacactggaacactatgcagccaggcacacaaactgcagctctgcccagaaacacataccaacctaagacaccttgtgtgtgactaaacagaacaggtttgggaagtctatgtagggactgatgtcactttctaagagttcagaaacaagcaatcatgtgtaataaaataaaattattttaaagagaagagatgagaaaacaaaatgcaggatcacggtaaagaagaggaagcacccacggcagcatgggtcatctcgcttagcctggtcctggggtcacggctgttcatgagaaagctatgctccgcagctcacgttacgtacgtgtcatatgctaattctcatgtcacaacattttaacgaatatactgggaagtgcagccaagtactgcaagcagaggagccggcacacgtgatcccagaccaggcagcacttacaaaggatggcaggaaggccaagacgttgtcacggagatgaggcccagcagggcaggaaggcatgaccagcaggcctggctacaggcagcaagcaccaaaccccattccagatgccaggaaaggcacacacaggcctggcgcaggtgggctgtcttctggccgctccctgggtggactggtcttggagactggacggtaaggactggggagagtcagggtccactttggaggcagaattgggagggtttgaatcagatgagt

SEQ ID NO: 27653 - DNA, 2300 bp, Homo sapien
catcaggggcctgctctcaggctcccctgggcgtgtgcgtgaggttggaagaggcgggtcactgcaggaatgtgtcgttctgtcatgtcactctctcgatgtctggtctcatggggttccttaccaatttagggacttgttagggagatatctagaactatattgatagatatacatcatgaaccagttccccttaggtgtttctaaaatgatataaattaccaaggaaatagcctttggttaaagttcattattttctggtcttgcattgttagcatagactgctgtctgctgtctgtgccatttctatttcatgtaacttactgaggttttctttgtgccctaatacaagctagttttttgtttgttttttttttttaacgaatgtttcaagtatgtttaagaagaaagtataatctctattattggagtacaaagtttgatgtaatgtccctaagacctacctcctgttactagctctctgtcatgctgagttatttttgaccccttaccttgccatggctgacagtcatgtgttaatgattgctgttcttaggtttctgtttctttccccaacatctatagtttctgcattataaagccagcttccgtgtttggggttctagcagattcttaactcatatggcttcgccgcgcactgggtcctccggcatcaagaagtgcccttcttggtcttgcttcctgctttgaggtgaggctggaccttgtcccacagggagattgcaatccctgctcttcagcctggtgcgctggcctcacgtgcttctgctcattccttgacactgagccttttcaaatcacttggcaattgtcatgtctcttgtgtaaagcagagctggctttgtgagccaagtggaaatttttcacagggccaaaaccatttacatttactcatgtgttgctaggaccagtatgtccagtcccaactgccacataacttgctcctgtatttaatgtgtgtgttgtgttttatttattgtgcatctttttattttttacatgtggtttgtgtctttgctttttttttctgttgtttttggcatttaggaaggtctgtgttttgttctgctggctactgttataaataacacctctcattgcacccttagtcccttgtttcttcctctgacctctttattttggcttgtctggtgggattcttttctcccacctatttttcatgcttcagtctatgagcttattctacattcctttttttctgattcatctacctctgatttatttgctgtatttttacttttgcagaacagcatgcttcccgataagaagctgtttcacagcccacctccatccttaccctcactttctcttttagtctgtgctcaacagatttgttatttttgtttatgtcaaatttcccagtggtctcttggcttgaggaagattcttttgtagtgggtttgggcctggaaacacagtgttcattgagttcttagctatttaaaactatttctctagagctttaattttgaaggacagtttggctgacataaaatcctttggtcacactttatttttacttgagtttatgaaaataattgctccactgttcacttaccttgtacattgcagtcaggaagtccgatccccatctgattttcttccctttgtgaataagctggtctttttgcctggagtcccaaagaattttctctcagttgtaatcattactggggagtgccttcagggccaccgttctgggtcagtttgttcaagtacatgatgagcctttcaacttgtcgattatttttttcctaagaacatttctaggattttaagtattaggtctgtttcgtagttttgcttttctgttttgggaactccagtctttgtttcttgggtctttgttggcctgggctctgtatctggcagcttctctgcgcgtctctcacctcttggtcagcctcatgttctctttgatgttctcagtcctcctgcagtgttccttatgcagtcattaccagtagagggtgtccaggtggcatctcgaacaaaggattggacaaaacgcacaaacaaagcaaggaaagcaaaagcagggatttattgagaacgaaagtacacgccatggtgtgggagcagcctgaccatcgggactcaggagcttacagaattttctggggtttcgatactctagaggtttcccctggttacttggcgaatattctatgaaaatgaagagaatgaagtgaagtcagagtcatttactcagaatgcaccctactgtaaatggagaggatgctacttggagtgtgtgg

SEQ ID NO: 27654 - DNA, 2300 bp, Homo sapien
aagaacatttctaggattttaagtattaggtctgtttcgtagttttgcttttctgttttgggaactccagtctttgtttcttgggtctttgttggcctgggctctgtatctggcagcttctctgcgcgtctctcacctcttggtcagcctcatgttctctttgatgttctcagtcctcctgcagtgttccttatgcagtcattaccagtagagggtgtccaggtggcatctcgaacaaaggattggacaaaacgcacaaacaaagcaaggaaagcaaaagcagggatttattgagaacgaaagtacacgccatggtgtgggagcagcctgaccatcgggactcaggagcttacagaattttctggggtttcgatactctagaggtttcccctggttacttggcgaatattctatgaaaatgaagagaatgaagtgaagtcagagtcatttactcagaatgcaccctactgtaaatggagaggatgctacttggagtgtgtggtctgtataaatggagaggatgcatatgaagttacaaagggtaaatgccgtgaacggagagggtgaagtgcagttgcaaagctgttcacatccctgtcattgctgaggagctttcatttgatttagttctagggagtcagcctggatggatcagccttctgttccctgcctccttctgttgtcctgcctcacactcagctgaatctctctcttttggtaccttgtaacttagtctcatttctaggctaattgtgtcattctctttcatttctgtcctgggttaaattaattctcatttcacagttttttgttttaactgtacatttgtgttcctggtgtttttagtgtttcatttctgtttctcagcttttactcattttgctttggactgcagcgctgggtgggagttctcagttccattagctgaagaagttttagtgcccacaccccgttttcctctctcagagccatgaaggacttcaggagtgtctgcgacttggagaacatcatttacccaaagggattttgcatgccttttttctatttattttaaaagcacttggattttcctgcactagcagtaacaggtgtttctagctgggaatggacatgccaagggacacaggtggtttaccaggtttctttgtccaatagcatccttttttgttggtcagcaaaaatgtaggttctttttagaaaaaaactgaatggtgcatttggagatggattaaatctgtgtcttcttatgccttgctatgcttttatttctgtaggaaactgaatttctactctttccatccttccttccctttttctcccaaggttccaaatatgcctttttttttttttcttttttgagacggagtctcactcactctgtcacactcaggctgcagtgcagtggcgcaatctcagctcactgcaacccccgcctcctgggttcaagcaattctcctgcctcagcctccggagtagctgggattacaggtgcccgccaccaccctggctaattttttgtattttggtagagatgggggtttcaccatgttgcccaggctggcctcaaactcctgaccttaagtgatcctcccgtcttggcctcccaaagtgctgggattacaggcatgagccaccacatccaacctcaaatgtgccttttttttccaagtctctcctctaagaccatgctgaaattgaagaaattagatgaaatttgttcactatcagtgaaattagaaaaccagcaatgtatttaaattaatatataatttaataaatattgttttaaaatcagtgtagatataaggaaatacgtaagtaagtgcaattttatcaaaacatttcatgtagacgtctcacttgtgaagtggaagcctgcctttgggttgagtcacctcatttggggtgttggggggaagagccccaggggggagcgcttgctggcactctgtctccacactcacactgtgccttgtactcgaatgctgaagaggtgttgactgctgtgttgaaggcaagaggcagttccgttgaagcccagtgctggcggagaggccctgcactggtgcgctcacacagccctgtgtttttgtgttttaggtcggtaggctccacgacaaaagtcaacccttctgtaaatcacctgctgtggttatgatgctctgagttcaatacgtctgaacctttgctgtctatggatctgctctaaaccttatagcctgcttatgggggaaggtgagttactgtcttttgtttccatgtttgtttgtttaccaagagtgtatataacaaagtcagac

SEQ ID NO: 27655 - DNA, 2300 bp, Homo sapien
tccgaaccaccctatctccttcctgggcagggaggtttgagcaagacagggagctcgtagcagacatggccagtgaagatggccaggcagctgctctcactcccgctggctgtgctgcatcccaagtcccaggggccatcatcccagggaggaagattcatcacacctggaaacagctgggtccgccctcagatgaagagtgactggaaaaataaagccaaggatgccttaaagaccctcctggttgattggaggacttctgggcttggtagtgggcatgcctcacctcacacccaggagatgacggaggaaagggctgcccagggtgccatgagtctgggtggggcctgctgagaatacagacatcgccacagatggtgccctgcccacccagggcccagcaccctgtacccagtgcagggaggctcatgcagtcccaggggaggccagcaggccctgtgcccagagaagaagtgggaatcacaggtcagggtcagctgggagctcctgtgcctgggtgggggtcgagggcccatagcacaggggcactggcccgaggctgggcatctccaggagccggggagggcagcagcggctcccgtctacctcagtcagttcctcccaccccaggcccagctcaagtcagcccagacccgccccacatccccttccccacagtacttgaggtcacaccccagggccctggcgctgcggatccagccacccactccccatcttggggctttgagtgtgagtggcgctccctgagtgctgggctggccctgagtcagccaaggccccagaactcccagcaggacaggctgccccctgccaggaacggctcatgggctccagcccccacctcttcctgctggaccaaccccagctgtggtgccccccaggcccaggacttctgcctccttgacctgggccctggggacagttagacaggggactcacccaggagaaggagggcaggctaaaaatgctggcgctggagaatgttaatcctgtgtttccgacagaatacccaagggaaattaaggcaaacctcatcgtaactatgggattttttcctctggagtctataagcactttaaacatgctttttcacatagtgaagtgagatgtttccaagtctcctgtggagatctctgctgactgtcaccacgggccaagccaagcgctttggatataggtcccggtggagtcctacagggctcaactttctccagaacattcaagagaattgctccaaggggcagctccctgtgaagccgtgcagccaggcctgcagggccctgcgcatcccaggaggggccccggtggaggggccagcaccgcagggggccgtctgggttggcggccagcccttgtccagcagggtcttgtgggcaagggacccaccccagctggcctcccacaatgggactgactctccgcactgccacagagcctcccagggatgttcggggcaggcggtactctcaggaggccggtgtgtggcaaactgcagcccagggctcagcaaaaaggagccctctggagggacaggccataagacagccacacagagggtgtgggggctggaggtcttcactcccctcccccagcactgctgcgaaactcggggaggtgtggggagcgtggagctggtgcagggggctgagtggggtgggccggggcacgcctccccattgccaggctgcgaagctgctctaacgctctctctccctctcctgtcccttttcctagtccccaccgaaaggtgccaccattccctaccgcccaaagcccgcctccacccctgtcatttttgcaggtggtcaggtaagagccgatccgctcgcggcctccactgccaacctcagccttttactgcagcacccgccgctgcccgttagtgcactcaggttttctcgccttctcacgtgcacgtctcccacccgtgctggaggcagagctcttccacctacacccagcaccaggcggacgcagggggccttcagagcggcattcccccacagagacggccccacggaatcatgttctccctccctgacccgggcaggaagatctggctctgcctaaatccagttcccagaactgggtgtttttaggaagcttagatagccggcgcgcaggcgctttctaggtgattttacgtctcacgttggaaacagcatggtgagaaccagggtcttgtttccactgacatccgtgttcccaaactcccaggatgtgcttgtagcagggacgtgcgagaggagggagctctgcactgaggaaggatgcatggc

SEQ ID NO: 27656 - DNA, 2300 bp, Homo sapien
cgtgttcctatttcctttcccaaatctgcaagcactccttgcagataaaacagctcagactgggagaggccaagagaacacggaggtcctgaagccccctgtgcttgagtcaggagcccagaggctggtgccacagctccaagcaggcagcaccaaacctcagcacccacagccacagtgtggatgacatcagtggcaggtaaattgactgtacagtaagtgtacaaggccaggcacggtggctcatgcctgtaatcccagcactttcggaggccgaggcaggaggaccacttgagtccaggagttcgagaccagcctgggcaacatcgtgagacccccatctctacaaaacatacaaaattagctgggtatggtggcacatgcctgtgatcccagctactcgggaggctgaggtggagggatcacctgaacccaggagactgaggctgcagtgagctgtgatgaggccactacgttccagcctggatgacagagtgagccccttagataataataataataataaggaggaggaggaggaggaggaggaggaaaagaaggagaagtactttacaacttctgtaacgtaggtgtggggaaaatattgaaggcaatccaaaaacagtcactgtggagttgtggaattaagtatcaattttaaaggttttttcaaatgtttctttaacatggtttttggtatgaacaatttgtgtacgttttaaaattataagacatttaggctggtgttaggcaagtctcagcagctccagctttgggaaagctcttctgggaccttctgtgggccagggatgcatctggccacatctggagcccacccccaggtgatatcagggacagcccctctctcctctctctgtctctctttctgtctctctgtctctgtctctctgtctctgtctctccgtctctgtctgtctctcctctctgtctctctctgtctctgtctctctgtctctgtctttgtctctctctgtctctcctctctctgtgtctctgtctctgtctctctctctgtctctctctgtctgtctctctgtctctctctgtctctgtctctctctgtctgtctctgtctctcctctgtctctctgtgtctgtctctctgtctctgtctttctgtctctctctcactgtctctgtctctctctgtctctctgtctctgtgtctctctgtctctgtctctcactgtctctctctctgtctctgtctctctgtctctctgtctctctgtgtctctctgtctctgtctctctgtctctgtctctcctctgtctctctgtgtctctctctgtctttctgtctctctgtctctctctgtctctgtctctctctctgtctctgtctctcctctgtctgtgtctctgtctgtctctctgtctctgtctctctgtctctctctcactgtctctctctgtctctctgtctctgtctctctgtctccacacacagcatatataacaactatattgtgagcaactttgtcttcccacggtacaaactgaaatatctttggcaaatacgtatccgactatactgtgaagaaatattgacgtgaaaaaagaacgcggagatctgataaagcaacaattcagctcacggcgaggtcctctgcaggaggcggttggtgggaagaggcgagtgagcctgcccgtgcgtcccgcatggagacgtctggattggaaactaccgaaagatgtttcaaggaactctccctgggtgacacgctggttttcagacgtttgattcagctgctgcagtttcctcctccctgacacgggaactgaactgcaggccgcggcgagccagccagggaaaccgccttctccctgggctcggagctgctgccggttctggagggagagaccccagcaaggaggtggtgactcatgggccgctcctccccgccccgccccgcccctcccctcccgccccgcccctcccctcccgcccctcccctctcctcccgcccctcccctcccctcccctctcctcccgccccgcccctcccctcccctcccgcccctcccctcccctcccgcccctctcgccccgcccctcccctccttgccctccgctctcactctggctgggagcagaaggcagcctcggtctctgggcggcggcggcggcccactctgccctggccgcgctgtgtggtgaccgcaggccccagacatgagggcggcccgtgctctgctgcccctgctgctgcaggcctgctggacagccgcgcaggatgagccggagaccccgagggccgtggccttccagggtgagt

SEQ ID NO: 27657 - DNA, 2300 bp, Homo sapien
cgtgccctctgaggactctatggccctgggtgtcctggctcccgatgggacctctcccggccccaggagggccctgcttccctccaaggtcaccatgctaagcctgctcccctcacgcctcctcttcctcctcagggtgccagaggagccccaggacctgccggaccccctggagacccggggctgatgggtgaaagggtgagtgtccaacagctcgggccctagggcggaggcctggccgccagaggccctgggaagccccagccccgcactgtggagctgcctggggtccctgaccgggccgggagtgcccgcagcatcactggctcctggccacagtcggcacctgagccagaggccgcctcggcagggcccctcctgccccgagatccgggtcccagggtccacggggaccagcagggtggccccaggggagggagccggcttctgggctgacggaggggccctgcgggtgaggtgctcccgggcctgtgccagccagtgggtatcccaggccaggccgattcgcacggtgacggctactctgctcccccagggagaagacggccccgctggaaatggcaccgagggcttccccggcttccccgtaagtgtccggaggctgagcccacaggaacatgcccaagctgcctgcggcgccctctttagtggactgggcactcttgggtgggcgggctggccccaggaccgccggctggcccaggaattccatggccgggattctgtcagctcaggcccttccgctgtgcgcccctcacagcctcccctctcaaatcagaacccggtatcactgccctgcttttccatgacaggggtatccgggcaacaggggcgctcccgggataaacgtgagtacgccccctcctccatctggctgtgggcacacaaacattcacagtcacagggacacgcacgtgtgaacacacatgtgcacacaggctcccgagcaaacacacggggtacacaggcacccacggctgccccactgtctgtggccacagccccagttggcatcggctcctgcaggccctgcgaggctcccactgtggtgtggcctgtgggtctcctcacggccctgactgcccggtgaccgatctcccctcggtgcgcagggcaggcccagccccagaggccgccccacggctctctaggccactccgggacccagtttctccagcccaggaaatgtgtgtggtgggggaagggaagagaagagtgcctctcttatctttatttttttccttttaaaatttccacttcctaaaaacaaaataaaacccttgttaaccaagtgctctcccgtcactgcagggcacgaagggctaccccggcctcaagggggacgagggagaagccggggaccccggagacgatgtaagtgtggatgggaggcagggccagccccaagtccacctgagccagagggctgggcccttgaagggcagtggaccaggacccgcttggggaggcctcatgggccccggctgctggatgctctgtggacggggccagcgcgcagatgcccgggtggtgcacggtctgttgacacaacgctgttcccttctagaacaacgacattgcaccccgaggagtcaaaggagcaaaggggtaccggggtcccgagggcccccaggtgggtggatgtggctgggtgaggccacggtgggctgtgcctgggacgccggatgctggggctggggaatgctggaagaggctgggagagtgggaggcggcgggagggaattttggggagcacgtcatctgggaggccctgggggtgggaggtgccggtcaccagggccaggtggtggccagggcagcagagccgagcccagggacacagcgggtcctcagggtggggcccacctgggatggccgcctggaccaccagtgtgcgaagccccagctgccctcacagcaccgtcactggaggacgaggggctgggtagggagggaccgggcaggggtgggcttgatgaggggcagggccctgggggtgggggctgtctcagctcaggaagcacagtgggctcctcaccctcagagctcctctactccgtttctcggacagggacccccaggacaccaaggaccgcctgggccggacgtaagtggggctctgtgaacattgctgggggcgaccactgtagcttccatcccttggggtgtgggtcctgtccatgggtgctcctgtagacgctgctcacgggggggtgggttgtggacaaagagctggtgccaggccctagggacccgtgacggccatgggaggacccgtg

SEQ ID NO: 27658 - DNA, 2300 bp, Homo sapien
gcgcgcagatgcccgggtggtgcacggtctgttgacacaacgctgttcccttctagaacaacgacattgcaccccgaggagtcaaaggagcaaaggggtaccggggtcccgagggcccccaggtgggtggatgtggctgggtgaggccacggtgggctgtgcctgggacgccggatgctggggctggggaatgctggaagaggctgggagagtgggaggcggcgggagggaattttggggagcacgtcatctgggaggccctgggggtgggaggtgccggtcaccagggccaggtggtggccagggcagcagagccgagcccagggacacagcgggtcctcagggtggggcccacctgggatggccgcctggaccaccagtgtgcgaagccccagctgccctcacagcaccgtcactggaggacgaggggctgggtagggagggaccgggcaggggtgggcttgatgaggggcagggccctgggggtgggggctgtctcagctcaggaagcacagtgggctcctcaccctcagagctcctctactccgtttctcggacagggacccccaggacaccaaggaccgcctgggccggacgtaagtggggctctgtgaacattgctgggggcgaccactgtagcttccatcccttggggtgtgggtcctgtccatgggtgctcctgtagacgctgctcacgggggggtgggttgtggacaaagagctggtgccaggccctagggacccgtgacggccatgggaggacccgtgaggatcatagggggatgtgtgaggaccatagaggggacatgtgaggatcatgggggacatgtgaggatcatgggggggacgtgtgaggatcatgggaggacgtgaggatcatggagggggacatgtgaggatcatgggggacccgtgaggatcatgggggacccgtgtgaggatcatggggggggacgtgtgaggatcatggggggacctgtacccatgaggaccatgaggggacccgtgacggccacggggagacccatgactgcgctgtttctatgaccacgtcaggggtccagcccagtagcaggggtgtagtgggcagagccgggcacacctgcaaagaacctcctgcccaaaccccgccctgtgggggccccagggagggtgacctggagatccagcagcccacagtccccgctgggaggggctgtctatggccccagtaccctcgtctctccctccccaggaatgcgagattttggacatcatcatgaaaatgtgctgtgagtatctctgagaagccgtcctcgttagggagagcagggccgccagcctggcctgttccactcctagaagggtgtctccactgttgggggcctgggtctctgggtacatccttgaggaggctcctcagccagcccctaccggcctccaaagccctcccaggcccccgggtccccgcacaggctgagagtccccggtgcggtgcagagctgccacgtggggagggcggccggggaggcggggaggcggggcaggaggccggggaaggggggaggccggggaaggagggcggccggggaggcggggaggctgccccaagagtaaaagcctttctgacgtgcgcaggacgcggccctgactggtctaactgactctttctcttctcctcagcttgctgtggtgagacccaggctctagctcctgagagaatggatcccgggggtcggggagcgaggcctgggtcccacacatgtcacaggacagcacatggcactctggtccccgcccgcagctccctgcacctgcccgccccctctggggcctgctccaagccagcagggttcccgggtgttgggctgggccccgccctctttcacccataactgaaataaccaggagcaggcttgggggggtccctgctccatcattctggcccacaggccccaccctagcctggctgagcaacgccagccctgaccagccgccggacagagcagcctttacggggccatgggagggggtgggcttttctggggctgagacggggggaccccaacgtgtcaggtgaggatgtggcagccaaggaggggccagggcggtggaggggaggggccagggcactggaggggaggggcgtgctctgctgacaccgcccccgcctgcagaatgcaagtgcggccccatcgacctcctgttcgtgctggacagctcagagagcattggcctgcagaacttcgagattgccaaggacttcgtcgtcaaggtcatcgaccggctgagccgggacgagctggtcaaggtgaggcctc

SEQ ID NO: 27659 - DNA, 2300 bp, Homo sapien
agcctccaatacccccgcgtcacctgcggtgtggatgggcctctccagtgtgttccagcctccaatacccccgtgtcacctgcggtgtggacgggcctctccagtgtgtgccagcctccaatacccccatgtctcctgcggtgtggacgggcctctccagtgtgtaccagcctccaatacccccgcgtcacctgcggtgtggacgggcctctccagtgtgtgccagcctccaatacccccgcgtcacctgcggtgtggacgggcctctccagtgtgtgccagcctccaatacccccatgtctcctgcggtgtggacgggcctctccagtgtgtaccagcctccaatacccccgcgtcacctgcagtatggatgggcctctccagtgtgtgccagcctccaatacccctgtgtcacctgcggtgtggatgggcctctccagtgtctgccagcctccaatacccccgcgtcacctgcggtgtggacgggcctctccagtgtgtgccagcctccaatacccccgcgtcacctgcggtgtggacgggcctctccagtgtgtgccagcctccaatacagtcttgtccttcaacgaggtcttagggacaaggtacaggggcaattatcttgcattcacagcaacaaataagtcagtatgatgaactttctactgtggtcagctggaaaatttcatccttgtcagcgggcacacaaagaccttccttagttcccagttaaaaagaaaaggaaaaacaggaactgtcggcccgggtgtgtgcatgtagcccaggggccccacaaagactgacccggcttccatccctgaggccccgcagagactgtcccggcttccatcctgaggcccgcagagcactaggctgggggtgcgcctgggcaggaggctgcacggcaaaggcacggggtgtgccatggagtttccccgggagccgcagccctgcccactctacagggcccccgggaagtgactgccttgccagacaacggaatccagggcccagccacggacaatcaggggaaggcgtggagggagcgaggagagacgggagccgggcattggagggattaccaggtttggggtcctgcaggcagaattcaggcggcggggtggggacgcatcgcccccatagtgagcagggtccatgcagtgcagcccaacgggggctttgtcctaaggactgtgggcagctgctgagggcgtttgggaacacccctcccggaggggtgaggcggcccagcctgcggctgccagaggacacaggttctgctgcggaacctgcagacatggccataacaggccacagtgctcgggcccacacagcctggacccacatggccctgtgtcacctcctcaggggcaggcttcagggcctcgaccctagaggctgcccctcggttctgctccatggacggcgcaggcaggcccaggcctgtgacgagttcacggaagctccaggatgacccccgctctgcgccctcctccagcattccagaccacaaaccactctgggctaaaacgaggcatcgccagagcatcccacttcctcggaaagctgcggtctggggacgcgtcttggccctgaagaggctccagatggctcccatcaggcctctccgcctacgtgcggccgacatggagtgacagagcgtcggggacacagaattcagagctgggcctggggctgctttgagatactgatggctgccagggggcacagagacccgtcctgcagacagggctgtgagggccacagggggcctcggggagaggcagtgggagggaggacagtgggggcctccagctgggtgagcagctggagcgaggggggcccggggcttgtgatggtgctgccgaccctagaggtgccggccccacgatggagagcacgtagtgccccccgggagtcaggaggccgggcctgacctcgggggctgcagccaggggaggccggcaccccagataacccccaaagaactgcaggccctgaggcgaggccagagtgggggcgggggcaggtcccagccgaggaggtgctccgtgctgcctcagcagaacccatgatgggctggcccaaggctctgaaggtggaaaggcctcacacattctgccccggctgacgccttccttgggccagtgctcgggggtgtgtaacaaacgccaagacgcattgtaaagaaggaagcctgcgtttccatcaccggcttaatatcaaacaaaagtgcaattttgaaaatgtagtccaaggttttctgtggtgcggaaatggccaggccagacctccgtggg

SEQ ID NO: 27660 - DNA, 2300 bp, Homo sapien
ggcttccacctggatgtctcagcccatgtttcagggtcccagattttcccaaccggggtccagaccttcacataggccagccgtggccaggcatcaaaacatgcctagagctaggtggtccccacagtcactgtcggctcctcagccatactggttctacctctgccaaacatgggactccttttcagcaaccagagaggccctttgttctcacaccaagcctgatgggcaaccgtgggtaacgtcgcaatctccattcatccctctgtggagcatcaaccccactccccccatgcactgaaagggggaaactgccacacccacaaggcctccccttccaccaggaaaacgtcccagatcactcttggtgaaaacatttaacaattggggccctaactttgtgccaaagattacccatatccccacatcaaccagaatggtgtcctcggtgttggccgggaaacggccaccgcaccagctgagtctcaggcccctcctgcaccacttgtgttaattggggtcttccaagaggcaggtgccatggaagctctgacgtgactggagatttatcagtgcaatgtctgtgaaggatgctgggggggtggccaaagaggacggaagcctcagaccacaggtgagacccctgtgaaggagatacggggagccttggccagcacgtgcccctagacagtgctggccaggccgagggagaacttctggagccaaggtaacccctaaaggattctggtcttgtgaggaggggcctggcttccccctgggagctgctggcttggaagcaggaggcattgcccaggtgagagttcggcatggacccaggggagtggcacacggtgcccgccgtcagctgtgctcaggagcagcaggcaggagccctggactcatggctaccatgtggctgccacactcaggcacacttaggcacatacactcacactcaggcacacttagacacacacattcacactcaacctcagacgcagacacacaccacacactcacagatgcacacagtctcagacacagacacacaccacacacagatacacacaccacagactcaaactcagtctcagacacagacacacaccacacactcagatgcacacaccacacacactcagtctcagacacacacacacaccacatttgcaaacctgctcatcagaagagggacctcgcccccagccgctccgccaccttccaggacagctctgaagggagccctgtcccggagcccagggacctctccccaacccggctgcgcctcacctcaaggaggaaccccggccctggctgggggactgtgaccagggtggggagtggggaccccagacagagccctaccagggacccctgtcactctgtccccggctgggctcaggtggggacctcacggtggtcccagggcccagcaccaagcccacctgtggtttccagcgggaaaggggtggcaggggtggctcgccgcatgcccaggctctgccccaacctccgcgcccaggctctgctgtccctgccctcccggctccccaccctcaggccccaggagcggcagtttctgcaggagctcctgacccggggcctctcgcgggaggcctgagcaagccggacacaggacacggggtaggggaggggtcggggggctgatggggggaaccctgcaccccccagggcagctgctaccaaggggcgagtcccagggcccccgtcggccctgcgtgcggggcgcggtccccaacacccagggccccggaggcggacacagccccagccaggtcgtccgggaaatggggcgggggcgacgggcggccgggcccgggacgcgaagtccgagcagcagcgggcaggggctggcgggggagctcggcccgggctgcaggggggtccccaccctctccacctcctccagcctcccgccctcgagggtccccgcttccctcccatccccctcccgtgcccccggccccctcctcccatccgcggggccgcagcgcttcctggcggcggggcgggtcaggccggcggggcggggtataaagggggcggcgccggccgcggttccctccctgctgcttactcggcgcccgcgcctcgggccgtcgggagcggagcctcctcgggaccaggtgagcgcctcccggaccccgcaccctggaagccgctcggcccgcggggggtgaccccgagtcctgggaaggcggcggcggcggctccgtccctcgggtccccgggaagggggactccagccccagggacggcggggggctcggcgggttcgg

SEQ ID NO: 27661 - DNA, 2300 bp, Homo sapien
agaccctgccctgccacctgaggaatgtcccacccatgcaaccttctgtctctgcttcctcgtttcagtgctacaaggtgagctgcctggaaatccctgggccctctggccccaagggctaccgtggacagaaggtaagatgcccagattacctgcagggtctgcgctaccaggaagcccctgatttgttttgaaatccacacttggccgggcgtggtggctcatacctgtaatcccagcactttgggaggccgaggcgggcggatcacaacgtcaggagatcgagaccatcctggctaacatggtgaaaccctgtctctactaaaaatacaaaaattagccgggcgtagtggcatgcgcctgtagtcccagctactcgggaggctgaggcaggagaatcgcttgaacctgggaagcggaggttgcagtgagcagagatcacgccactgcactccagcctgggcaacagagtaagactctgtctcaaaaaaaaaaaaaaaagaaaagaaagccacatttaaggccagctgtatctcaaattgtctcaacacttctgtccctggagaaactaaaactctatatgtctaattccttttaaatagtatattgagaaaagcagaagcttgtaaaaaatgagatatgccattaaaatactttggtaagcaagcatattcaagtaagtaaaatgtgagatgcactacacttaataatatgattgctcattaatatgaaggaacctcttttgtggcttactaaataagcagttttagggagcctggtttgaatgtcccctgcattttctggtttgaacatcccctgcattttcctaacagaggtgcatcaaataaagtccttccaaaactcactaacagagtatgtgaaactccaacaattcacatctgttaaaaattataaagaaaagcataggaggagaaagtagcttctaaggagatgaaataaggaattgaccatcatagaggatgttactgctacgtagcttcgtgtttttctaaatttggataacagctgtctagaccagtaggtatctggatgtactttctccaggatgagacatctcgaggctgcaggtcaaatcctgccatctccctccctggcttctccagtcctggtggcaatgccgaccctactacagctgggaatgaatttgccacttggggcagccttggctgcacacagcagtgcagtgacccgttctgttgggggggccactggaagctgccacagggatcactgtggttagagtttgaggggtggcaaggtgccaagcggagcccaggacagggcacagctgtgatgttccagaagcctctgcccacctcatcccctgccctgagtttcctcccttttcttccttttgacctcttaattcttcccctttcctctgctcctctttgcacttaaattgggagcatatcaataaatagatgaatttatttaataaagttctgtatcataggttaaaattttaattccaagagagtgtaacctttatgtggtgttctgaagtcctgatctgtctaaagttacttagataaaggaattaatctttgtagtgacggtgacccaggcatcgctggagaatcagagcccagtgttggccacagtcacagctactgggtgcagaagggacccccacgggccaggcacccccaccccaggggtctcttctggctccattttgcaggtggctttgtgggaagcttccctcagagctgggagaaatgggtcaaagcaaacccttgtctgacagaggctggccctttggggagcagctgacaccaagacttctccacttgggcaggggaatcagtaacctctgctgtgtcacctctcagaggagctgtggcagggtccccagctgcctaccgcccaccctaccctgcctcgatgtactcttttctctgcttttagggtgccaagggcaacatgggtgagccgggagagcctggccagaagggaagacaggtgagtgtccttgccccacgcccgccccgcctgcagcccagcgccccagggctgggctcacactgctgcgttgtccttcacagggagacccgggcatcgaaggccccattggattcccaggacccaaggtgagtgacctcggccaggggcttggctccaccctgaggccccagcactgccaggcaggctccccccagcccagcctcggcctcagcctctacgaccctccccccagttaccaaggaacagaagcacctcgataacttgatggccgtcccaaaacccagcctccagcccgacccagggctcagcct

SEQ ID NO: 27662 - DNA, 2300 bp, Homo sapien
gcaggggccagagagcctgggaaagggcagtgacaaggtcaggatgctcccaagcagttccagcccaggagaggacaggagggaagggcagaaaagagagagagagggaggggagagagaagagagggagagtggggagagaggcagatggcggagagagagagggagggagggatggggagggagggagggggaggagagggagagggggagagagggagggggagagacagagagagagggagagggagggagagagggagggagacagagggaggaggggggagagagggagggggaaaaggggagagagggagagggggagagagggagggagaggggaggagggaaaggggagggagagggggagaggggggagagaggggagagagggagagggggaaagaggggagggagggaggggggagagaggtaggtggagagagagggagggagagagagggagagaggggagagaggtgtaggggccagccctacagggtctgtgggtttttctccccgtgtgtagagatgagagattatagaaataaagacacaagacaaagagaagaaaagacagctgggcccgggggaccactaccactaagacacggagaccggtagtggccctgaatgcctggctgcgctgttatttattggatacaaagcaaaagaggcagggtaaagagtgtgagtcatctttaatgattgataaggtcacgtgagtcacatgtccaccgcacaggggccccttccctgttaggtagctgaggcagagagagagaggacagctcacatcattttttttaatcctctttttagaaagattaaagactaatacttttactaagtttgctactgttatctagagggcggagccaggtgtacagagtggaacataaaagtgaaacaggagcatgagctctaaagcacagcatcacagggagacgattaggcctcgggataactgcgggtgggccctttacaagaggtggtggaccagagtcttcttcaaactcccctggagaaagggagactgccttttccgatctgctaagtagcggatgcttttctttggcactgacactaccatagaccatgctccgcttggtaacgggcgccttcccagacgctggccttaccgctagaccaaggagccctctagtggccctgcccaggcctgacaaagagctcacactcgttttttggtcactttttagcgtgccccttcaactcctatctgtgtatggcctggtttttcctaggttatgattgcagagcaaagattattataatgttaaagagtaattgctacaaactaatgattaataattatatataatcatatctatgatctatatctagtacaactcttgttattttatatattttattgtactaaaacagctcgtgccctcggtctcttgcctgggcacctggctggcttgccgcccacaagagggagatggggagggggggtagggagagagggaggggagtggggagagagggaggtggggagagagacagggagggacagagtgggagggagggagagagaaacatgtgccccagcctctggagcagggcggtgggggcgcctgtgtttctgggagggccacaagacccccagccctaagttgggaagtctaccttacaaggctgggtgagaaaggcaggccccaaatgcacgtggaatccacacacaggcacagagggagccaagatgagggcctcggataaacagtcccggatttgcagagggagtcgcctgagggtcccgttctggtcctgtggagaggtgaagctggctgggcttctgggtctggtggggacttggagaacttttctgtctagctaaaggtttgtaaacacaccagtcagcactgtgtctagctactggggtgggaacttggagaacttctctgtctagctaaagtattgtaaaaacgcaccagtcagtgctctgtgtctagctaaaggtttgtaaacgcaccaatcagcactctttaaaaacggaccaatcagcactctgtaaaatggaccaatcagcactctgtaaagtggaccaatcagcaggatgtgggcggggccaaataagggcataaaagctggccaccgaaaccagcaagcgccaaccgtggcgggttctgttccaagctgtgggggctttgttcttttgctcttcgaactaaatcttgctgctgcttactctttgggccttcgctacctttacgacctgtaacactcactgccaaggtgtgtagcttcactcctcaagtcagcgagaccaccaaccc

SEQ ID NO: 27663 - DNA, 2300 bp, Homo sapien
cctccagacacagatccctgaccccatcccccactcccagcctccagacgtggagccctggctggggaactctgtgtgctcccagcctctgaaggtttctgggcttacctggctcctgtctcatcccagtccccctgagtagccacggaggtggggtccctaaggcccacatggttggggttccattaagaacttcaagtgggtggctcacgcctgtaatcccagcactttgggagaccgaggtgggtggatcatgaggtcaagagatcgagaccatcctggccaacatggtgaaaccccatctctactaaaaatacaaaaaattagctgggtgtggtagcgggtgcctgtagtcccagctactctggaggctgaggcaggagaatggcgtgaacccgggaggcagagcttgcagtgagccaagatcgcaccactgcactccagcctgggcgacagagcgagaccctgtctcaaaaaaaaaaaaaaaaaaaaaaaagaacttcaagtggggctgggctcagtggctcacacttgtaattccagcactttgggaggccgaggcaggaggatcgcttgagcccaggagtttgagaccagcctgggcaacgtggtgagacctcatgtgtatttgtctgataaagacatacgcaagactgggtaatttttaaagaaaaagcagtttaatggactcaacagttccacaatcatggtggaaggtgaaagaggagcaaagtcacgtcttacaagagggtgtgtgcaggggaactgccctttataaaaccatcggatctcgtgagaccattcactatcacaaaaacagcaccggaaaaagccgcccccgtgattcagtgacctcccaccgggtccctcccatgacgtgggaactatgggctctacaattcaagatgagatttaggtggggacacagccaaaccatatcaccatgtctaccaaaaatggaaaagttagccagtgtagtggtgtgtgcctgtggcccagatgctcaggaggctaaggtgaaaggacctcttgagcctggggaccaaggctgcaggaagccatgattgtgccgctgcactccagcctggctgacagagtgagactttgtctcaaaaaaaaaaaaaagagaaaatgataaaagcactgcaagtgggcagcggctgaacgtggagacaggagttctcccttctgagcacggccctggtgccgctgacttcgtggggagcctgtagtcaggggagcagcagctggggagagctggggtctcagctgccttcccccatatcgcacatgcccgtctcgtgtgtatctgcactctcacacgcgtgttcccctgccctgcgctcacatgtatctgcactcactctcacatgcttgcttcccctgccccatgctcacgtgtacctgcactctcacacgtgtgctcccctaccccacactcacatgtatcctcgctcactctcacacgtgttcccctgtcctgtgctcacatgtatccacgctctcacacatgtgctcccctgccttgtgctcacgtgtatctgcactctcacgtgttcccctgccctgccctcacgtgtatcctcactcactctcacacgcgtgctcccctgcactctcctgtctgagctgagctgacctcagttgggtgctgcgagccagggcctcatgctggcctctcgccctccacagccccaggggtccaggctcctccaggaacaaacgcaggccccacgggctgcctggaaggcctcccagaaggcagcacagggtcacgagggtcacccgcagtggcacagggaggcctcgtcacgacaggattccagccaggctggcctgatgctcctgggggtcctcggcacatgccccttcaccctggcatgtgcttcttttccgggaacccacactctggctgagtggagccatcccctctgggtcaacagcacccggggtggctctgcagcaccccactccgcggctgcacagggaccttggccccactgctccttgtgccttgctggttaatgagaagccggtggggaggtgctgccggtgagcgtataaaggccctggcggcggctgcggagcactggccctgtccttccatctgcccagagaggagcatctggatcaaggtgctggccatgtcccagctggtggaatgcgtccccaacttttcggaggggaagaaccaggaggtgaggcccgaggagctggtcaagcatctagggctgatggggcagcttgagtggctaaggcccaggccatggaggaggtggtgggcttggtgtcccgggtcg

SEQ ID NO: 27664 - DNA, 2300 bp, Homo sapien
tggaccacagaggatgctcacagagcaggaggctcctccccatccacagaggatgttcacagagcagggaggctcctccccatccacagaggatgttcacagagcagggaagctcctccccatccacagaggatgttcacagagcaggaggctcctcctggaccacagaggatgctcacagagcaggaggctcctccacatccacagaggatgttcacagagcaggaggctcctcctggaccacagaggatgctcacagagcaggaggctcctccccatccacagaggatgctcacagagcagggaggctcctccccatccacagaggatgttcacagagcaggaggctcctcctggaccacagaggatgctcacagagcaggaggctcctccccatccacagaggatgctcacagagcagggaggctcctccccatccacagaggatgctcacagagcaggaggctcctccccatccacagaggatgctcacagagcagggggctcctccccatccacagaggatgttcacagagcagggggctcctccccatccacagaggatgctcacagagcaggaggctcctccccatccacagaggatgctcacagagcaggggctcctccccatccacagaggatgctcacaaagcaggaggctcctccccatccacagaggatgctcacagagcagaggctcctccccatccacagaggatgctcacagagcaggggctcctccccatccacagaggatgctcacagagcagggggctcctccccatccacagaggatgttcacagagcagggggctcctccccatccacagaggatgctcacagagcaggggctcctccccatccacagaggatgctcacagagcagggggctcctccccatccacagaggatgctcacagagcaggggctcctccccatccacagaggatgctcacagagcagggggctcctccccatccacagaggatgttcacagagcagggggctcctccccatccacagaggatgctcacagagcaggggctcctccccatccacagaggatgctcacagagcagggggctcctccccatccacagaggatgctcacagagcaggggctcctccccatccacagaggatgctcacagagcagggggctcctccccatccacagaggatgtacacagagcaggaggctcctccccatccacagaggatgctcacagagcagggggctcctccccatccacagaggatgctcacagagcaggaggctcctccccatccacagaggatgctcacagagcaggggctcctccccatccacagaggatgctcacagagcaggggctcctccccatccacagaggatgctcacagagcagggggctcctccccatccacagaggatgctcacagagcaggaggctcctccccatccacagaggatgttcacagagcagggggctcctcctcatccacagaggatgctcacagagcagaaggctcctcccgggaggccaattacagctgtgtgtttgcacggaaacatggaaacaggccctgtccatcaatagggcaagggttaaaaattcagtgtgtgtgtctgtatgtgtgctcatgtgtacagagttgccaggaaacagttaaatgaaccaggtagctaccagatggctcagggtggataaatctcaaagagataatgcagcagcaaaaagttcagttgcagaataaaatgtgtagggtgctaccatttatgtacaacttaagcatataaaagtcattctccagtgtgtgtgggcacacaggcaggcaggaggcacacggaggcctgcccgcttgctgtgcccatagacgcagtgctcccacgggcaggatgggcacctgtggccacttcaccacatccagctcctccttttacacttgaggcctgaggggaaggaggatgctctgaagccagggaaaccccggcaggtgttgaagcttggggtggggtgcataggggttgttaacatgttctttatacttcccaggaatgttttaggagcatcagcctgatttctcatccctttcctccccgcctcagttccagatttcggaaggttcacgagtgttgccgacacgccctcccaactgcagacatcctccctggaggacctgctgtgctcacatgcccccctgtccagcgaggacgacacctccccgggctgtgcagccccctcccaggcacccttcaaggccttcctcagtcccccagagccacatagccaccgaggcaccgacaggaagctgtcccc

SEQ ID NO: 27665 - DNA, 2300 bp, Homo sapien
ctgcctcccgggttcacgccattctcctgcctcagcctcctgagtagctgggactataggcgtagcgaaactgctctggcctgacactgtgatggtggatacaggtcattatacatttgtccaaagccagagaatgtgcagcatcaagagtgagccccattgtaaactgtgggctttgggtggtgacgatgtgtccatgtagattcatcagctgtaacaaatggaccactctgggactgagtgtgggtgtgcgcgcctgtaatcccagctgcttgggaggctgaggcaggaggatctcttgagcccaggcatttgaggctgcagtgagccgtgatcatgccacttgcccttcagcctgggcaatagagcaagaccttgtctcaaaaaagtaccactttgctgcaggacgtttcaaaaatattctcccagtctctgacttgtcttttcattttcttgacattctttgcagagcagaaagtttcagtttcattaattaaagtattttattgagacagggtctcactttgtcacgcaagttagagcacagccgcgcaaccacagttcactgtagcctcgacctcccaggctcaagcaatcctcccacctcagtgttccgagtagctgggacaacagacacgcaccaccacatctgcctaatcttctgactgttttctacagatggggtgtccttctcttttgataactttggtagggtttgtccatttcctgtggttgtggagcacgggcatcaagctttaactacaccccacaaattctaatgtcatgtttttattctcattcaacttgaaatattctctggtttccttcgtgcttttgtctttttcaagacttttttaagaggagttttaggttcttagcaaaattgagaggaagatagagagatttccccactcgctgccccaacaaatgcacagcctcccctattatcaacaaactacctgacagccacaattgtcagcaaaacgcacatgagggaaaaatataaaatataagtagcgttgtatctatttaagaaattgatttagaaatttaaaacttttccagaagaaatctagttctagatagcttcacagatgaattctatccgacgtttaagaaggaacacccagaaaatggcgcagaatctctgcggctcattttaaaaggccagtgttccaaagccagaccgagacatcacaagaaaaggagattcagatcgacttcccctgtgagcataaaaatacttaaaatattaataaattgaatccagcgctatattaaaaggataatgtgtcaagaccagaaaactgtcagaatgttgataggtccgtggctggagagtacctgacgtcaagagaaggtttccttggagcgggaggaagacggcatttaaaatatgatgggaggagccagggcaggaaaagccattcagggccccgtcgggctcagagcggggggcgcatccgtgactcatccctcgcttctctctctgccctgcatcctggacgccctgcatgccctcgtcagtgggctgtggctgggcccccgttgtcttgatctgaggtgtgagccctgtggtgcaacaccaggctggttgggttgtgtcaggaacgcttggggtgtagaaacctcctttctccacaaagcctgactcaagactttctctcctagaagcaaccttcccctaatctggccgcccgggctgaatgaaggtggtgttctcccaggggcatctgcacctgagtgcccttggtggtcctgagtgcccgtcacagggctggaggtgtggccggcccactgggatggtggtggtggtgggtgcccatcacagggctggaggtgtggccggcccactgggttggtggtggtgggtgcccgtcacagggctggaggtgtggccggcccactgggttggtggtggtgggtgcccgtcacagggctggaggtgtggccggcccactgggttggtggtggtgggtgcccgtcacagggctggaggtgtggccggcccactgggttggtggtggtgggtgcccgtcacagggctggaggtgtggccggcccactgggttgtgctttctgccgtacgtcccttcccatgaggatgagatgacccatctgttgcatcccggctgctgataaaacaagaccctcggagccaagaaacaacactgaggtgatttactttcccaagtaattgaagcagggagtcagggtgggtttcaagtcggtcgcactgactgaggacagacgcctgctctagcagggccccatgagccgcagccctgtgtgacggcccg

SEQ ID NO: 27666 - DNA, 2300 bp, Homo sapien
gggctggctggggcacgtgtgattgttgcagaatgcgtgttgtttcacacaccggctgtgaacagggtggaagggctgaggctctccctgtttccctccagctcctggggagtttgcttcacctacggcacctggtttggcctggaggccttcgcctgtatggggcagacctaccgagatgggtgagtgagtgcctgtcctctggtgggtgggggttctcaacccaatgctctgtcatgagtgttttttgctttgacatttggttttagggtttgtttgtttgtttgtttgtttttgagacggagtctcgctctgtcaaccgggctgacatgcagtggcatgatcctagctcactgcagtctcaaactcgtgggctcaagcgatcctcccgagtagctgggatcacaggtgcacgccaccaccccgggctaatcttttaaaacttttatgtagagatggagtcttgctgtgttgctcacactggtttgggctcaagcagtcttcctacctcggccttccaaagtgctggggttacaggcatgagccaatgtgcctggcctgtttttaatatttttaaacagtgagataagatccccggttgaaatgaagatgtttccctggtcccacagctctctggagcttcctgacatgtatgctggagggacgcttctggtctccggcccctccaggcatacagatgcctcccaaccctgagtaggaagattagggtccacggcctcgctggagcgggttagaaggcaggagatctccggtcccagccgtgtctccagccgccggactctctcccagccctgtctccagctgccccactgtctcccagagtctgccgtgtggatgtttagaggtggggagcaccgtgcttggctgagtgcagcttgtgagacgctgctcccaagcactgcagacctcactcagcctgacgcgtccgtgaggccatcctcggtactcgcatgtccctttgtcttcccagcgactctgggaggcaggagtatctgttcccagttcacatctgcaaaagtcaagctcgggtttcagtagtggcccatggcccttaggtagggtggccccatcgtgcaggctcctccccgtaccccaaggcagcctgctggggtgagaagccaggggtctgggaccttccttggtgtgatggtgtctcctgtctctggtctttgcaggactgcctgtgcagaggtctcccgggcctgtgacttcctgctgtcccggcagatggcagacggaggctggggggaggactttgagtcctgcgaggagcggcgttatttgcagagtgcccagtcccagatccataacacatgctgggccatgatggggctgatggccgttcggtggggacgacgggaccgtccctgagccttgggtttgggtagaggagggacactcagctgtgagccggtggcctgggctgagtgaatgtagagaggaggggaggcctgtgggccaggtcagctgccactctgggaacagacacctacaagagccacatgcctggttcctggggcaagaacgtgggctgctctgaccaagtggggccctgcagagaggctcgcctcttagaagtgaaccacccaccattagccatgtcagtggaagagcaagcacatcagggacccatggaaacagcgaggtgggctgcgatgaggatgctgcttcctggtgtggtagtgatgacggtcacagcagctgctctctgtggccctactgtgttcacagctggtgctgagccacatatgtgccaggtgcacacacacgcagacgcatgcaggcaggcatcagtgtacacactgatgtgcacacacagatgtacatggagacagatgcacacacaggcctatgcacacacgtacgcatgcccacacaggcacctgtgtccacacacatacagatgcacccacagcatcccatctgtgccacacactgacataggtacatggagacagatgcacacacaggtctgtgcacacacgtatgcatgcacaggcacctgtgtacacacacgtacagatgcacccacaggatcccatctgtgccacacacagacgtaggtacatggagacagatgcacacacaggtctgtgcacacacatacatacgcatgcacaggcacctgtgtacacacatgcagatacacccacagcatcccatctgtgccacacacagacataggtacatggagacagatgcacacacaggtctatgcacacacatacgcatgcacaggcacctgtgtacacacacgtacagatgcacccacaggatcc

SEQ ID NO: 27667 - DNA, 2300 bp, Homo sapien
tgtaggatgggtcttgtcttctaaatctattgttttctctctaattgattttttcctgtttttatttagttcactttgttgggtttgctcaagcctgggtcactggatctcagggatgctgctcctgtttgcagctgtgtctgcaggggcttcccaaggccttgctttcccctcacgtccctttctcagactctgccaatccgcttcccgctctggtgtcctgtggttgcttctttttaaaaccctcatcggtctgtgtaaactgtttatttttatgtggtttttaagggagaccattctcattcttttgagaccctggaaaggatggaattgggataggtaaactgctgttttaccagaatgttcactggaccaatctcgtgttccagggagaccctcacgcagggcttagagttctgtcggcggcagcagagggccgatggctcctgggaagggtgagtgagcctccactcgtgagtgcagagatgcacgggatccacaggtttctgctctcacacactgcgttcataaatgttggcttgtatgttgttgctacaccagaagtttctggaagtgagctgccagcccgtgacttctgggggacctcgttcctttgtggcatgcgtggcctttgccccggtggaaattgctcagtacgttgctgggcgcagccgggctgctgggagcgcgctgtagcctgagcgtggctattccctccaccctttctgcttgctcttagggtccagcagacagagctgctgtcttccacggccttaatgcctgaggcactggagttggtgggctggctggggcacgtgtgattgttgcagaatgcgtgttgtttcacacaccggctgtgaacagggtggaagggctgaggctctccctgtttccctccagctcctggggagtttgcttcacctacggcacctggtttggcctggaggccttcgcctgtatggggcagacctaccgagatgggtgagtgagtgcctgtcctctggtgggtgggggttctcaacccaatgctctgtcatgagtgttttttgctttgacatttggttttagggtttgtttgtttgtttgtttgtttttgagacggagtctcgctctgtcaaccgggctgacatgcagtggcatgatcctagctcactgcagtctcaaactcgtgggctcaagcgatcctcccgagtagctgggatcacaggtgcacgccaccaccccgggctaatcttttaaaacttttatgtagagatggagtcttgctgtgttgctcacactggtttgggctcaagcagtcttcctacctcggccttccaaagtgctggggttacaggcatgagccaatgtgcctggcctgtttttaatatttttaaacagtgagataagatccccggttgaaatgaagatgtttccctggtcccacagctctctggagcttcctgacatgtatgctggagggacgcttctggtctccggcccctccaggcatacagatgcctcccaaccctgagtaggaagattagggtccacggcctcgctggagcgggttagaaggcaggagatctccggtcccagccgtgtctccagccgccggactctctcccagccctgtctccagctgccccactgtctcccagagtctgccgtgtggatgtttagaggtggggagcaccgtgcttggctgagtgcagcttgtgagacgctgctcccaagcactgcagacctcactcagcctgacgcgtccgtgaggccatcctcggtactcgcatgtccctttgtcttcccagcgactctgggaggcaggagtatctgttcccagttcacatctgcaaaagtcaagctcgggtttcagtagtggcccatggcccttaggtagggtggccccatcgtgcaggctcctccccgtaccccaaggcagcctgctggggtgagaagccaggggtctgggaccttccttggtgtgatggtgtctcctgtctctggtctttgcaggactgcctgtgcagaggtctcccgggcctgtgacttcctgctgtcccggcagatggcagacggaggctggggggaggactttgagtcctgcgaggagcggcgttatttgcagagtgcccagtcccagatccataacacatgctgggccatgatggggctgatggccgttcggtggggacgacgggaccgtccctgagccttgggtttgggtagaggagggacactcagctgtgagccggtggcctgggctgagtgaatgtagagaggaggggaggcctgtgggccaggtcagctgccactctggg

SEQ ID NO: 27668 - DNA, 2300 bp, Homo sapien
gcctgaacctgaagctctcctgcaatagccccgaggaagttcacagcagatatcagctccccacccaccactctgcccacctacagccccttggcataggctgggccttccacctggaatgtccatcccatcctgtactgagacttcaaagcccaccttcctcctccctcaaggcaacacagagccctagagaaccacttgcttctcttatcagagagcctgtcaccctacactggcaaggctagctgatcccctagaccaatagcaggacgactctgacatagggcagagtttgccagcccttttcttgtgagcccctggattttcacctgcttcatcaaaaccctagaccaggctgggccaggatcccaagggtgatccagggtggccataccatcaggctggggcagcatactcctacctggcaggaggaaaagtgggccaccataatcacccgtccagtgcccatcctcagcctgcagccccacgtaaaatgtcatcccgttcagagccccctcaaaggcggtgtgggctttgggcaagtccttaaagtaattcttctgcaaagagatcgaaaaaaaaaaaaagagatagctgacgggactgttgcccggccagaggaaccctcttcacatacagcccaagtcaaaacagtgaatgtaaattactttaaaagtttcagctgtttccatcaaaagtctgaaactctttgatgagagcatcacacctcagcaaagtaaaagaacagctgcacattttcgttgctttatttgccagtcatgtattcttcacaacttctccaagatgtctggaataaaccaggcacccagactgtagggtggggcacgggtgccgacctgggcctgggactcgggcctctcaaagagggcccaaggggcggcacagcctttccctcggtggccggggctcggcaggagaccctgtttacactgcagactctgacgaccaaaatctcttacaatgcacacaactaagacagtggatccaaacactttttgtgaataaaaacaaagttacaactatctttgcaactctcctataagtcaaaaattatctcaaaataaggtgctaaaaaataaaacattaggagtctcctatgcgtggtttagagatgaaggggctgaagcggaggggcccgcgaacgcagttcccgtgggcgctcgccttggggatgggcgtcgctggccgggtcctcccacccgcctttctgagagaaaacgtgctcctcacggctcacccctcagggtcccgagctcgctgacgctccgcggaagcaacttacggtgtccagccccagggcgtaggcttccaggccggtctgctcgcggccggcgcgctcgtcctgcaggtaggtccacgtctgccggcccctctcgcagttgagtcgccagcggccgaggtcggtggcgggctcggtcttgtaggggccccctcggcgccgcagacacctgaggaccaccggccatcagcgacccaggccccgccccaacgccggccgccggcccactgccccagtcgcgctctcctcagcacctaggaccaccccgcattcgtcaggagcccggggcgaggggactcacgtgccctccgtcattgctgctgcagtgctctacgccgcccactgccagctgccagatgtccgcacccgggacctgccgcccagccccgcccctcccgcccctcccgcccctcccgcccctcccgcgcgcactacgcaggcgcaggcctcggcaggcgctcaggcttaggtgggccgacgcccacgcaaccaatcagagcgccgcgagcgtgaccccggggtgtgccaggcgaccacagtggtggagcgcttggtgccccatgcggcgtggggcggggcctgagggagcggggatggtgggtgaaggcgacgggacgggggaggcgggtggggccttattggcggggcatgaggggcggggctggtgggtggggaggtgggggcggggctggtgggtggggaggtgggggcggggcctggtgggtgcgggtgggggcggggctggtgggtggggccgaagggcgggggcggggcctctcgcgcgccctctagaggcttgcgtcccgggagcccggcctcgtgcgccgcgctttgaggtgagcctctctgagaaatttgtgaggagggtccagccgcgggtcggaaggaaggacgtggggagcgaggctcgagcgagcgacagcgagtgcgaaggtcgggtggcagggaattgctctcgcgctgcaggatttgcccggacgccggggccgggggtgggggc

SEQ ID NO: 27669 - DNA, 2300 bp, Homo sapien
ccagttgttgaggccaaaatcctcagagccttctgtatctggcttaatgaataagctggatgcagtagtatgtaagcagataggaacagtgttttttctcatgactgcccctagaagcttaactgtgtcaattctcagacgtagtttacagctttttcttttctttcagacattaaaaagagcggattattttactcataaaaagtccagtccattaagatatcaaaactcaaactcttatccagttgaaacctcttccctcacctagctttgccaggttcagtgtgagattccatccaggctgaagccccttatccctattcttcatgtttctacatggaggaacttacctggagaaaaacttccagcctctttctgcttccagagaagtagagtgactcatttgattgaatttcagagaacagatagggtggagtgtgctcaggctcctctgggtactctttctggggtctgtgggttgactggaggggtgtcttctggtgggcactcaattgcatagtgcttggtgaggcagtttcatggcctagaggctgggggatatgtttgtctgacttaacgggtgatttagtagcttgccctcttgcttgcagatttaagccttgtccttcaagctaggtttttaatttgtggcaaagctgatattttgatacccacccatcttattgctgtgtctttttcatccgtttctgaactgggataggaagaggtgattatccttgattgtctaaaaccccgctattccactgtggggaaggtgcctgtgggtattcttttgtccactctctcttccaactttctcctccggcttgctgtggctcaccgccccttcgaagttaggctgggggtaggaattgaggagtgggtgccgaaatgctcactaggctggggcagttgtaactggatgtcagggcttctgtgggccaggtgaagacatgctggggtcttctgtgggtccttgacctgacttacggaccactggctgcagcctccagacgtcagccatgtttccaacagtcagacgccccctgccctgttgcgcccggctgtcccttccaagttcggtcactcgctctgcctccatcttcctcttccctctgctgctaaggcttttcacctttaatttctcctggggccacccccaactccagcgaccccgtgagcagctgaggctctaccgcgctcggtcctggccagcgacgcagcccttccctggcggggctccagggcttctggcccctgtggtccgccaggtgtgggggcccacggcctcaccgcgcctaccccactccccccggcgaagctacgcggcgctcagcttcccagggacgccggcggcgccctcggctcctccgctccgccccgccctccccctggtctcgcactggagccgacggcccgcgcccacctcacctcagggcggcctcccgcccccacccccggccccggcgtccgggcaaatcctgcagcgcgagagcaattccctgccacccgaccttcgcactcgctgtcgctcgctcgagcctcgctccccacgtccttccttccgacccgcggctggaccctcctcacaaatttctcagagaggctcacctcaaagcgcggcgcacgaggccgggctcccgggacgcaagcctctagagggcgcgcgagaggccccgcccccgcccttcggccccacccaccagccccgcccccacccgcacccaccaggccccgcccccacctccccacccaccagccccgcccccacctccccacccaccagccccgcccctcatgccccgccaataaggccccacccgcctcccccgtcccgtcgccttcacccaccatccccgctccctcaggccccgccccacgccgcatggggcaccaagcgctccaccactgtggtcgcctggcacaccccggggtcacgctcgcggcgctctgattggttgcgtgggcgtcggcccacctaagcctgagcgcctgccgaggcctgcgcctgcgtagtgcgcgcgggaggggcgggaggggcgggaggggcgggaggggcggggctgggcggcaggtcccgggtgcggacatctggcagctggcagtgggcggcgtagagcactgcagcagcaatgacggagggcacgtgagtcccctcgccccgggctcctgacgaatgcggggtggtcctaggtgctgaggagagcgcgactggggcagtgggccggcggccggcgttggggcggggcctgggtcgctgatggccggtggtcctcaggtgtctgcggcgccgagggggc

SEQ ID NO: 27670 - DNA, 2300 bp, Homo sapien
taagaaatagcattatttaagtctttacatgaagctaatcactaaagatccctgagttgagtagtgtgtgtttggagaagcagggattgatttggtggaggaagaggttctcttcttagtgctgttgttttctcagtgaaataaggaggacatgatctaagaatgttggaggtttgaagagaatgagaagacatgaaatagagtctggggatgtaggattacagtcaggagatgctgagtgccagtttaagattggtggtcatacgcaacatcaccaagtctattaatacctctttctgtatatggctcaaattttatcccctctcttcacaccaattgctaacaaactcacgcttattccctttgaatttcacctggatggctgcagcacccacctctcaagattcctgccctacatgccattcttaaaagaaaatgtgaccagatcacttctctgcctaatcttcaacaacgggttctcacagctctcagaagaaggtgacaagaatctctgacctcaccctgctggcctgttcccctcacctggccacacaaccaagctggtacctccacgctttcatcatgtcctctcaagtacactgtctccagctacacccctgcactcctctccgggaattctgtttctcctctacccaaccagaccctgttccatcctctgttttttccttgctaccaattcaggcccacgcctcatgcacattctctgagaattatgtacataagtacctgactctcctggatgtaagctgggtgggcttagcaggcagaggccctgtgtcttactttatctctgcatcactgatgtctggcacatcaaggactgcaagtttgctgagagaatgaatcgccttttatacatggaaatgtaagctctaaactgcctcagagcatatgctggtgggtgacaatctgaggaggtcatgaatataggagaatattgaagaggtcacacaggggaaacaacttttcattatgaaaaactgggagactgacatttaaatggtttatctgcatgattaaattaatcacatttccaacagtgcatcaagcatctgagaataacattattttgagtaaaaacagaaactcttcgggagagaccccctccccacaggtcaggctgctcaaatgtccaccatgtctagcagcgcagagagatggagctcagaggcaacttcctcttcccttgaactccggatcagcctttccaggtgctttagtcgttcgcctagacacgttcctgtcgcctctgacagctgcagttgctccctcatcatgtcactctatttgaataaaaaagaaactgaacagttttgggatgtcaataaaccacgacctatctctgggaaggtactagatctggatcatgttagaaacctcatctgagtagtcatttatttttacagagggaaaaaaattatcctttgtatatccttccagcctcatttagctcgtacattcagctggtatctgtatatagactgtttgcctttgtattctatcatgaacaatttccagtgtcagtcatttttcacccaggctggaacgcagtggtatgatcggagcttactgcagcctcaaactcctgggctcaagtgatcctaccagctcagcctcctgagtagctgggacaacaggcatgtagcaccatgcctggctaattatgtactgtagagatgagatctctttatgttgcccaggctggactcaagctcctggacttaagcgatcctccctcatcagcctcccaaagtgctgggattacaggcatgagccaccacgcccagccagtcatttttagaaaatatcatcgtcaagggctgtgaattattctatcacatgaatgtgttataattgtttaatcagactcccatcttcggatatttattctgtttcgactttcatacaataatgctacagtaaacatttttatacattaatttttggggaatatctggtaggtcagaattctttaggttagaattggtaattcaaagggtatgaatatttttaaagtatttgccaaactgatgaatggaaacagtacatcattttaatttgcttttctcctctattgaaggacttcctaaagccagtccaggagcacagtttttacctgttcagtggcacatatctgtgattgaaactctgtttttgcatctttaaccactgaaggaagaatggtaaggtaaaaagaccttaggctttggagccagttggatctggctttgaaaagcaacctgaccactcactacttgaacactcttgggtgaggctct

SEQ ID NO: 27671 - DNA, 2300 bp, Homo sapien
gtgtttggggtggggtggatggtagctaaatggcaagccaggctttttggagggactcccaaatgtctggatctggatggctgttccctagactgttcagtttttctggaaaggacttgtgccatctgctttctggggagctgctggtattctcagggtagggttgggagtggtttggcgctgagtcccttccactgtgcctgaccatggccctgcatctggatcctctcaggactcctgttcaggggcccagggggactggttttgcatagaggttgcctgcagtggtgggtgccgccaatagggtcaggctctgaacttcacctttggctcctggtgtctgcagcgcctgggtatacagggcttttgcaggctcagtcaacctgactccttacacacccacatctgcagcctttaggtatggcatcctctgcttccctaacccagggattggtcacacctatttgctgctttctagaaatgtatcagaatccctcatctgctgctggcttgccttccctctttctattattatgggcttatatttttgtttatttttgtagagatggggtcttgctatgttgcccaggctggtcttgaattcctggctcctggcctcaaacagttctcctgccttggcctccccaagtgctgggattacagtcatgagccactgtgcctagctttaacttttttatacctgtttaaggttaattaaagttatagtaatatggtcaaacacaattctagctggaggctaaattacctgttgacctggctgtttcttgcactaattctgttgcatttattctcatttttgtttctataaatttaaaatatgaacatgggtgggcgcggtggctcacacctgtaatcccagcactttgggaggccgaggcaggctgatcacttgaggtcaggagttcgagaccagcctggccaacatggtgaaaccctgtctccattaaaaatacaaaaattagctgggtgtggtggtgggcacctgtaatcccagctactatccaggaggcagaaattgcagggagctgagatcgtgccactgcaatccagcctgggcgacagagtgagactccatctcaaaaaataaataaataaaaataaaataaaatatgaacatgccttatatctgaagggcagatatagaaattatttttctagggtgattgtcctctgaatatatgaagaaacaatgttatttgacgttttctttaaaaaggaagtctgaagctaggcatggtggctcctcgaacctgtaatctcagctactcaggaggctgaaccaggaggactgctcgagcccagcaattcaagaccagcctgggcaacataataagacccccttctcaaaaaaaaaaaaaggttgaggggagtctttgctaacaattggatttagggaaagaggggccaggaattaaaataactacaggaagtaagataactacagggtatgcccagctgtgcccttggaggcctgtctggagtacagtcagtatttagtgcacggagagctttggctgcacttgctctggggcagatcagtcactgctgatgcgtcccatggtgcatctctcctgatgatcttgatgctgttgcaggtggcccatggcgccctcagtgatggtgccattgatgctgtggagacacagaaggacctcctgggagccagtgggctcatgctgctgcttccccccaaaatgaagagtgaggacatggcagaggaggacgtgtactggctgtcggccttgctgcagctcaagcagctcctgcaggctaagcccttccagcctgcgcttcctctggtggttcttgtgcctagcccaggaggggacgccgttgagaaggaagtagaagatggtttgtgaaggaagtctcgtttatgaagcagcattgtttaataaatgggtggaggccctgggtctgaggatggtccagtagtgttggggtcaggaatcactgagacagcaacccctgtggtgactgtccactgcaggactgggtggggtcagcacagtgagatatgttagcaggtgtgctgacagcagaatgcaagtgaccttcatctatgtctgtcttaaaggtctgatgctacaggacttggtttcagctaagctgatttcagattacactgttaccgagatccctgataccattaatgatctacaaggttcaactaaggtaaggtttcatcatttttaatggtctgtcaagatattttgttttttccccttttgctgtatcttgaattgagtgtatattagcgtttgcattgtctttttctt

SEQ ID NO: 27672 - DNA, 2300 bp, Homo sapien
gctgacttcccattaatataaatgtattagttaccttattcctaaataactaattactcctaacatagcagcttaaaataatgtctgttatcatggtatctgtgggtcaggaatccaggtgtagcttagcttgggtcttctggctcaaggtttctcatgggtggaaatgaaaatgttggctaggattgtggcctcatctgaaagcttgactgaagggtatctacttcccagctcactctagtgagcttgtgtcaggattcacttccttgcaggctgtggccaaagacttcctcagttcctgccacatgggcctctccccagctgacagcatggcagctggctttcatcagagtgagcaagaggtgagcctagatggaagtctgagtgtgtttataacctaaacttagaagtgacatcctgttgcttttgttggcttctgtctgtcagaagtgagtggctaggcccagctcacggggcaggagatcacacgtgggcatgaacactaggtggaatcaggggggtcctcttggccactgcataccatactaggtacagcgtggcctcttgtgccatggtccttgctcggccttccacgtcttcccgggatagctacactagcactttgtattacttcagtgagtggggtcatattttgatggctctgtgactgctattcacctcagaaccagtagtgttctataaccacaattatttttttcctgcaagaaatagagttgccttattgtctcacttaatgtagttctctttatctctttaattttactggggggccgtatatatctcggtagagttttccaaatgttctgtcacttcacttgatccatccatgttccctctgtcctggaactctcatctgtgggctggtctccatccaggcaacatgtgccttagtgccatcattgtgagcatatgtgtccctgctcctccacttggaagctctgtgaccttgggcaagttccctagcgtctctgccacctgtgtatgggtactgttacttattatccctattttactcagagacggtaaaataaactgcccaagcctctgcaggtgctgtctggtggagatgctcatctggctcttgaggataaaatgagtgcaaacacagactgcacaggacagtgcctggcacaggccaggtgcttgctcagtgttgccattagcagcagctgcagtattttttcttggttcagccccttgttggatgttatatgtcatgcgaggggaattttctgagtcttttccattatgaaaatgattttattaacaaaataccttaagctgggggaaagaaaaagaaaatgcatttatttcattctgacatttgcttcatagtttagctacgtttgtaaaattataggtagaaaattattttcctggccgcgcatagtggcttatgcctgtaatcccagcactttgggaggccgaagtgagcggattgttttgagtgcaggagttcgagaccagcctgggcaacgcggtgaaaccctgtctctataaaaaatacaaaaattagctgggcatggtggtgtgtgcctgtagttctagtagcttgggaagctgaggtgggaagattgcttgaacctgggagttcgaggctgcagtgagccgtgatcgcaccactgcactccggtgttgacagaggaagaccccgtctcaaaagaaagaaaattatttgccttccagttttgctccactgtcacctagcatccattgttgctgtaccattcctgttcctttctgtgtggcctggttttctctgtggaagccttttctctctgttcatggcgtcctaaaaattcactttgttacactggcactggactagcttcactcactgtgcagggcttagcaggtcctttcaggctagagactcctatttcacttctgggacattttcatgtctttatgacactctgtcttttttctgttctctcttgaacttctattagatagatgttaggcctcatcaattgatcctctgagtttcttatcctattttctatcctattttcaatctcatctcttcctactgtgttctgaaagagttccttgactttattttccaattgtcctactgaattttttattccatatatattacttatttcctctttctttttatcatgactttttcatagcatcttattttttggatgcatcatcttatctttccaaggaaattagggtttttggggtctaagttttctttggttcacgtattatctggttcctcttttttttttttttcctctctgttactccagtttatctctttt

SEQ ID NO: 27673 - DNA, 2300 bp, Homo sapien
aacactgagcaagcacctggcctgtgccaggcactgtcctgtgcagtctgtgtttgcactcattttatcctcaagagccagatgagcatctccaccagacagcacctgcagaggcttgggcagtttattttaccgtctctgagtaaaatagggataataagtaacagtacccatacacaggtggcagagacgctagggaacttgcccaaggtcacagagcttccaagtggaggagcagggacacatatgctcacaatgatggcactaaggcacatgttgcctggatggagaccagcccacagatgagagttccaggacagagggaacatggatggatcaagtgaagtgacagaacatttggaaaactctaccgagatatatacggccccccagtaaaattaaagagataaagagaactacattaagtgagacaataaggcaactctatttcttgcaggaaaaaaataattgtggttatagaacactactggttctgaggtgaatagcagtcacagagccatcaaaatatgaccccactcactgaagtaatacaaagtgctagtgtagctatcccgggaagacgtggaaggccgagcaaggaccatggcacaagaggccacgctgtacctagtatggtatgcagtggccaagaggacccccctgattccacctagtgttcatgcccacgtgtgatctcctgccccgtgagctgggcctagccactcacttctgacagacagaagccaacaaaagcaacaggatgtcacttctaagtttaggttataaacacactcagacttccatctaggctcacctcttgctcactctgatgaaagccagctgccatgctgtcagctggggagaggcccatgtggcaggaactgaggaagtctttggccacagcctgcaaggaagtgaatcctgacacaagctcactagagtgagctgggaagtagatacccttcagtcaagctttcagatgaggccacaatcctagccaacattttcatttccacccatgagaaaccttgagccagaagacccaagctaagctacacctggattcctgacccacagataccatgataacagacattattttaagctgctatgttaggagtaattagttatttaggaataaggtaactaatacatttatattaatgggaagtcagcagagaacatttaaatggataaactgagaaatggctgtgtaagtgtgtgatctggaaacaggagaaaaatgcagccctgaagaaaggagttaagagaggaaggaggagctactatgtctcattttaaatcacgtgggtggcattatttgacttctttttaagtacacggaagtgttactttcttaaatgaaaatgaaggtaacagcagcagtaaactaatttccagtagatgaaatgtgactttgtaatcccaggaaaagggaagaatttgcaccaagaagttactgttacctcagaatggcaagagcatggatggctcttatcatcatctttatacttcttttacatttcctcattttttaaaagttttgtgtacatattacatttaggaaatccaatatatagtattaaaacagaaaaagtaaagaagcaggctgggcttggtgcccactactcaatttgactggcttaaaaaaattttttaaacgacatgtacggacagacataatacttgcttctgagcctcccagtctttcaaaaccacattagggaataagcagtatttgcatggttccagtgatatctgggagtaagtgaaagtaatgaaaacacagaagtaaacacaaagtaattatagttcacctttatacacacgttaacagaaatcatctgatcccctttgctgctaagtgagttgaaaagcgaaagcgtctgaatcccaccagcatcgctggatgtgtcatccactgagccttcatctcccatgaacttgacttttaaccaatttgctagaattctacagatttaaaaaaaacaaaaaacaaaaaaaacacttgaagaatctaattctatatttgaattataaagactttcaggaaaagaagaaagaaaaatatcacacagacctaggtccacaaataccacatcttactatgaagctgatctgcacaaaacaggctgttgttttaaaatggagcaacgatctgtactcgttcttttttttttttttttttttttgagccagggtctcgctctgtcgcccaagctagagtgcaatggcacaaacttggctcaccgcagcaagcaaacctgcctcagtagctgagactacaggcacgggccacc

SEQ ID NO: 27674 - DNA, 2300 bp, Homo sapien
cacacaaccacatctcgtgagagctcactatcatgacaacagcgaaggggagttgtcacacacttaaccagatctcgtgagagctcactatcatgagaacagtgagggggagttgtcacacacttaaccagatctcgtgagagctcactatcatgagaacagccagggggattccacccccatgatacaatcacttcccaccaggcccctcctccaacattggggattacagttcaacatgagatttgggtagggacacaaatccaaaccatattacttggcaacagtcttagaccaaaagcatttaagagttgattgttatttcaagctgtgttaaggtacattgatagacctgcttcattttagactcttcagtaagatagtttatagtctgtttactatagttccatttttttccccttaaagaaacttttggcattttaaaaaagaaaaaattgacatgatcttattttctgtaaccacatagcatacagaagtcatatttttaaagcaactacagtctctgtgtttttttgagacagggtcttgctttgttgtcacccaggctagagggcagtggtgtgataacagctcaccgcagccttgacctcctgggctcaactgatcttctcacctcagcctcctgagtagctggaactacaggcgtgtgccaccatgcctggttaatgttttttttttaaagatggggtttcactatgttgcccaagctggtcttgaactcctgggctcaagcaatctgcatgcttcagtctaccaaagttttgggattacaggcgtgagccaccacacccggcttacagtttatttttaaaatagctttattgaaatgttattcacataccataaacttcacccatttaaagtgtacatttcagtgatttttagatatattcacagggttttgcaaccatcactgttaataattccagaacaccttttcacttagaaagcctgtattcttttttttttttttagatggagtctcactctgtcgcccaggctggcgtgtggtacactttgttcactgcaacctccacctctcaggttcaagcaattttcctgcctcagcctcccaagtagctgggattacaggcgcacaccaccacgcccagcttagttttgtatatattttgtagagacagggttttgtgatgttgcccaggctggtctcaaactgggctcaagcgatccacctgccttggcctcccaaggtgctgggattacaggcgtgagccactacgcccagctggtgagtcatttcttaaaatagctgtcttctcatttgctaagttcgtatgtcacttaagaattcttaaggtctcaggtatgagaaatttgatctgtaaaaaacatgtatttcaaactctagggatgttttctattgctgaaaatcttaatgcttcagaattttaagtcacattagaatgagccagttccattctaatggaatggagtgccccctcctcctgcccaattaagaacaagtagaagccgggagcagtggctcatgcctgtaatcccagcaactggggaggctgtggagggaggattgcttgagcccaggagtttgaggccagcatgagcaacatagtgagaccctttgagtgacactctacaaaaaaaatggaaagattagctgggcatggtggcccgtgcctgtagtctcagctactgaggcaggtttgcttgctgcggtgagccaagtttgtgccattgcactctagcttgggcgacagagcgagaccctggctcaaaaaaaaaaaaaaaaaaaaaagaacgagtacagatcgttgctccattttaaaacaacagcctgttttgtgcagatcagcttcatagtaagatgtggtatttgtggacctaggtctgtgtgatatttttctttcttcttttcctgaaagtctttataattcaaatatagaattagattcttcaagtgttttttttgttttttgttttttttaaatctgtagaattctagcaaattggttaaaagtcaagttcatgggagatgaaggctcagtggatgacacatccagcgatgctggtgggattcagacgctttcgcttttcaactcacttagcagcaaaggggatcagatgatttctgttaacgtgtgtataaaggtgaactataattactttgtgtttacttctgtgttttcattactttcacttactcccagatatcactggaaccatgcaaatactgcttattccctaatgtggttttgaaagactgggaggctcagaagcaagtattatgtctgtccgtacat

SEQ ID NO: 27675 - DNA, 2300 bp, Homo sapien
gctgacccactcatgccctcctatgcttcagcccagggggtggatggagctcctcaggccacacctacccgtgagcagtggcccttcccagccaggaaaggcaggggaagggaggtggtgtcaggggagctggagtaggggtggcctaccgactcaggcagcacacctcaatccctgtctgcgtggccagggagtaaaacaaacagcacttatttttattcttaaacattacccttgtgtattttttctcttccctgtaggttgaaacaagagagagagctggtgttaagtgagctgagccagggcctggccgtggagctgatggaacgcgtgatgatggagtttgtgagggaaacctgctcccaggagttgaagtaagtgaaacgctggtgtcttgctgtgccaggagagtgagctttggctctgccctaggctgtgtcttgcaccactgaggatgggctattggaaatggatcttgcctgtctaagctactttgattttgtgaccaaatgtatttgatgcagtcctctgtgctcccttggctaatagaattttattataaaaaattctcttttatatgagggctgccaccacatgatcatagtcagccatccttattagccactggcatttatcatatatttgagacacttccaattgattgcacaagtcagatgttgctgatgagaagattttgtggttgtctgcatggtaatttacaaattctacgccaggcacctgtagtcccagcaactcaagagactgaggtgcaaagatcacttaagctcagaagttccaggtagtgtgctatgactgcacctgtggtggccactgtactccagcctgggcaacatagtgagaccctgtctctaaaataattaaaaattctgactattttattaagataaaggtttatttcttaactgttacgagggcccctatggacctataatttggcaccctgttccacttaattctttttaccctgtctttctaggtgtctgtagtttaagtattaaagcttcttttacaatgaagatagaattacattttaatactgaggatgcagactcttgcactttttttttttaaagacggagtcttgctctgtcgcccacactggagtgcagtggcgtgatctgggttcactgcaacctctgcctcctgggttcaagcgattctcctagctcagcctcccaagtagctggaattacaggcatgcaccgccatgcccagctaattttttttttttttttttttttgaaatggagttttactctgttacccaagctggagtgcagtggtgccatctcggctcactgcaagctccgcctcccgggttcacgccattctcagcctcctgagtagctgggactacaggagcctgccaatatgcctggctaatttttcatatttttagtagagacggggtttcaccgtgttagccaggatagtctcgatctcctgacctcgtgatccgcctgccctggcctcccaaagtgctgggattacaggcatgagccaccgtgcctggccgccagctaattttttgtatttttagtagagacggggttctaccatgatggccaagctggtttcgaactcctgacctgaagtgatttgcctgctttggcctcgcaaagagctaggattacaggtgtaagccactgtgcctggccgactcttgcacttttcttttttttttttttttgagacggagtctcgctctgtcgtccaggctggagtgcagtggcgcgatctctgctcactgcaagctctgcctcccggcttcacgtcattctcctgcttcagcctcccgagtagctgggactacaggcgcccgccaccacaccaggctaatttttttgtatttttagtagagacagggtttcaccatgttagccaggatggtctggatctcttgacctcatgatccacccgcttcggccttccaaagtgctgggattacaggcgtgagccaccgcgcctgactgactcttgcacttttcaagcaagccctcagtgtctgtgggccccaagtgcagtgtcttccatgctgattgccctgtttctaggaatgcagtagagacagaccagagggtccgtgtggcccgttgctgtgaggatgtctgtgcccacttagtggacttgtttctcgtggaggaaatcttccagactgcaaaggagaccctccaggagcttcagtgcttctgcaagtatctacagcggtgagtcctgtgttcctacaggcaaaatccacacacacggggaagagtcttttaacaaattcaaaatatatg

SEQ ID NO: 27676 - DNA, 2300 bp, Homo sapien
ttatttatttatttagagatggagtctcgctctgttgcccaggctggagtgcagtggcatgatctctgctcaccgcaacttctgcctcctgggttcaagtgattctcctgcctgagcctccctccccagtagctgggactacaggagcccgccaccacgcccagctaacttagtagagatgggatttcgccatgctggccaggctgatctcgaactcctagcctcaggtgatccacccacctcggcctcccaaagtgctgggattacaggcatgaaccaccttgcctggccgtttttaataactttaaacaaaagagatattcgggtatttttctttagaaaagctcttcaccggcagtggcgcacagaggcagcctcctgtccccgcagccctgtgcactcctgctcagaggctttgtgcttgctgtttccactgctgttccacactcgcagagccgcacggcgctgtctccacctccctgaggccaggcgaggcttggctgccgccctcagcagggcccccaccagcgctccctgctctccctgcccatctgccgcactaaatcaccattctgtgtgtttgatgtgtttgttttctgtggcattggtctctcccctggcatgtcagctatgtggggacagggattgtgtttttgttcactgttgtactctcagcattaaaaacggtgccaggcacagagcaaatgcttgatcagtgttggttgaattaaagaacatcggaagaggactaacagcttaggtaccaaagtcccagcactcaagcagaatttttgttcggattttcatgtttttcctttgtctatttttacttttatttttatttatttatttttttgagatggagtctcactttgtcacccaggctggagtgcagtggcatgatctcggctcactgaaacctccacctcccgggttgaagtgattctcctgcctcagcctccctagtagctggtattacaggtgcgtgccaccacacccagctaatttttgtatttttagtagagatggggtttcaccatgttggccaggctggtctcaaactcctggcttcaagtgacccgcctgccttggcctcccaaagtgctgggattacaggcgtgagccaccacacccagccccattgtcttttttttaagacactggttctcactctgtcacctaggctggagtgcagtggtgtgatcaaggcttactgcagcctcaacctcttgggctcaagcagtcctcccactttagcctcccatgttgctgggaccacaggtgcatgccaccaagccccactaattaaaacaaatttttttttatagagaataggatgtagctatgttgcccaggctggtcttgaattcctgggctcaagtgatcctcccaccttggcctcccaaagtgctgggattacaggtatgagctactgcacctggtctctgtcttctttttttttttttaaggctcttgttagaatgccgtgaacagttgtctccaactattatatgtcattccacgggattggtttcctgctggcattccatggtctccggggtcctctgcagcaccttcctggccttttgtcatgtggatgctgcacagctgacttcacctggtcttgttgatggacagtttgtttcatgatttctcttatgaataaaaccttcacaagccatccttctctatgagagtgtttgcttggcacgcattcctgagcactgcccctgagcagaccgcctatgatctctaagcttgggttccgtgttgccaaagcgccttctggtggactcagcccaggaggagcccatgtgccccacgctggccatggctgtggtcatgggctgactgcatgtgtctgactgggccttcgtctgagactgcagtgatttcgctcctcctctcagatccgcaaggatgctctccgggcgctcaactttgcgtacacggtgagcacacagcgatctaccatctttcccctggatggtgtggtgcgcatgctgctgttcagagactgtgaagaggccaccgacttcctcacctgccacggcctcaccgtttccgacgggtaagagctgagaatggaactgtggggcccctgtctccttttttcttgttaattctgatgaagggctgtgaagggctggctgcttgcctgacttgaagaaggtgcattccctctgccatgcaggtgaacacacgagactcagaatggctgggggtgttcccaaggtcacatcctggctgtcagcacattgagggctcagaccaagttctttgtgactccaaaatcagtc

SEQ ID NO: 27677 - DNA, 2300 bp, Homo sapien
atctctttgggaaaacataggttgaattcagcactatcatcatccatgaaagctaactaaaaagcaaaaatctcatatcatatgcacaaaatctctgactttgaaatgcttcatgttttaaatcgaagtttctggagtgaggctgatggcgctaagttcctttcagtgggtgcctcagtgtctgtgctttgccgtgtgctagggttgcagaggcaatgggaaggccagtccctcccctggggtttgcgcagagtaaactgtgtcttggggtttccagtcggttattttgttccacttccacggaacttggggatgaggacagagcagcccctgtagcacctgctgttctaggccctgcatgattccgttcagtgcaatgtgaccaggaccgcggcccaccgcacagagcgccacctcacctcgcacacactctgctgcccattctggcagcggctccaaggaggctgccaggattccttgccacaagcccgtagtggccacagcgtggggaggatgctgcctgggagatcctgggacctgccttggttgatctgtggctccaggtcatttctttggtcacacatcagggcctcctgtaaacagtgactaaacccacagtcatgtcacagtcagaaggtcttttgcaggtttgctccttgtcagatctgcaggttgccaaacagaactgatattctggagtaaatgaaaaggttttccacaacttgccacttgtagttaatattggctgggtgctttggctcacacctgttatcctggcaccttggcaaacttgggaggtgggaaaattgcttgagctcaggagttcaaggccagcctgggcaacatagggaggccctgtctctactaaaaataaaaaaaaagccaggcaggtgtggtgggatgctcctgtagtcccagctactcaggaggctgaggtgggaggatcgcttgagcccaggaagttgaggctgcagtgagccaagatctgcactctccagcctgggcaacagaggccctctcaaaaaaaataaacaaaaataaaacatagttaatgttgtatacacgatgattgagcgttagtagaatgttgaccatttttaataactttatttatttatttatttagagatggagtctcgctctgttgcccaggctggagtgcagtggcatgatctctgctcaccgcaacttctgcctcctgggttcaagtgattctcctgcctgagcctccctccccagtagctgggactacaggagcccgccaccacgcccagctaacttagtagagatgggatttcgccatgctggccaggctgatctcgaactcctagcctcaggtgatccacccacctcggcctcccaaagtgctgggattacaggcatgaaccaccttgcctggccgtttttaataactttaaacaaaagagatattcgggtatttttctttagaaaagctcttcaccggcagtggcgcacagaggcagcctcctgtccccgcagccctgtgcactcctgctcagaggctttgtgcttgctgtttccactgctgttccacactcgcagagccgcacggcgctgtctccacctccctgaggccaggcgaggcttggctgccgccctcagcagggcccccaccagcgctccctgctctccctgcccatctgccgcactaaatcaccattctgtgtgtttgatgtgtttgttttctgtggcattggtctctcccctggcatgtcagctatgtggggacagggattgtgtttttgttcactgttgtactctcagcattaaaaacggtgccaggcacagagcaaatgcttgatcagtgttggttgaattaaagaacatcggaagaggactaacagcttaggtaccaaagtcccagcactcaagcagaatttttgttcggattttcatgtttttcctttgtctatttttacttttatttttatttatttatttttttgagatggagtctcactttgtcacccaggctggagtgcagtggcatgatctcggctcactgaaacctccacctcccgggttgaagtgattctcctgcctcagcctccctagtagctggtattacaggtgcgtgccaccacacccagctaatttttgtatttttagtagagatggggtttcaccatgttggccaggctggtctcaaactcctggcttcaagtgacccgcctgccttggcctcccaaagtgctgggattacaggcgtgagccaccacacccagccccattgtcttttttttaagacactggttctcactctgtcacctaggctggag

SEQ ID NO: 27678 - DNA, 2300 bp, Homo sapien
acatcctgtatcgtccgaccaaataaagtacctccccggggtcgattcaggcggacaggtcgtttgtctggaggatgatcgccccgggacagaggatccgaatcttctgctggctcgtggccatgtctccttggggagcgatcctggtcctccttccttttcagtcctttcattaggctgggaagtggttccacctgggaaacagcttcttcacacccctgcctgacacctgctttgctagcctggaaaggttcgcccaaaaccgcagatgatacagggaagctactgaagctattattagaacttccaaatattgacttaggtcctctcttctcttcctctacattttggtttgacaaagcaggggtaaaggcagataatgaattattactactaacaggttttgaaaaggtaaaatttgaagtggtagctgaactacttgttacttgaggaaaagagaaaggggccaggcctccaggtgcactactaattgggtgggaaaatgtaaaaaacccagaagcaatttggctctgggttttctctggctcagattcagcccccagtattggtttgaacactgcattttccagaggtttaaagctgaattctgttttcccaaaaccagagttcactatttctccagcttcttgtccaaaagcagaagtgcttgggaaagccccaacactggtgggtgatttaaaactaaatcctgtgtttcccagcacagatgaacttgaaggcccagaggtagccacaaaggtggaagtgtgctcaagtccagaaaagggtccaacacttgaggtttgggtgaaccctaatgtttgcactgaagaggaatgacttactccagaagacgctggaaagctggatacctgtgaaaatcccgagctcttcccagataaggtactgttttgtccaaaaagagaaggttgaccaaatcgaaatggcggcttagatggaagtgttcctacattactagaagacgccgaaaaagcactaggctgctgcccactgaaaggattagttgggttcatcttctgctccaattattagaaggtaattaagtattatgtgtacaaaattaattggcttcctgaaacagcctgtagcactagggagttccccttcgtctttagaacaagctgaaagagaaaaattcagatcatcatagctatgttctgctacaagtctaagaaaagaatttttgaacactgtcatactaaaaggataactatttcaaaggcaggcaaagggttattattttctgagagccgataggttattttgttggagggtggggtagagagtggtacaaataattactttgttacagaggtttaaagcgtgatcctttaagattaaaaaaaaaaaagccgaatctttttactgagttagtaaattcatgaaaaacctccattggcagtaagaaaatgaatgctgttccaccttacaacttagagacgaatttctcccgacttcctccaatctctacagccggagaattcactgtaacgctgtcaaaaccttagcgtttcgggatctcctcccacctggcttccctcggagcggctggagcgctaagcactttctcacattccttcatcgcgccctggcggccaccctcgagcgggctggaaggacgagggcgctgccacgaagctgaggcctctcggcggggacggcgtgcccggggagcctaatcttccacccagcacagcccgaaacggcggaggccacgcgctgggcccaggccggcctggccactgtcccgccccgggctcgccaggggtcgccggcgccgcaacgctccgttagcgacgatgtggaggcccgggcgcgcggagctgcgtgggggaaggaaacggcgcccctggcgccggcccagcccccacgctcaccgtctcgccccaggaccccgaggcccgcgctgcccactggcccctcggaaagacttgaggcgcaagcacaggctgctgccgcgacactcagcgctgcgcaccgcgggcagaaaacgccgcggaccgacttccggttcgctcagcactaccggattccgccccgcccgctgcgatccggttccgctccccacaacccgctctgtggcggggcttccggtcgggagggtccgcccgctctcgcgtcctttgctgggtccagacaccggtacgtccgggcgggtttttagtctcccaagcgagagcgtcgcattcacccgcgtgggtctgcgggcgccccagaccccagaggacccggcccccaacgcttacctgtcccctctcctgtccctcccccattccagc

SEQ ID NO: 27679 - DNA, 2300 bp, Homo sapien
aggagcagcctggccaacatggtaaaacccccgtctctactaaaaatactgacaaaaaaaaattagccaggcgtggtggccagcatctgtggtcccacctactggggaggctgaggcaaaagaatcacttgaaccaggaagggaggttgcagtgagccgagatcgcaccactgcactccagcctgggtgacagagcaagactccgtctcaattaaaaaacaaaacaaaacaaaacaaaacgacaggaaatttactctgggaagatgggctagacaagaagaggaacattttttttttacctcatgaaatggaaaagaaagcacatcggttgggacatttctatctctgtagattctattaatgtgctgaatattcttgttgtcaacacagatgatccccaggtcaaatttctgcactcctaaaatcctccttacaatctcgatcttactgcgaagtggcgctctcctgatggggatgactcgctgcagatttctaatcaccaaactcatttcaggaagaataaccagccctttaaaaatgtttgcaacggaacctggggttaaagtgtaagagaagaccaatcagtacaagtgataatacggtctgtaaaaatacagatgcacgcgcaatcagatcactttatttggtggaactgattgaaaatcttaagggaatttacatttaccacaaggaggaagcaacaacgagggtctatggaaggatgccgcggaatccggccagaaggactccaggcgggcggagcggaaggagcggttcccagagaaaagggggcgggttgggggtgcgcgcggagagaggcgcgcggacgcggcggggtgcggggaggggcaacggctggggagagaaggggctggaatgggggagggacaggagaggggacaggtaagcgttgggggccgggtcctctggggtctggggcgcccgcagacccacgcgggtgaatgcgacgctctcgcttgggagactaaaaacccgcccggacgtaccggtgtctggacccagcaaaggacgcgagagcgggcggaccctcccgaccggaagccccgccacagagcgggttgtggggagcggaaccggatcgcagcgggcggggcggaatccggtagtgctgagcgaaccggaagtcggtccgcggcgttttctgcccgcggtgcgcagcgctgagtgtcgcggcagcagcctgtgcttgcgcctcaagtctttccgaggggccagtgggcagcgcgggcctcggggtcctggggcgagacggtgagcgtgggggctgggccggcgccaggggcgccgtttccttcccccacgcagctccgcgcgcccgggcctccacatcgtcgctaacggagcgttgcggcgccggcgacccctggcgagcccggggcgggacagtggccaggccggcctgggcccagcgcgtggcctccgccgtttcgggctgtgctgggtggaagattaggctccccgggcacgccgtccccgccgagaggcctcagcttcgtggcagcgccctcgtccttccagcccgctcgagggtggccgccagggcgcgatgaaggaatgtgagaaagtgcttagcgctccagccgctccgagggaagccaggtgggaggagatcccgaaacgctaaggttttgacagcgttacagtgaattctccggctgtagagattggaggaagtcgggagaaattcgtctctaagttgtaaggtggaacagcattcattttcttactgccaatggaggtttttcatgaatttactaactcagtaaaaagattcggcttttttttttttaatcttaaaggatcacgctttaaacctctgtaacaaagtaattatttgtaccactctctaccccaccctccaacaaaataacctatcggctctcagaaaataataaccctttgcctgcctttgaaatagttatccttttagtatgacagtgttcaaaaattcttttcttagacttgtagcagaacatagctatgatgatctgaatttttctctttcagcttgttctaaagacgaaggggaactccctagtgctacaggctgtttcaggaagccaattaattttgtacacataatacttaattaccttctaataattggagcagaagatgaacccaactaatcctttcagtgggcagcagcctagtgctttttcggcgtcttctagtaatgtaggaacacttccatctaagccgccatttcgatttggtcaaccttctctttttggacaaaacagtaccttatctgggaagagctcgggattttcacaggt

SEQ ID NO: 27680 - DNA, 2300 bp, Homo sapien
ggtggcgtgcacctgtactcccagctactcgggaggctgaggcaggagaatcacttgaacccgggaggcggaggttgcagtgagctgagatggctccacctctgcactccagcctgggcaacgagcaaaactccatctcaaaaaaaaatacataagatggagtccttttctcagatgaggtcacttatatcaagggtgctctatacagttgcttaactaaattaacctggtttttgttctgtgcacactcagagctgtttaaatgtctcccaagactgtcactgttaatgactgtggacaagagccaggttcttttattatcttgtttatttatttttttattttttttattttttttccagacggaggttttgctcttgttgcccaggctggagtgctgtggcgcaatcttgggtcactgcaaactctgccttccgatttcaagcaattctcctgcctcagcctcccgagtagctgggattacaggcgcctaccacgacgcctggctaattttttgtatttttagtagagacggggtttcaccatgttggccaggttgtctcgacctcctgacctcgtgatctgcctgcctcagcctccctaagtgctgggattacaggcatgagccaccgcacctggcccttttttattattttttatagagatggggtcttgttgtgttgtgccggctggtctccaactcgtggactcaagtgatccttctgccttggcctcccaaagcactgagattacaggcgtgagccaacgcccaatggcactgggatcttaaacatggggccagagtctgctcatgtccagcagcaccagcgaggacccctgactgccatctgggaatgtgtggcaccaggcaggtcatgtgaccctagcccacaccctccacagatctggagggagggtaaggcctggtttcatgctgacttcatttctggttggatggcctccagggtaaggtgagttgaactctacgtcaggagtaatccagcccctccagggccagcaggagtaaggtgcgcccctccaaggatctccatgagctgcctctgtgagcctgacctcctacgggctagccagccttcacccaatcactcactggtccagcttcagggtccctacatggatgtgggttggaagacaggacaggcacacaaccatagatactgatggacatgggccatttacagaactgagggcaagagagcaattttggccactgaggcaagttcctgggttagctgcaccgaggagggtgctgacctctgcccctcgggtccacaggtctgggcccctgctgctgacatcccccacatgtcagtctgcctgctagtgggattgactaactcatcaacgtggagtttaatgcccaaccaagtgcagaccacgctcctgttttgcgtcaccctctgcgaagcttcctgcaaacttgactccctgcccagtgcccccagccccaaggtgggacatatcccctgggcaccccctctggtcctgctaaagcccagcccctctgcaggtcacaacccctcctctgtcctaccccttctgctgcctgcaatttcctgaactccttggtaggcagtctcctcaccctgtcctcccagtgtctccccaccctgtcttccctgcttgctctgagggtccctaggagggaggtattaacaccctggaggcagtacacaggtggggcgccctcccctgacacacaggttcttctggactgggtcctgaggctggtggtgcatagggggtcacgactgcccttcccccaggtctgagggttctgcccctctgcctcagctgctgcccacttttttgccttcccatgaagcccagctggccacacctggggatgagtgtttaccggtagcctgaggacgcacagtggaaacctggcaacctggggcctccctgtgtctggcagcctggcaactgtcacgcggcgcccagcgctggcttctggggcactgcagtccagggagggtgtggctatcttcccacagggctcttctcttccctcaggctggtctccaggaggtaaggcccgccctgcaggcaacaccggtgcttgggctcctgctgagcagttctttcctgcgagtaacagaaccagggagggaggtgggctgtggcctcccctgcccctacagtcgtctcctgcagctcccaccatgctggactcatcagcagcagagcaagtgacccgactgacgctgaagctcttgggacaggtgaggcagagcccgggatgctcctgtttttaacaactcgcaggctgtggcgtt

SEQ ID NO: 27681 - DNA, 2300 bp, Homo sapien
aagattgcaccattgcactctagcctgggcgtcgcagcgagactctgtctcaaaaaaaatatatatatatataacatatgtagcacactaaggtaagatgttaataagaggggaagccacacatgtggtatgtgggatctccatgtactatcttctcaattactctaaatctaaaactgttcttaaaaaccctatttaaaaaaaaagtctgacaaatccatgccctctggagcatgttatgtatactactagagatcccgaggaggcaattcttagtgcttcccattcacttggcagtcacagctgtgggcacacaggctcaagtctctccttaagtcagtcagtattacaaaccatacataatagtatacttgaccactgcataaatgttataaacattccacatcaagagaaagaggagaggaaaaaaagttaaccagttcaacgaaaaggagaatctggcaaggaagcatctctgatgtgggcagagcctgcagcagcagatgtggagggcttctcacaagtgacagcaagactgtctgtaaaacggccactttgacctggtggtgttctgctcttttcatggccatagagtactctggtaaggactgatagtaagagtgtcttgtttatgtctttatctgggtgggtgcagtatctactgatgaggaaacatctggtccctgttggcctgataccctttttttttttttttttttttttttgaggtggagttacactcttgttgcccaggatggagtgcagtagtggtgccaccttggctcactgcaacttccgcctgcctggccctatcttataatttaaaaggcatcaggggccaggtgctatggctcacacctctaatcctagcactttgggaggccaagacggcagatcacttgaggtcaggagttcgagaccagtctggccaacatggtgaaaccccatctctaccaaaaatacaaagattaactgggcgtggtggcgtgcacctgtactcccagctactcgggaggctgaggcaggagaatcacttgaacccgggaggcggaggttgcagtgagctgagatggctccacctctgcactccagcctgggcaacgagcaaaactccatctcaaaaaaaaatacataagatggagtccttttctcagatgaggtcacttatatcaagggtgctctatacagttgcttaactaaattaacctggtttttgttctgtgcacactcagagctgtttaaatgtctcccaagactgtcactgttaatgactgtggacaagagccaggttcttttattatcttgtttatttatttttttattttttttattttttttccagacggaggttttgctcttgttgcccaggctggagtgctgtggcgcaatcttgggtcactgcaaactctgccttccgatttcaagcaattctcctgcctcagcctcccgagtagctgggattacaggcgcctaccacgacgcctggctaattttttgtatttttagtagagacggggtttcaccatgttggccaggttgtctcgacctcctgacctcgtgatctgcctgcctcagcctccctaagtgctgggattacaggcatgagccaccgcacctggcccttttttattattttttatagagatggggtcttgttgtgttgtgccggctggtctccaactcgtggactcaagtgatccttctgccttggcctcccaaagcactgagattacaggcgtgagccaacgcccaatggcactgggatcttaaacatggggccagagtctgctcatgtccagcagcaccagcgaggacccctgactgccatctgggaatgtgtggcaccaggcaggtcatgtgaccctagcccacaccctccacagatctggagggagggtaaggcctggtttcatgctgacttcatttctggttggatggcctccagggtaaggtgagttgaactctacgtcaggagtaatccagcccctccagggccagcaggagtaaggtgcgcccctccaaggatctccatgagctgcctctgtgagcctgacctcctacgggctagccagccttcacccaatcactcactggtccagcttcagggtccctacatggatgtgggttggaagacaggacaggcacacaaccatagatactgatggacatgggccatttacagaactgagggcaagagagcaattttggccactgaggcaagttcctgggttagctgcaccgaggagggtgctgacctctgcccctcgggtccacaggtctgggcccctgctgctgacatc

SEQ ID NO: 27682 - DNA, 2300 bp, Homo sapien
gcttgtttgcagcagtaacgatgcccttcccgagcgtgctggagtggctcctcgctgacgcaagctcaccttgcagcctcctcagcaactgcaacttaaacgcgccctcaggaagccctggaatctcgctcagaattttttttctttttttgagacagtctcgctgcgacgcccaggctatagcgcaatggcgcgatctcggctccctgcaacctccctcaggaagccgtggaagctcgaccgccagaaacttccttctcctgactcaggccacagtcttctgtgtggtgagcggggtgtccagcggtctcctggttcccagactcggaattgggtggtttgagcaaactctgggcagtgggctcattagagcaggggccaggcaggcaacacagccaagcgagcaggggctgcacccacaggatcacactttccaggaacagagacccagaccgcgcctgaatctcacaactgttacgtgttacaatacatttacaactgtgggactgaggggatgtgcccaggtttgcctagactgtgttcctcagaaccccagagtcgtttctgtggacatcctagagaggttctgctaatgttggacttgggtcttatttcagttcttttttcttttcttttttataggcagggtctcagtctgtcacacaggctagagtgcagtggtgagaccaccgctcattgcagcctcaacttccccgggctcaggtgattctccatgtcagcctcctgagcagctggaattacaggcacaccaccatgcccagctaatttttgtatttttagtagacacagggtctcactgtgttgcccaggctggtcttgaactcctgggctcaagtgatccacctgccttggcctctcaaagtgctggagttacaggcatgagcaacctcgcccagcctcaattcattttaaactattaaaaagctgtcaaggccaggcaaccactgcactccaacctgggtgacagactgagaccctaactcaaaaaaaaaaaaaaaaaaaagctgcccagataaattttgtagatactcaccctcaaggagggaaacgtaactcccctctccttaagtgtagaccacacatagccacttcctcccaaagagtgcaataaagaaaaggagggaaagagccactttattgtggagaaaactggcagactccacctcagccaagtgacgcaggtcagcctcacagttatagtcgaggtgacagtgtgtgtccctgatgtgatggggtgacagtggcacttcacccctagatgcttcctttctgtaacctgcagtcccagtctaaccaggagataatagacacattttaattgagggacattcttcaaaatatctgcccagtactcttcgaaactgtcaaggtcatcaaaaacgaggaaagtctgagaaggagcctaaagacacataactcaatgtaatggggtgttctgatggataccacattagggacatgaggcaaacctaaggaaactgtcaaagtgtggacttcagttacttgtgtctcaatattggttcattaatcataacaaatgggccaggtgcactggctttcactcaaaaattagctgggcatgatggcacgtacctgtagtcccagctactcgagaggctgaggcagaagaatcgcttgaaactgggaagcagaggttgcagtgagccaagattgcaccattgcactctagcctgggcgtcgcagcgagactctgtctcaaaaaaaatatatatatatataacatatgtagcacactaaggtaagatgttaataagaggggaagccacacatgtggtatgtgggatctccatgtactatcttctcaattactctaaatctaaaactgttcttaaaaaccctatttaaaaaaaaagtctgacaaatccatgccctctggagcatgttatgtatactactagagatcccgaggaggcaattcttagtgcttcccattcacttggcagtcacagctgtgggcacacaggctcaagtctctccttaagtcagtcagtattacaaaccatacataatagtatacttgaccactgcataaatgttataaacattccacatcaagagaaagaggagaggaaaaaaagttaaccagttcaacgaaaaggagaatctggcaaggaagcatctctgatgtgggcagagcctgcagcagcagatgtggagggcttctcacaagtgacagcaagactgtctgtaaaacggccactttgacctggtggtgttctgctcttttcatggccatagagtactctggtaaggactga

SEQ ID NO: 27683 - DNA, 2300 bp, Homo sapien
cactttgagaggccaaggcaggtggatcacttgagcccaggagttcaagaccagcctgggcaacacagtgagaccctgtgtctactaaaaatacaaaaattagctgggcatggtggtgtgcctgtaattccagctgctcaggaggctgacatggagaatcacctgagcccggggaagttgaggctgcaatgagcggtggtctcaccactgcactctagcctgtgtgacagactgagaccctgcctataaaaaagaaaagaaaaaagaactgaaataagacccaagtccaacattagcagaacctctctaggatgtccacagaaacgactctggggttctgaggaacacagtctaggcaaacctgggcacatcccctcagtcccacagttgtaaatgtattgtaacacgtaacagttgtgagattcaggcgcggtctgggtctctgttcctggaaagtgtgatcctgtgggtgcagcccctgctcgcttggctgtgttgcctgcctggcccctgctctaatgagcccactgcccagagtttgctcaaaccacccaattccgagtctgggaaccaggagaccgctggacaccccgctcaccacacagaagactgtggcctgagtcaggagaaggaagtttctggcggtcgagcttccacggcttcctgagggaggttgcagggagccgagatcgcgccattgcgctatagcctgggcgtcgcagcgagactgtctcaaaaaaagaaaaaaaattctgagcgagattccagggcttcctgagggcgcgtttaagttgcagttgctgaggaggctgcaaggtgagcttgcgtcagcgaggagccactccagcacgctcgggaagggcatcgttactgctgcaaacaagcacacggccctccacgacgaaccttttgcaagtgaaggcgcacgaacaggcccggaggactacaaagaaacccagaaaccagacttggacacatgaaataaaggggttagctgaaggaatactccacagttaaggacggcctgcgcgaggtcaccggccctgtcttggttttttgccacttcgctccagttagtttcccaagttccacctacgcgcgcgccagctgagaaaacgcccaccccggcggtcccgccacaggtcacaggcggtgcggaccccgggactgtgtccgggcttcggtgtccagagagctccaagacacccaaaccttccgtggtttccacctctgcaagcttatgttccgctgagctcaagctgagggacgacgacctcatgcgacgtcagtttccccctgggaccacgaacccacggccccatttctcttctgtctactaaaaaccttttcttttcttttttttttgagacctaagacatcagtgagacacacgagcagacacgggctcggtcgggaaaggcgggagctccaagcggcggggcctgcaggtccaggcggttcgcgggctttctgaccgcattcggccgagttcttctctgaagacccaggacccccggccgagggggcgcattcggcgggctggtggcgtaggattttgtttcgggttcccagggtcccggcaagggtgagggagcccttgcggatcccctgagatccacctcagcagcctcctccgtggtaggcctcaacttcccgcggcggcccacagccaacgactaatgcctgagcgggagaaaacggcctggccctgtccgggtggttgctgagcaccgttcggcgccgcccgcgcctgcagggagcccggcccgctgtcctggtggacacaaagcccaggggccgcccgcgcgggaccagcagcgcgaactttttgccgctcggccagcctggcaggggattttaaaatcggccaatcacagcgggcgccaggcctccgctttccgcttactggtcctgccgtaggaggcgggtacgtgagcgcaccaatctgtggccggcgagcgtaaagggcggggctccgcccaggctgcaccgcccagagcgcgcgtgcgcgagaccggaaacgcagccccctgattggcggcgcgtgtcgggggcggggccgcggctgcgtgacagttgtcgcggggggagggcgagcccaagcgcgggggagggagtgtaaatagagcgaaggctgctctgtgtcagccccgtcaccgccgggcggcccgcgcggagtctgagggagatggaagttgagcaagagcagcggcgcagaaaggtggaggccgggaggacgaaggtaaacattaggggcttcttctctagctgctctggcgtgaagtcctaagggcggctcc

SEQ ID NO: 27684 - DNA, 2300 bp, Homo sapien
aaattctgagcgagattccagggcttcctgagggcgcgtttaagttgcagttgctgaggaggctgcaaggtgagcttgcgtcagcgaggagccactccagcacgctcgggaagggcatcgttactgctgcaaacaagcacacggccctccacgacgaaccttttgcaagtgaaggcgcacgaacaggcccggaggactacaaagaaacccagaaaccagacttggacacatgaaataaaggggttagctgaaggaatactccacagttaaggacggcctgcgcgaggtcaccggccctgtcttggttttttgccacttcgctccagttagtttcccaagttccacctacgcgcgcgccagctgagaaaacgcccaccccggcggtcccgccacaggtcacaggcggtgcggaccccgggactgtgtccgggcttcggtgtccagagagctccaagacacccaaaccttccgtggtttccacctctgcaagcttatgttccgctgagctcaagctgagggacgacgacctcatgcgacgtcagtttccccctgggaccacgaacccacggccccatttctcttctgtctactaaaaaccttttcttttcttttttttttgagacctaagacatcagtgagacacacgagcagacacgggctcggtcgggaaaggcgggagctccaagcggcggggcctgcaggtccaggcggttcgcgggctttctgaccgcattcggccgagttcttctctgaagacccaggacccccggccgagggggcgcattcggcgggctggtggcgtaggattttgtttcgggttcccagggtcccggcaagggtgagggagcccttgcggatcccctgagatccacctcagcagcctcctccgtggtaggcctcaacttcccgcggcggcccacagccaacgactaatgcctgagcgggagaaaacggcctggccctgtccgggtggttgctgagcaccgttcggcgccgcccgcgcctgcagggagcccggcccgctgtcctggtggacacaaagcccaggggccgcccgcgcgggaccagcagcgcgaactttttgccgctcggccagcctggcaggggattttaaaatcggccaatcacagcgggcgccaggcctccgctttccgcttactggtcctgccgtaggaggcgggtacgtgagcgcaccaatctgtggccggcgagcgtaaagggcggggctccgcccaggctgcaccgcccagagcgcgcgtgcgcgagaccggaaacgcagccccctgattggcggcgcgtgtcgggggcggggccgcggctgcgtgacagttgtcgcggggggagggcgagcccaagcgcgggggagggagtgtaaatagagcgaaggctgctctgtgtcagccccgtcaccgccgggcggcccgcgcggagtctgagggagatggaagttgagcaagagcagcggcgcagaaaggtggaggccgggaggacgaaggtaaacattaggggcttcttctctagctgctctggcgtgaagtcctaagggcggctccggtgcccgccaccgccccctgccaggagaggacgcggtccggcggaagccgccgcggaggtctcgctttttcccgccggctccgctggaagccgcctcctggccgccgccatcttgaatccgccgctctccgccaggtcccgcccccgccgcggccacagccaatcagcggccgggacgcgcggcgcctctcgggcgggccggggcggggctgcgcctgcgtcggggggggtggggcgcgggctgggcgcggtgcacgccggggcggggtgtggctgcagggcggggctacaggggcgtggcgtggctgcacggagggggtggggcgcggcaggcgctggaccccaggctggatcttccagtggctcccgcgtcctccgggaccgggtggcctggggcgggcggccggtattcgggtggctgcttggtctagggccagtttcctgcgcggccggggccgggggcgtggcgcgggtggcctgcagcgcctccccagggtgcgccttcgcctcgtccgtcggagatgctttccccgcgcgtttctcgcggcgttgcagtccttactgtgtgaaaggcccccgcggcgctcccggccgccgtcttcttcccgcgcccttgggctcgcgtcctgcccgtccgggcctggcgtacgctgccgggaacccacgcggcgctggcgccgggcgccttcaagggacgcgctcccgtctttctcccgccccgggtttctccgtgaaaaagcgctcgg

SEQ ID NO: 27685 - DNA, 2300 bp, Homo sapien
atatagcccagccaaaacttcctagccatagattctgagacaagatacagaaatagcaaaaaattaattaagccaggtcaatctcacatcttcctttatggaatcagatgttctatttttcatgacacagctcaccaaagcaccagggacatccacagagcatcgcccatcagaaggcacagcctagctctgctcagtcctcaaatccgagagtttgagactatgtgcgagcctcatctcccgctaacgtcttactcaagaggtatgcgatcgatcccacatcagcctttcacggggagacatctgttccctcaaaagacaactgtggccacaaaaacaaacgcatggaacacacatttgtgtaaatgataacacaagtacacaagctcatggacccagaaaaattacacaaggccatttacacaagaaaatggtctctcaaggaaatatttccttcaaagtcaacctcatgtcgtttattttcatgtcctcctccaccacacctatccatgtcgggatatagcacagacctggtctgcggcctgcgtcgccctacaggcggcgtcttgtccctccctcccccctccaccctcctgggagctctgctcctgttcgcagctccctgcaggctccgggctccccttcccctcctgcccgcctcagcccttccccggcctagccccgcgtcccctgtccgccgtgcccgggagccccgctcttccccagcaccccagccagaacatcctgggggggagcggcgcgcacctcgcagaggccggcctgctcccgcggttccgcctcgcgctttcgggactccctttctcctgcccccgagtcatgggctctgcgcgctttattcccacgaaacctaggacagtggccatcaaaccgagcgctttttcacggagaaacccggggcgggagaaagacgggagcgcgtcccttgaaggcgcccggcgccagcgccgcgtgggttcccggcagcgtacgccaggcccggacgggcaggacgcgagcccaagggcgcgggaagaagacggcggccgggagcgccgcgggggcctttcacacagtaaggactgcaacgccgcgagaaacgcgcggggaaagcatctccgacggacgaggcgaaggcgcaccctggggaggcgctgcaggccacccgcgccacgcccccggccccggccgcgcaggaaactggccctagaccaagcagccacccgaataccggccgcccgccccaggccacccggtcccggaggacgcgggagccactggaagatccagcctggggtccagcgcctgccgcgccccaccccctccgtgcagccacgccacgcccctgtagccccgccctgcagccacaccccgccccggcgtgcaccgcgcccagcccgcgccccaccccccccgacgcaggcgcagccccgccccggcccgcccgagaggcgccgcgcgtcccggccgctgattggctgtggccgcggcgggggcgggacctggcggagagcggcggattcaagatggcggcggccaggaggcggcttccagcggagccggcgggaaaaagcgagacctccgcggcggcttccgccggaccgcgtcctctcctggcagggggcggtggcgggcaccggagccgcccttaggacttcacgccagagcagctagagaagaagcccctaatgtttaccttcgtcctcccggcctccacctttctgcgccgctgctcttgctcaacttccatctccctcagactccgcgcgggccgcccggcggtgacggggctgacacagagcagccttcgctctatttacactccctcccccgcgcttgggctcgccctccccccgcgacaactgtcacgcagccgcggccccgcccccgacacgcgccgccaatcagggggctgcgtttccggtctcgcgcacgcgcgctctgggcggtgcagcctgggcggagccccgccctttacgctcgccggccacagattggtgcgctcacgtacccgcctcctacggcaggaccagtaagcggaaagcggaggcctggcgcccgctgtgattggccgattttaaaatcccctgccaggctggccgagcggcaaaaagttcgcgctgctggtcccgcgcgggcggcccctgggctttgtgtccaccaggacagcgggccgggctccctgcaggcgcgggcggcgccgaacggtgctcagcaaccacccggacagggccaggccgttttctcccgctcaggcattagtcgttggctgtgggccgccgcgggaagttgaggcctaccac

SEQ ID NO: 27686 - DNA, 2300 bp, Homo sapien
tacaacattgagcaaatctacctgagctgcaaaggcccctcctgccccatcaggggtgtcgtcacatgatgtgcttttgcaaatgtcccctcctccacagagtgcgctgtcctccttggttaccggactctcctcctggacagacgcatcgacagccgagcccttcctcttcgccgtctttttctccgaatgcgaactgtcaccttttgtttttctctgtcggaagtgagcaagctgcgcaaaaatgtagataagtagtaaaggcaaaggtaagtgagaaaaaaataacagaaccacaaagtcaacagactggtggggaccatgaggcccgagggctgacccagtctactctgccacacctggccaacagatggctctccacaaacactgccttcatcaatatctatatccaaggggtctaacaatgaggactgctaattatgcctggtaaagaaaaccatacggctgattggcagaatagctttcctagcccttggcagtttacagaaaaataaaactttaaaaaaaatttgtataaaagattgatagcttaatcaaggcatatttaagttttaaaatgatataaaagctaaatctctcccttcttgccccaattttcccccaactgaagaaatatatagcccagccaaaacttcctagccatagattctgagacaagatacagaaatagcaaaaaattaattaagccaggtcaatctcacatcttcctttatggaatcagatgttctatttttcatgacacagctcaccaaagcaccagggacatccacagagcatcgcccatcagaaggcacagcctagctctgctcagtcctcaaatccgagagtttgagactatgtgcgagcctcatctcccgctaacgtcttactcaagaggtatgcgatcgatcccacatcagcctttcacggggagacatctgttccctcaaaagacaactgtggccacaaaaacaaacgcatggaacacacatttgtgtaaatgataacacaagtacacaagctcatggacccagaaaaattacacaaggccatttacacaagaaaatggtctctcaaggaaatatttccttcaaagtcaacctcatgtcgtttattttcatgtcctcctccaccacacctatccatgtcgggatatagcacagacctggtctgcggcctgcgtcgccctacaggcggcgtcttgtccctccctcccccctccaccctcctgggagctctgctcctgttcgcagctccctgcaggctccgggctccccttcccctcctgcccgcctcagcccttccccggcctagccccgcgtcccctgtccgccgtgcccgggagccccgctcttccccagcaccccagccagaacatcctgggggggagcggcgcgcacctcgcagaggccggcctgctcccgcggttccgcctcgcgctttcgggactccctttctcctgcccccgagtcatgggctctgcgcgctttattcccacgaaacctaggacagtggccatcaaaccgagcgctttttcacggagaaacccggggcgggagaaagacgggagcgcgtcccttgaaggcgcccggcgccagcgccgcgtgggttcccggcagcgtacgccaggcccggacgggcaggacgcgagcccaagggcgcgggaagaagacggcggccgggagcgccgcgggggcctttcacacagtaaggactgcaacgccgcgagaaacgcgcggggaaagcatctccgacggacgaggcgaaggcgcaccctggggaggcgctgcaggccacccgcgccacgcccccggccccggccgcgcaggaaactggccctagaccaagcagccacccgaataccggccgcccgccccaggccacccggtcccggaggacgcgggagccactggaagatccagcctggggtccagcgcctgccgcgccccaccccctccgtgcagccacgccacgcccctgtagccccgccctgcagccacaccccgccccggcgtgcaccgcgcccagcccgcgccccaccccccccgacgcaggcgcagccccgccccggcccgcccgagaggcgccgcgcgtcccggccgctgattggctgtggccgcggcgggggcgggacctggcggagagcggcggattcaagatggcggcggccaggaggcggcttccagcggagccggcgggaaaaagcgagacctccgcggcggcttccgccggaccgcgtcctctcctggcagggggcggtggcgggcaccggagccgcccttaggacttcacgccagagc

SEQ ID NO: 27687 - DNA, 2300 bp, Homo sapien
ggagatttgctttggaaaacatgtgtttgaaagaaattaagaggaaaaatggccttatacttgccatttctggtgctcttcatttcttcttgaagatctgagtgtttggcgtcattcccttcagcgtgaaggatctccttcagcatctcttgctgtgctgcacacattttctccgttttttgaagtctttattttaccttgattcttgaggagtatttttgtggcattaaaaagtctaaggtgacaggtttcttgttcaggatttaaagatgtttaaaatccttctctgcagattttatgatctgttttgtcttggtgttggtttccattgattgtgttttctcttcagcaggggtcacgttttcctgcttatttatgggtcagctgggttcaggttgcatcctggacactgtgagtgatagatttggagactttgggttctgtcctgctcctctggagagtgttggttttctgttgcagcaggcagttcactcgggtgacttcagactgcatgctcccctgcgtctgtgctgggctgcggcatggtgttaattcagttcttgtagctttagccggcttgcttgcttttggagtctgcccctcgtatgtacagatcggggtcagcctgagacgtgggcgggttccttcccaggcgttgcagctctctttcctccctcactctccagttcctctggctcagtgagggatttgggatttctgtgtgtggggcatggacagatactactcttagtgaaaagctggaaaaagagaatggctcagtgctgtttcttccttctgaatgtccagccctctgcagggtctgtctgcttgtggatctctccacagccttcaggtttttttgtacgttctgttcagttcatagtggttgtctctggagggctggtctggcgaggtgcacaggcatcaccagaagtagcaccctaaactttaataacttaatttttaaataaggagttgaggtcaatcttacgtgcctttttttgggttttttgtttgtttctttttgatgagttcagtagtttattgacctacttttttctctttgaaagtcaggaagtcaggcatggtggctcacacctgtaacaatcccagcactttgggaggctgaggctggcggattgcttgagctcaggagttcaagatcagcctgggcaacatgcagaaccctgtctctataaaggattgcttgagcccaggagttcgaggctgcagtgagctgtgattgtgcccctgcactccagcctgggcgacagaccctgtctcaaaaaaaaaaaaaagattaggatatttgccctctgcattctccttcatccccctctgcacaggatccctttacagtgtgccttgcagttcatccaccccttgctcaaggtctttcattgtcctggcgttgaccttgtacagatcgggagcatcgcaccattggctgctcttgcctcctgggcatccgatcatgcttgctgcagtggcccagcgctatctgtggggctggcgttcccctaacagaggcctgcggccgatctgagtcctgccactggtcttggtctgaacaaagaagcctccggctgctgcctttgctcggctgatgtgtgctgccttcggttgttggttgctgtcaaggccacgggctccagagataaagaacagtcggttctcggtgccaggacgtaggaggcattttatttagttttagacttgtccactttaggtttcttccattgtcatcaacatgagaatcattcctgttgctgtgtgcagcgtaatgggtgtgtgtgtggtgaaaattccctgtcttcagaggtgggtttgggttgtctcttctaataatctcttccattagcgtctttcctcctaaatgaaattatgttgtctgtaggtaaaacacaatctaattgaagaccaccagaaggaactaaataatgctaagcaaaagactgagctgatgaaacaggaattccaaagaaaagaaacggactggaaagttatgaaggaggagctacagcgggaagctgaggagaagttaacattgatgctacttgaactgagagaaaaggctgaatccgagaaacagaccatcataaacaagtttgagcttcgagaagctgaaatgaggcagcttcaggaccaacaggcagcccagatcctggatctggagaggtccttgacggagcagcagggccgcctgcagcagctggaacaggacctcacttcagacgacgccctgcattgcagccagtgtgggcgggagccgcccacagcccaggacggggagcttgctg

SEQ ID NO: 27688 - DNA, 2300 bp, Homo sapien
gtgtcaggttaataggagaggtgagccaccccggcaggcttcaggttcaaggcaggccaggtgtgatggctcactggagcctagaagtttgagacaagcccgggcaacatagcaagaccttgcctctacaagtaataaaaaatgtatccaggtgtggtgacacatacctgtagtcccagttacttaggaggctcaggtgggaggatcgtttgagcccaggaagttgaggctacagtgggccatgatccagcaactgcactccagcctgggcaacagagtgagacactgtctacgaaaaaaaggtttaaggcagtttggggagtcaaaacctttgaaggcatctacccaggtatctccaacccatgtatgacgggcttttcttttctttcttttttttttttaaaagacagagtctcactcctgttgcccaggctggagtgcagtcacagctcactacagccctgacttccagggctcaggtgatccacccaccttagcctcccaagcagctgggaccacagccgtggccaccatgcccggctaattttttgtgttttcagtagagatggggttttgtcatgttgcccaagctggtcttgaactcctgaactcaagcaatcttcccgccttggcctcccaaagtgctgggattacaggtgtgagccactgtgcccagcctcatcttttcttagcagggatccaaacttagtggaagagtattgccttgtttgggtgttttgctatttttggagttcagtcaaacagggatgttaattcctgggcctggttcttgtctttgacctgctgcagtaaatgaagcttctctatatgtaacgggacagattcactggcttacaactgtttgttgcttgccttcagctgaccactattcttaagagtctcggttggcactaagcaatagctatccaatccccctttccttccttttatctactacgttcaccatatatgaaatgtctgatacttcacccactcgtggattccatttcactagttcaccctcctacttcaccactggtgagtgatgcagcctcgaatcccatcttctcaccagctttaatgctgcagaatggtttctccagaagcagacgctgcgactgagtttggggtacgaggatgttgacatggtatcaacacccgtgaaaggaaggggaaggaagcaggactgggcggaggaagaagggtatgtaagtcccgcaaagctttggccaacctcgtgtggagctctggaacgagaactgctgaagttcgccagactcgggcactcctgcctaactcagtaacaggcgggcggcatcgggacacggacacgctgctcaggccccgccacagccaccctcgcaccgtcagacacactcccacacattcggggagcagggccttcaggacgccggcggcgccctctcagtctagctccgccaggcccctcgtccgtcctcccgccctccaaggtcacctcgcggtccgacatggctgctggggctccttcggggccaacgatgtgtacttctagggctgttttttaaagcaaaggagtgaacacaggtaaaggcacgagaaaggtgcctcgacgccaccacggactgcgcagcgttcgcgatcagcacagcccgaaagggaagacagcggtcaacgcggacgcgccatggcgcggggaccaaggaggagccccgagaggggcggggctggccggagggccgcgcgcggggccaccagcggcgcctaggggtcagcgccaacgcccacgggttggtcatccccacttaggcgcctcgggccgcaactaagcagcctgcccgcctcaagcccgccaccctcaagcaggcccagcgcagagcctgtcgggagcggcgctctcccgcctctcccaatgggagcccggagcggcatcgacgcgtcttcggggccaatggaagcgaggctctggtgttgctgggcggggccgggagggctgcgcgggcccgagacccactgcgcacgcgcgctcgctacccgcccttcccgccgcgcacgcgctcccgtgtagggccggccgggcgctcaggagcgcgcggggcagcggcggcgcggcggagccatccgcgctcgtgcccgcgcgggtgcgttgctgtcctggccgcgcccctgtcccgccgcctcccgctcctcgcctggcggatgtaggttgttggcctgaggggagctacgtagccgaggtttgcgctgccgccgccaggcccggtccggttccagcctctgcccggacgctagccggcctggccatggctgaccgcgggtgc

SEQ ID NO: 27689 - DNA, 2300 bp, Homo sapien
acctgggaggcagaggttgcagtgagccgagatcacgccattgcactccagcctgggcaacagagcaagactccgtctcaaaaaaaaaaaatgtgccacatgtcacaacattgttaaaaatctgaatgctgaattcaaaatagttgcaagtacatgttgtattatatgtaaaacaagatcacaacagcatctacctccctaaggttggcaaggattaaatgacttactgtatgctagtgcatattatttagatgttttgagaaataactaccccagacccagcaaaatcttatcaatctgaaacttaaattaaggataataagattatttaaaaaatggattctaaaagctgaaaatgcatttagatctcaaaaacagagtaagaatcaattacatgcttttcttcaaggactgcaagtcctttctgacactggagaagaacttaactctttcccaaagacagccaaaaggaatatcaggacacaggccttgaaagggataacatccaaatgggaaatgccacccaccacctctgaagccagattactccagtctatttttatcaaccaaccatttatacgactttttttttttactttaaaaaattccatgagggggctaacaactcctaagtgttatgtgctttgcatatattaaggtattttagcctcataacaatccaaaatggaaagtgctggtataaccccactttatagataataaaatgaggcacagggtgcagctcctagagtatgaggcgcgcggcaagggctcccagctccaagggaagtagctgcctgcggacaacgggcgcagtcatcctggtgaagcccagaccaagcccagacctacagccttgagaaaagcggggctcacagcttggggcaaaagtggtcattcctctcaagattctcacacctgtccaaacgacctagtcaaagccagtccttggggtcggatcccattgggggagcagctggggatagggaaaggtctccagaagtttggcaggcgtcccggggtgaggagtaagggtcccaggtgtgaagggcctggggggaggagtccttgtatgggggaggggtccttgtatgagaggcggggcagtggtccctggtttgaggggccgcgcgggtgtcccggggctgagggtcgggagtccggaggggcagcgcggggctcccagggtgaagggcggggtccccggggtgaggggccgcgcggggttccgggggtgaggggcaggaggtcccgggggtgaggggcgggagttcccgggggtaaggggccggggtctcggggcgaggggtcgtgctggggtcccacatgaggggcggggtcctagggttgaggaacggtgtctccggggcgaggggcgggttccagggtagaggaaccggggtcccgttgaggggcagaggtcccaggggcgaggccgcgtgggggtcccgggggtgaagggcgggggtcctggagtgaggggccgcgcgggggtcccggagtgaggggctgcgcgggggaccgggctgagggcgggtcgcgggggttgagggcggggtccggctcaccttccgacagctccagctccagctcagccaggctctcccgcacctcggcaggcagcggcgccgcctccagcgggcacccgcggtcagccatggccaggccggctagcgtccgggcagaggctggaaccggaccgggcctggcggcggcagcgcaaacctcggctacgtagctcccctcaggccaacaacctacatccgccaggcgaggagcgggaggcggcgggacaggggcgcggccaggacagcaacgcacccgcgcgggcacgagcgcggatggctccgccgcgccgccgctgccccgcgcgctcctgagcgcccggccggccctacacgggagcgcgtgcgcggcgggaagggcgggtagcgagcgcgcgtgcgcagtgggtctcgggcccgcgcagccctcccggccccgcccagcaacaccagagcctcgcttccattggccccgaagacgcgtcgatgccgctccgggctcccattgggagaggcgggagagcgccgctcccgacaggctctgcgctgggcctgcttgagggtggcgggcttgaggcgggcaggctgcttagttgcggcccgaggcgcctaagtggggatgaccaacccgtgggcgttggcgctgacccctaggcgccgctggtggccccgcgcgcggccctccggccagccccgcccctctcggggctcctccttggtccccgcgccatggcgcgtccgcgttgaccgctgtct

SEQ ID NO: 27690 - DNA, 2300 bp, Homo sapien
tgtccaccaccatgcccagctaatttttttttttaagagatgggagctcactatgttgcccaggctgatctcaaattcctgggctcaagtgatcctcctgcctcagcctcccaaagtgctgggattataagtgtgagccactgcacagctagtgttgattttttttttttttttttttttttttttgtgacagggtctcactctgtcccccaggctggagtgcagtggtgcaatcttggctcactgcaacctccacctcccgggttcaagcgattctcctgcctcagcctcccgagtagctgggattacaggcatgcaccaccacgcctggataatttttgtatttttagtagagacagggtttcaccgtgttggccaggccattctcgaactcctgacctcagctgatctgcccgccttgaccttccaaattgctgggattacaggtgtgagctaccatgttggcccctatgttgattcttataaatgggcgagcatctgtgtattcattgttgtggtagaacacaatttctatagtcatatagacacagtgcctttcctagtggtagacccaattataaccataattcctataggaacttacagtcagccagcattctgaacagatagatggactgtaccatggaaataaaacacaaaaatgtacattcagacaatggaaggagtgacttttacatatgttccagatctaatgtctgtttttaaatgttacaccaattctactttaagaacttgattgtggccaggcgcggtggatcacacctgtaatcccagcacttcaggaggccgaggtggttggatcacttgagtccaggagttcaagaccagcttggccaatatggtgaaaacccgtctctactaaaaatacaaaaattggctgggtgtggtggcacatgcctgtaatcccagctacttgggggactgagacaggagaattgcttgaactcaggaggcagaggttgcagtgagccaagattgtgccactgcactccagtctgggcagtgataaagtgagactccatctcaaaaaaaaaaaaaaaaaaggaacttgattgtggtctcttagttttgcagctgttttaactggcagtgggggaagttttaatttctgtagttttattcttttaggactgcaaaggtttggtgtccaacatacttttttgggggttgtagtagtttgtatgatcctggctgtttttttcataatgtaacaaaaaaatgtaccagtgacaattgatttcaaatttgtttctgcttccttgagggaatttcttccttccttccttccttccttccttccttccttccttcctttctttctttctttctttctttcctttctttctttctttttctttctttctttttctttctttctttcttttctttctttcttctttctctttccttccttccttccttctttctttcttttttctttttgagagagagtgtcgctctgttgcccaagttagagtgcagtggtgcaatctcagctcactgcaacctccgcctcctgggttcaagtgattctcctgcctcagcctccccagtagctgggattacaggcatgtgccacgacgcccggctgatttttgtatttttagtagagacggggtttcgccatgttggccaggctggtctcgaacccctgacctcaggtgatctgcctatgtcagcctccccaagtgcagggattacaggtgtcagccaccatgcccagccccttgagggaatttctaaccaaaatctcatcaggccattgtgacaggcaggtttactctgtgcctgcctctgtgctgaagatggtggttctgagtctggatccctttgagaattgagccacccacatgcacgcagatgtctgcataacgtgtctgggagttcatagggtcccagtatgcctttggtcagccaagaaaacaaattaatgaaaataccacactctccccacttagaactcagctagtggagctttagactaacggggtttcaagagcagcttaatactcatttgacttaacagccactttcattttgggtgtgtttttcaaaagcagatctgcattctgcccctcctgatgtcaccacgggcctcgtggagcattcgtactttgagcgtccacaggtggcttctgtgagaagtgttcctcgggggtgcagcgggagcatgctggaaacagcagatggtgagcctgcctctctttctcctcgtgaaatagcagaacacaggttttgtctttgggtattgaacacagctttaatgtattcactgtagc

SEQ ID NO: 27691 - DNA, 2300 bp, Homo sapien
gacttacacctgtaatcccagcactttgggaggctgagacgggcagatcacttgaggtcaggagtttgagaccagcctggccaacgtggtgaaatcccttctctactaaaaatacaaaaattagccaggcatggcagcgcatgcctgtagtcccagctactcgggaggctcagacaggagaattgcttgaacctgggaggcggaggttgcagtgagctgagattgctccattgcactctagcctgggcaacagagcaagactctgtctcaaaaaaaaaaaaaaagaagaaaagacaagctgtggtgacaccttgtatagcttcttcagtatgtgatgttcctgtgccttctgattagtgctcagcgtggttctctgtgttagttccatgaccttctacttttatgtgtttccagtaatttgaatagataaccaggattattattaattggtatgtggtatttggaaatgctgtatctgttcctgaaacttacatgttgatgacgtactcacctcagaatttctctagaaaatgcatagggcttattgagagggttgctcagtggtgtcaccttctttgtccacttgcagctgaaacattaacaaacgtgctggatttcaaaagggatgctggtctgtggcatggcgtgttaacagtgagtgttgtttgctgatgactaactgttggaacaagggattgagatgaacccaagcctctgcctgaaatgttgttgggagagtacatcggttttgttttgctttttctggtgtggctcgggcccactcgccctaagcatgtgtgctcccccacagagcgtcatgaacaggatgcacgtggtcagcgtcccctacgcgctgatgaaggcgaacccactctcctggatccagaaagtgtgcttctataaaggtaacggataccatggtcagggccttcacccttctttagggaaatctctttgaactgacctttggtgcttaagaaaaaataaagctgacatgtggaactgcagatgtaggctgaagagctgtgggacgtctttcttggtcacacccctgcccaggaatatgggggctttctctgcctctggcatggccctcagggtttcgtgggtgatgtggtaagtagggccacttggtggggtctgggccttacttctctcaacggttgaggtgcctcctgggaccaagcaggaggccccagcatggccacacctgcacagttggcagtctgtgtctctgccctgtggagctcagtggcacttctaccagccactgaggcactggatcacctgggtcacccatgttgccttgttctacctactgggctgtgcccctctagacatgtctcagagcagtgtggaggggcagctctctctgtctgtcctactttatggagggaaactgaagcttgggtaggggtggggggattgctggattccacatgctagccagtgcaggggccagactgaggcctgagaccatctgtttagcttctggggtcctcacacttctcagccagcaccaggggtttggggaaggacaacatgagatgaagcgggcagataggaaaagagcaatatggagcttctaagaaaaaattaatgttggaaatggatctgaggttttgatgtctaaattgtacctcagagttgatttttgtggaaaaagctttgagggtttgttagactgcatgtgagagacggctgcagagagcttgtgacctgggagctaagtgttgtgtctgtctgtgcatgtacacctctctgtgggatgaggtacacgtgtctgtaggcgtgtgagggtgccagtccttgtgacgcagggatgtctgtgccatcctctctctgcagctcgggccgcgctggtgaagtcgcgagacatgcactggtctctcctagctcagcggggccagagggacgtcagcctcagctcactgcgcatgctgattgtggccgatggtgccaacccgtgtgagtgagcctgtgtgcccggcgcataccccacacagtgtcccctcctgcaaaccaaagtagaatacactgagaagcaaaatggaggcattttcactgccattgtcatatagatacacatgtcccatcgtttctatgacacggaacatcttggtgattcactggtttatcccatgcatgtttattaggccactaaatttaaaagcaattttaatatgcttgatgaaaggtacatgccttaatgagagtcatctttcttaagaaattaccagattgtgctgtggcctggggttcctgtttctctttaggcctcatccccaccctcctgccct

SEQ ID NO: 27692 - DNA, 2300 bp, Homo sapien
ggtgcggccctgctagacctccagtgccaactgcccacgtctttggggctggggtcaagagccagagcgagtgtgcaccccagaatggtgccacctcccgccttcctggaaccagccacgcatgggggaacttaaccacatcacctgcatggtggtttccacctgcctgttaggaaccaattttaatgataaactcaaggatggcatcttagctttgcatggctaggagatggctccctagggctagaaatgctgcccaggatcatcctggagctggacgagctggacacatcacatcacccagtgtctgtgtggcctcggaaatctctcagcaaacggccaacttgccttccctcattttatacatttaaaagctaattttagagactggtttaactttaatgcaatttttcatttctttggtcctgttgatttttagtacatgccaaagtttttttttattaattattgaacacatatcactaaatacatttcatcaggaagatttaatttcctgatttatacataaagtacagtaaaacaaaatatgttaagaattttgctgtgactgaggccaaatcgtatcctctgagatgcgtcgtgtagtaaacttctcaataaggcgtagtttatgttcaagagagaaattctctttgtcacttagcataaaccttgtagctagctttctgaatatttgtatctcagtagaagagttaaatgcctcattcaagtatgttttcaaaataaaaattgtaaataaaatcacgtgatgtttatatatgagaagtcaccagcttttcattcagagttcccccgtttctagaggttggaccagcctcaatgatcgtggggaacctggttgctgggaagagaatcgctcaggcttccgggagagagctcgcccacctggaggacagcgaccaggcacggaaggtgacaggccagttccggggacgggtggacgggtgtctgtgccccggaggcgccagtgagcaagtcgccctctcgtgcagttcctgttcctggctgacgtgctgcagtggcgtgcccacaccactcctgaccacccgctgttcttgctgctgaacgccaaggtgaggcagtgtcacgcccacggggcttggaaacacctgtgggccggtggagccctttgcttgtctagttcatggtgccagtgtcctggttgttctcatgtttagagaacagggtgcctgtggactcagcccccgtcctggttgttctcatgcgtagagagcagggtgcctgtggactcagcccccttgtctggtgcggttctcgctgcctgccctttcctttcttgttttccacacatttcacacaatagtatttctattgattttgtgtttagcaggaaaatttttatcagctcaagtttttaaaattaaaaacagtatacatgtaaatattcctaagtttgtgagctaaaaggaaatgtttattttgtaaaaaattagccatttagaatttctacatttggttacagcttttaaatgacaaatgttgcttcctgccctgctcctgctgctgatttggaaattctcatgtgtttcaagttcctgttgtgtgcattccactgtgctaggaacattcaggatgtcaagaaggagaagctgtaatcttcatattcaggttgtgggcaggaatgcgaaatgcggaaacacagaaagttaaataacttaaaaccctgcaaggcttcctgtcccacgcaccatacaagctgtaagaactcttaagctttggtgtcgtaaagagtaggtcactgtggcttagaatatgctcttctagctcttggtgctgctcattcgaattaaaaaaatacttaatgatgcctacaatgtgcacagtgcacagtaataagattaaaaggacccctactctcaggaggcttaaaatcagtctttcctgctagaaaacaagttccgtaggagagagactttgtttttctggtgtattggaagcatctagaaccatgcccagtaaacatttattttatgattgattgagttctaaagcctacaaaccagccagtgatttatcattgaccaaggtaaaatcagcttatggtgtgaacctcagtatcaatacagtggagtgatgtaacctggagtgctggggagggggctttgaatggaactgggtagcaggggctatgaagaatgatgcccagtggctcaaggcaggaaaggaggccagtgtggtgggggccaggtggtcccaggtaggggatgcagataaggctgggggtcgctgggttttccctaaggatgcagtgggatccc

SEQ ID NO: 27693 - DNA, 2300 bp, Homo sapien
tcagatagctacagctgttgcccagattttgtactagtatctcaatttcatttctttctaaaaacatcttaaaaccaaatggctttttagataaccctacatattgaacgccttattcacccacatagtacaagaatagctggaaggaaatggcacctgtccgtgccagagcagggctgagtgcaggtctgtctctgtttccaaagtgtttgcttggccttgtgcctccccatcacagtggcagtgcacgcagggcagggcgggggctctgctcacaccctcttcaccacaaaaagacccctgaccactcaagcctcagacccttgtcacgcagcagaggagatcgggcgggagccttttgtgagctcgcttcctgtgtaggctgtggctgagcgtgggtgccggcctttgtgttagcggctctgcgtctgcaagcctggggcctccttgctagacgtcggaagggtatggatgccacacatgattgcagaaatgatgttaatgggatgttcacgtttgctctttaagatacagaggtgggttttgctctctctttccctgtgtttctcatgtggctgctgcttctgtgtgtgtttcctgtggctgtctcctccctgtctcactctgctgcctccttggcctctgtcagcccaacaggctgggaaagctggctgagcaggtatgaccttgaccttgaccttgttggtgcctctgtgcttccccctcccatgagttcatgtgactttctcgtgaattctagacaaacatgtttcttttgctgtcttactttgttcacagtggatattacttgacatattacaaaagctcccttgtaaccaaatttaaaagtaaaactattttcaaaaaatgttaatgctcatagcattgccttgggaggaagggctgtgtttagttccagtgcagaggtgtttaattccagtgcagacacaggttatgttgtctgggatctttaagggtgatgttgatcagagtactcatttaattgatgttccttattgaataaaatgacacataatgtcctttagtcgggattaatgttaactgtaagattcagaaaggaagagagtagaaaggtgaaggctgccatccatctcacctgagtgagtctcggctgcgagcagtccccggtagaattaggctggttggtgagaggcaaggccctgcctgacagcatggtggaaatgcccctcaaatcctaatggtgttttcatcacagcaagagaccagtgggaatagaaagttgttagaactgaaatgtaaagtggcatgatttggtgttttcagagtcattgagtgtttcgctcaatattatcaagctctgtggatgtttggatggaaagcatcagactgcctgggggaccttgaacccctaggcggactcactgcagggagcagagctgctaccttcttgggtgtccccgggggccagggaggagctgccatgcagctgtacctgtagaaacaagatgttaagtgaggcccctgaacagaagttcctctgctgctctccttccagggcacagctggcccggaccccacaaccgtctacgtggacatgcgggcactgcgccatgacaggtaatgctcccagcctgcctgggccccatggatacccagtggcaaagtgatgcaaaccaggtctgcactgactatgcacccccgggacccaggcattagaggacggcggggccaagtcaggcctaccgggacacctggatgggcacatgagaggacagctggctacattgggccatctgcaccaagaggaagaggagagctgtgtgccccactccgggcgtgcctcccaggggagctcagtgtctatctctgtgcgcccgtgtccccagggctgcagttaacatccctttatctgtcacacaaccaggaagaataagagtggcccctgtgacatttggttctttagagggacagggacagagagaagacaagtaacccatctactggcaagaacgtttcttacccgatgacccatgtgacatttggtttttagagggatagggacagatagaagacaagttatccatctactggcaagaacgtttcttacctgatgctgtcataggatctgacttagtttcatcttgatgaacgatggtggtgcatacagtgtgtgcttgctggtctgtggtcagatgtgtatcagggcccctcccagctttgaagctcagatcccagtcctggattctcaagtatggccacactgtagcttgatgtaaacactaggtttagcttactgggtgccaggggcttgctgggtt

SEQ ID NO: 27694 - DNA, 2300 bp, Homo sapien
tgccctttcagacattactacctgtgtagtaaattttgtactgaaattgttcccttaatttttagggttcgtttggtagaacggggttctccgcacagcctgccattgatggagtctggaaaggtagtggaaaccaagacgcgtgcattctgagtcgcgtctgagacctttgtctgaagcatcaccccgtggagggtgctgggggctgcggctctgatgaacacaggtcgacttctggttggggtgggctcggctgctgcagaagtctccttccctcctttgtggctggtatatagaattacttagttatgtttttaaacacacatctgagctcaaagccaagaaagggagaagttcaggtgcaggaataaagaactcccgctgggtgggtggcaggcctcaggcctctggggccagggccatggaggggggttccggcccacccacacatttagagttaaatggagtggccctggccctaagttggagatggcaaaatctcatgccctagtttagggtgtcagcagggaagaggcccccagaccctgtcggggatctgggggatcctgagatggcccgaggactcccaggaaaaaactgagatgctgcaagaggtcagcagacataggcacagaacagcatcctctgaaccaggaagggttcaaaggaaggaggaaaagccacacagcccaggaaggcagcatgaagagtaagccaggcttgatatgagtcggggaccctggtgccttcacaaccgcagaggcaagggaaggagcttggccaccctgactccgttcactgccatggccacagccacctgtggggagtcagagaggggtccagagagggacccagccaagccatgtgatgtccaggatacagactcctgcagggcagcaggggtgagactgcggacagaaggcacagctgctgtgagggtctcgaggtgggagctacagggaggccagtgggactgggctgagtgtggggagcagaaggagtgcgtgagtgagtgaactcacatgcaggtgcaggggcttgaaaagctcccttcccgtgtcccctgttacagtcacttcaggcggtagaccagccgagagtggagtcgggtgagcttagtggacagcacatctgtgggagccgtgggctgctgcacgtcctcccttctctgagcacagggacatgtgagccgccatcgcacacagctctgcatcatccttggtgtaaactcagcgggtttccctgggtcatggggcctccacgtcgctcttttccctgccctgccatgtacagccgcactgtaattgtttagctcacccccttttattggacgttctttcctattttgctgttacaatcacttgggcctgataggtttgtgtcctggaaagagctctggttttggggctcagctgggacatgcagggagaagatggaggctccaacagcatctggggaaacagaacagtcccactccgccggggagggtctggcggtaaccgtagctcacacctccctgtggcccgtcgtcccctcctcttgcctgccctgagcctgcagtgtcattgcccccatttcatacgtgaggaaactgaggacacagaacaagcatccaggccttgtgcagtcaggtggtctgacctgagcccagtgagggaacactgggaccgggcctgggaggccaggtaagagatggtggcctcttgccgtcctgaattggcacagagccagtgctcagtggttggactgactcggagtcacgggcaggaagaacttcctcatggtcaggttcctggccaagaactaggacagacatgtgcctcctgcagggctgggcacagcagggtcactgcacccctggatggatgcccatcaggtgcgctggcatcacctggctgattgtctttgtaggcttagtgaccctctgcccctcctgacacccagagacgggatcccttctcaggaactggagtcattttgcttatttctattaacatctcttatttctttcaaaattcaaagtcaaatttggagcggcctctaaacttcctgacctgacatgagcacatcagtcctgcaggccagcttctgagggacgttattttaatgtcactgaatcaagagagtctcgtgtcatgttttctttaacaagggacatagctctcctccttccagatcctccccggcgtgaaggtcatcatcgcacacaccgagaccaaaggacccttgggagactcacacctgggagaggtgagcaggggcccatgggaggggcttgagctctccagcctcaccagctt

SEQ ID NO: 27695 - DNA, 2300 bp, Homo sapien
ttaaaagaacttgcagaaacttaaggtacacaggtggaaaagacatttcatgcaaatggacaccaaaagttagcaggagtagctattcatataacagacaaaacaaactttaaagcaacagcagtttaaaaagacaaagagggacattatataatgataaaaggccttgcccaacaggaaaatatcacaatcctaaacatatatgcacctaacactggagctcccaaatttataaagcaattactaatagacctaagaaatgagatagacagcaacacaataatagtgggggacaggctgggcatggtggctcacgcctgtaatcccagcactttgggaggccggggaaggcagatcatgaggtcaggagatcgagaccatggtgaaaccccatctctactaaaaatacaaaaaaattaaccaggtgcagttgcgggcgcctgtagtcccagctactcgggaggctgaggcaggagaatggtgtgaacccgggaagcagagcttgcagtgagccaagattgcaccactgcactccagcctgggtgacagagtgagactccgtctcaaaaaaataatataataatagtgggggactttaataccccactgacagcactgaacaggtcatcaagacagaaagtctacaaagaaacagtggatttaaactataccctggaacaaatggacttaacagatatatacagaacatttcatccagcaaccaaaaaatatacattctattcagcacgtggaactttctccaagatagaccatatgacaggtcgcaaaatgagcctcaataaatttaagaaaattgaaattatatcaagcactctctcagaccacagtggaataaaaatggaaatcaattccaaaaggaaccttcaaaaccatgcaaatacatggaattaaataatttgctcctgaatgatcattgggtcaaaaatgaaatcaagatggaaatttaaaaaattcttcaactgaacgacgatagtgacacaacctatcaaaaccactgggacacagcaaagatggtgctaagaggaaagttcatagccctgaacacctacatcaaaaagtctgaaagagcacaaacagacaatctgaggtctcacctcaaggaactagagaaacaagaacaaaccaaacccaaacccagcagaagaaaggaaataactaagatcagagcagaactaaatgaaattgaaacaaacaaacaaaaacaatacaaaagataaatgaaacaaaaagctggttctttgaaaaggtaaataaaattgatagaccattagcaagattaaccaagagaagaagagagaaaatccaaataagctcaataagaaacaaaatgggagatattacaactgacaccacaggaatacaaaagattactcaaggctactatgaacacctttacacgcataaactagaaaacgtagaagagatggataaattcctggaaagatataaccctcctagctttaatcaggaagaattagatatcctgaatagaccaataacaagcagtgagattgaaatggtaatttaaaagttaccaagaaaaaaagtccaggaccaaatggattcacagcagaattctaccagatattcaaagaagaattggtatcaagcctattgaaactattccacaagataaagagataaccctccctaaatcattcaatgaagccagtatcaccctcataccaaaaccaggaaaggacataaccaaaaaagaaaactacagaccaatatccctgatgaacacagatgttaaaatccttaacaaaatactcactaactgaatccaacaacatatcaaaaagataatccaccatgatcaaatgggtttcatgccagggatgcagagacagtttaacatacacaagtcagtaaatgtgatacaccacataaacaattaaaaacaaaaatcacatgatcatctcaaaagatgcagaaaaagcattcaacaaaatccagcatcgctttatgattaaaactctcaggaaaattggcatacaagggacatctatgaaaaacccacagccaacataatactgaatggggaaaagttgaaagcatcccctctgagaactggaacaagacaaggatgcccactctcaccactcctcttcaacgtagtactggaagtcctagccagagcaatcagccaacagaaagaaagaaaggtcatccaaatcgataaagaggaagtcaaactgttgctttttgttgatgataggatcgtttacccagaaaactctaaagactcctccagaaggctcctagaactgataaaa

SEQ ID NO: 27696 - DNA, 2300 bp, Homo sapien
aatcagaggtctagtctagcaatccacatggtcatatgtaggctacagaccatggaacttttcaggtgttccactcactcaataatgcatttctcattacttagcgaagggtcttcctgtggaatgtagctgcagggggtgggtgaatgtgggagtcacacatgattggatctggtggctgtccagtctaatgggataagattaaaactgaggggtcaggacaggtaagccagggtgatcaggaagtgtgaaggtcagggaaaaacacccagaacaaccctgcaaagtagggactacggtcacccctttcacagaaaggcttaggaatttatccaaagtcaaaccactgttaaatggtggagccaagattcagacccagcaattgtaggaatctgtgggaagctggtgaggttgtatccacgagctcctggggagcctgggcaaagaataccatcctggggccccagagcgcttgaaagcccttttcctccctgtggcagatcctctctctcagcctgcttccaagacctgggaacagggtggacccacggccccacacttgccatcccaggaagctgcagtgtgcagagggcaggcccggctgggccctcctgctgaacgcagtgccctaagcacaggtgtacggtcattgcatgagtggatttcaaactatttttaacccctgcaggagcaggctagagcgttttctatggacactgaagggttaatccagagctcaggctgccactctggggaagtggtcagcacttacaggaatggtccctccaacatctgagcgaggaaggggcacagagcacagttgtgccttccttgggcctgggcaagctctgtgcttcacagagcaagcctgtgtcagatccttcagcagagaccacagccaggggtggtgaagccgatgaggaagtgagggccaaccacactgctcaggctgttcctcacaggaggctggggcaggctgagccacgcaagaccacagctctcagccctgtgctatttccagggcacacttacagatcctgaatggtagagaacgtcctggataaaacaatgacagcaagacagccatgtacacagatatcttgtgggaaaccctttcacggccactttgaaactgggttgggagaaggacgtgatgctgggtcaggcatccattggggaccatggacatttttggagagtttgggccaatgttcttgtgtaatttgtcagaaggaacacctacttcttcattcttgtgaagaagaacccataaactggcccccgtgttcagaggctccagtcgagcgagttgaggggacagctggacttctccttcctcaggctggctggaggcttcagcaagggggcacaccgtccacacgcctctgtaaaacagcgttcgaacgggacatctctaaggcatcgtccaactctgagagtctgtgaccttccaccctggggtggagggaaaggccttgggatacagtccacacatcacgttttcccctaaaagtaccacccgttttagtccctgcagacactggcctcagcagcttctctgaggcagccccgttgagcccagggctgaccacagacaagcactactgtccacagaacttcacgcccagtggggccagacttggaggatggcagaggagagaagctccaggggcctctccattagaaaccaacttgcaggccacttaatctcctatgctcagcctgtacttggaagctgcttgttcttggctgcacatttgctttgtttgaatcaattaatccaagtctctctcctctccccacccccaaccttgcctttagggtgacatcaatattcatgtaataaagaaatcgcacaaaaagctgactccccacttcctgccctacaggcccttttttcttcctcagcccatgtgcaatcctggctcccagcaagtccccggggctgcttggtcaatgcagccctgtgtgcaggcctggcagccctgccacccccgccttcggctcccattggctgccacggcctgcagtgggctgcaccagggttcatccatcctccctgggcagagggaataagaggctgcctctgcccaccagtcctgccgcccaggacccgcagcagagacgacgcctgcagcaaggagaccaggaaggggtgagacaaggaagaggtgagaaagagccaggccaagaggacgctcaggaagaaatggttcttttcttttgggtggaacggaatggaggggtagaaactaagtggtagcttaaaaagcccctttaggacaattggcagcatttca

SEQ ID NO: 27697 - DNA, 2300 bp, Homo sapien
acaacacacatatgttggatgttagcttttaattaagcttttaaccattgagctccttaaaaataaactttttcaatctcattactggctgggcatggtggctcatgcctgtaatcccaacactttgggaggccgaggtaggcggatcacttgaggccagtttgagaccagcctggccaacatggtgaaaccccatctctaccaaaaaaatacaaaaatgagctgggtgtggtggtgcaggcctataatgccagctactcaggaggctaaggcatgggaatcacttgaacctgggaggtggaggttgcagtgagctgagattgtgccactgcaccccagcctggaacacagagccagactctgtctaaataaataaataaatctcattatcatatttcagctaggactaattgctgctatttcagaagtaccaagtatcaaaccagaaagggcttaatttaggaactaaacccaggctgtggtggtggaaaaaaagaaggcagaacccttaggtatggaactgcagtgtggggtgacagacattactctttttggttggtctggctagcaaaaatgtggccttgttatgtaagaaaagccctttaagtagtcaaaataaattttttttttctttttccttttgctagctgtttttctccccccaccacatcaccttttgtgtgtgtgtgtgtggtggggaggggttgaaacttagccacttcagaggcctcacttctcataatttggaactttcctttggtttcgatcaagtcagatagagttcgtcaaactcaatgcgaaaaagacaaaagaacaaaaaacagaaacaacaacaaaaaaaccagttaagcgaaacgaaggattgggcaatttataaggttactgagcacactaatggtaaggagaaattaagaccagctggttgttaatcttaatagccaagacaaaccccaattcagttacttcctagggatgggtctgaggctgaagattgctctctaccaccctagaagcagaggaagaaaacccctcatctttcctgtgggaagcgagctcaaactccataaacgagttacctgccttccattgtcatggaagcaggaaaaaactactacttccttatgttggaagagagtaaagcacaccccgccccccaacccccgcccaacacacaaaaggagttgtacagcaaaataaactagatcttgactaaatctgggtagatcagggattctctggagggggtgcttccaggcctcagcaaattgtcctattggtttgagccataaagatagctcaagctggtactaaggactgacagatttgtcaaaggtcagtggcacctctactcagaatccctttgtggttaccaaaatgtgaaccttgaatatctgagtcagatctcagtcaacttaggaagtttattttgctgaatttaaggatgcacgcccatgacacggccgtcggaggccctgatgacatgtgcccaaggtggtcagagcacagtttggttttatacgttttagggagacatgagacatcaatcaatatatgtaagatgaacattggtttggtccggaagggcgggacaactcaaagcaaaggcaggagggagcttccaggtcataggtaaatatgagacaaatcattgcattcccttgagtttctggttagcctctccagaggtggcaatcagatacgcatttatctcagtgagctgagagatgactttgaacagaatgggaggcaggtttgccctaagcagttcccaacttgacttttccttttaagcttaatgattttgcggcccccaaatttattttccttccacatttttttttttaaatcagacttaaggtctgccttgatgttaatgctggaggagtgtaaaaaggcatgtccaactcttacttcccttcgaggccagaatagtctctcaggttgaacttcagggtcccctggtaaaggagggagtccagtcagacggctgcgggggagggggggcttcgaattttatgttttacaggcattagcgccacccatttctccttaaccccaaacttcctctccccacaacagaaacgtcatcattctgcttccacttatccagaagaaaggcagagggcgcacactgcgcagcgcggatgggaaagttaactgaattatttgcgggaagacagaggaggtggggggtcccccaagccccagccattttgtggctcgtaggggttgtcgcttcccaagccgtgaatggcccaaacccgccccccgccccaggtcggactcctgccccgcgcccc

SEQ ID NO: 27698 - DNA, 2300 bp, Homo sapien
cttaggtatggaactgcagtgtggggtgacagacattactctttttggttggtctggctagcaaaaatgtggccttgttatgtaagaaaagccctttaagtagtcaaaataaattttttttttctttttccttttgctagctgtttttctccccccaccacatcaccttttgtgtgtgtgtgtgtggtggggaggggttgaaacttagccacttcagaggcctcacttctcataatttggaactttcctttggtttcgatcaagtcagatagagttcgtcaaactcaatgcgaaaaagacaaaagaacaaaaaacagaaacaacaacaaaaaaaccagttaagcgaaacgaaggattgggcaatttataaggttactgagcacactaatggtaaggagaaattaagaccagctggttgttaatcttaatagccaagacaaaccccaattcagttacttcctagggatgggtctgaggctgaagattgctctctaccaccctagaagcagaggaagaaaacccctcatctttcctgtgggaagcgagctcaaactccataaacgagttacctgccttccattgtcatggaagcaggaaaaaactactacttccttatgttggaagagagtaaagcacaccccgccccccaacccccgcccaacacacaaaaggagttgtacagcaaaataaactagatcttgactaaatctgggtagatcagggattctctggagggggtgcttccaggcctcagcaaattgtcctattggtttgagccataaagatagctcaagctggtactaaggactgacagatttgtcaaaggtcagtggcacctctactcagaatccctttgtggttaccaaaatgtgaaccttgaatatctgagtcagatctcagtcaacttaggaagtttattttgctgaatttaaggatgcacgcccatgacacggccgtcggaggccctgatgacatgtgcccaaggtggtcagagcacagtttggttttatacgttttagggagacatgagacatcaatcaatatatgtaagatgaacattggtttggtccggaagggcgggacaactcaaagcaaaggcaggagggagcttccaggtcataggtaaatatgagacaaatcattgcattcccttgagtttctggttagcctctccagaggtggcaatcagatacgcatttatctcagtgagctgagagatgactttgaacagaatgggaggcaggtttgccctaagcagttcccaacttgacttttccttttaagcttaatgattttgcggcccccaaatttattttccttccacatttttttttttaaatcagacttaaggtctgccttgatgttaatgctggaggagtgtaaaaaggcatgtccaactcttacttcccttcgaggccagaatagtctctcaggttgaacttcagggtcccctggtaaaggagggagtccagtcagacggctgcgggggagggggggcttcgaattttatgttttacaggcattagcgccacccatttctccttaaccccaaacttcctctccccacaacagaaacgtcatcattctgcttccacttatccagaagaaaggcagagggcgcacactgcgcagcgcggatgggaaagttaactgaattatttgcgggaagacagaggaggtggggggtcccccaagccccagccattttgtggctcgtaggggttgtcgcttcccaagccgtgaatggcccaaacccgccccccgccccaggtcggactcctgccccgcgcccctctgggtcggaccccaagccgagccccccaaccccgcggctgggctgggcgattggggacgagctccacacatggagaacctggcctcgcctcgcaagaccgcgggacgcgcagatgtgaagtgcgcctgcgcggggcgcagccccagctgcagacgatctgtgagcgacgcgccggcgcaagtcgagggcggtggcttggcttccctggaatgggggacgtcttaggactgcgcctgcgcggggcgccgggccctgggcggggccttcccggctgacggcctgcgtgcactgcgcttgcgcgggttgagggcggtggctcaggctcctggaaaggaccgtccacccctccgcgctggcggtgtggacgcggaactcagcggagaaacgcgattgaggtaggtgtcctgatgggcagctcagatggctggactgcacgtaaggaaggacaggccaggtgaggcgtcctcgcactgcgtgtgcgtcgctggcggacagaggcctccgc

SEQ ID NO: 27699 - DNA, 2300 bp, Homo sapien
catcacataagcttgtctgtgcacagacttcttttattgcagcatcggttatggtggtagaaaactggataccaagacaaagtctatcaaagggggatggctgaagaatcaagcggaattcctgctatggaatatcgtatagccattgaaggtagtaaatcagggttctaacagttggagagtttttccagaaggtattgtgtaagaaaagcaaagtgcaggtcaggcgtggtggcccacgcctgtgatgccagcactttgggaagctcaggtgggcagatcacttgaagtggggagttcgagaccagcctggccaacatgatgaaaccccatccatttctaccaaaaatgcaaaaattagccgggcgtagtgacacacgcctgtagtcccagcctctcgggaggctgaggcatgcgaattgcttgaactggggaggtggaggttgcagtgagccgagattgtgccactgcactccagcctaggcgacagagcgagactccatcctaaaaaaaaagccaaacaaagaaacagcctgtgtgtgtgtgtgtgtgtgtgtgtgtgtatacgtgtacacagggctttgtgtgtgacatgggcatggtggaggtgtggaaggccgcacaccggggggttagtaagggttgcctgggctgggtggatcggggatggggtggagagcaagcagagggcagtgctgccttagagtgagtcatgctcctggcatagggaaaagcacgaagggtacaaatagacagtaaggtaaaaaaagatgccagcaagtattttaaaaacgcctaaccacacaaagagagggaaatggaagtaacaacagtgatttttacccatgaaattgacagagactaaagtgattggtatctattgagtgagagtgtgggaagattggtggttccctctcagcaagcggtccagggaacacctttctggagagcactgggtggtaaaaccaaaagccacatagtctcagtccatcaggttcacattcagagacttaccctaagaagattaaggtacatacagaatgatttatgttgaaagaagttcatcttaacatgatttagaatagtaaaaactgaaaagtctaaatgtacaagactaggaaactggataggtaagtcctgataattcatagactggatattaaatagtgttagaagtatatttaataagaaaaatgttcagagtttataaagtgaaaaccataggccacaggcttattgtgtgaacccagtgaatgctttgtacttatgttacgtgtccacttttttaaaagtctgaaagtataaacaccaatgtgctgtctgttattatctgtgatcagtgagcaaaattacaggaggttttaattttcttctgtgtacttggtgttttcacacattttctaaagtaaacacgaattacttttatgtttaggaaaatgtgtttaaaatgtatgtattgagacaaggttgattcattgaactggagtgtgtgatctgaggttctgccccctgcagtgatgtcttccaggcaagcttattcttatataaagtgaacggccaggcatggtggctcatgcctgtagtcctagcactttgggaggatgaggcaggtggattgcctgagctgaggatttcgaggccaacctgggcaacatggtgaaaccccatctctactaaaaatacaaaaaattagctgggtgtagtggtgcacacctgttgtcccagctacttgggaggctgaggcatcagaatcacttgaacctgggaggcggcagaggttgccctgagccgagatcatgccattgccctccagcctgggcaacagagcaagactctgtctcaaaaaaaaaaaaaaaaaaaaaatggaggggttgggggaggctccaaggacctgtgtgggtccaagctgggctctgctgcctcgtggaggtttgtgccatgccatcagctctttccacaggcccctggctgtgcctgcctggggcgctgggcccctggctctgtcctcacactggtttctcttcatggggttgatgatcaccttcaggaagcaaagctgatgaaggacaagggctcctcaccaaatagacactagtggtgcctgtttctgacttcttgctttgatgttctcttttagggtccagataatttttttttttagaaaagaaatgtagagtgaaggtgacagcctttgattatagtagtaaagatgatccaaatagtttgtataataaatacttggacacatgaatctgtatttgaaatttgaaaccatcctaataatatagccaaaaaaaaaa

SEQ ID NO: 27700 - DNA, 2300 bp, Homo sapien
tagagatgatttaaagtctgtcggaggatgtgtgtagcctgtatgtaaaaaccacgttattttatatgggggactttagcatccaaggatttgaatatccacgggggtcctggaacaagttccccatagacaccaagaaacaactgtattcctgaaacagtcttgagttatcattttctttcttctccctctatgtatgtacatagagtgtacatacatagagtgagaagcaaagaaggtccatgaaatggaccaattcttttgaaaactgcaaattaccacagttcatctaacatgaaatagataacctgaatggtccaataactagtaaagatattgaattaatagtttaaaaaccttctgaaaggtaaatctctaccctaaatgatttcactggtgaattctatcaacacatttaatgaagaaaaaactccagttctaaacaactttcagaaaagaagagggaacacttcctcactcattatatgaggtaagcattgccctaataccaaaaccaatgttaacacaaaatatgaaacctacagaccaataaccctcatgaacataaatgtaaaaatcctcaagaaaacattagcaaatttaaaccagcaggatataaaaggaataataatacaccataacaaaaaaagaaactatccttggaatgcaaggctggttcaatatttgaaaatcaatcagtgtaatctaccatattaacagtctgaagaagaaaaatcatgattatatcaatacagaaaaaaattgacaaaattcaacatcagttcatgataaaattctcagcaaactagaaagggaaggaaatttaacatgacataggacatctacaaaaaaacctacagaaaatcctaaggagtctatgagaaaatttcctaaaactagtaagtgagtttaacaagatcacagagtgcaaggtcatcatacagaagtcatttttatatcttagcaatgtacaattagaaattaaagaatatcacagtagcttcaaaaatatgaaaggcttagaaatctaacaaaatgtgatctggatgctgaaaatgatgagatgataatgaaagaaaccccagaaaacctaaataaatggagagataagaaggctcaacctagtaaagacgtatgttctttttaaattgatctgtagacttaataaaattccaattagaatccaagcaggatttgttcttatagataagctcattatgaaatgtatatggaatgtaaaggaactagtgctatggtttgtccccaccaaatctcatgttgaaatttgatcctcagtgtggtggtgttgggaggtggggcctagtgggaggtgtttgggtcatgggtgtggatccctcatgaatagatgaatgcccttcctcgtgggtagataagtgagttctagctctttcaggtcccaacaagagctggttgtgaaaaagagcctggcacgcccacttgcctctgctcccaccctgtggtctctgcacgtgccagctcccctttgctttccaccgtgaggggaaatagcctgaagccctcactggatgcccaatcctgaactttcccaaccagcagaaccatgagccaaataaacctcatttctttataaattacccagcctcagatattcctttttggcaacacaaaaatggactaagagaactagagtagctgatagaattttttaaaagaagggtaaagttggaggaactatactacttgattttgaagctacagtaatcaggacaatgtggtgaagggacagacacgtaagtcaatggaatggagacgagagatttctacaaatatggtcaatgggttttttttaacaaaggtacaaaaatcaatttaatggagaaaagacagtcttttcagcaaatgttactggaatagttgtcatccatatctaaaaaacaacacctcaacctcacatctcatacacagctgaacttaaaattgatcatagatctaagtgtgtgaaatgtaaaactataaacctccttgaaaaaatcatagaaaatcttcatcacctggacttgggcaaagactttttactctaaaagcgtgatccatagcagaaaatgttgataaattgaatttcatcaaaactaaaaatgactgctctgcaaaaggatgatgctaagagaataaaaaagacaagctaagattaggagaaaatattgcaaagaacatatccagtgtgtgttctgaatatacagagaaatctcaaaactcaacaggaagaaaacaagccaattgaaaatgggcaaaatacttgaacagacactttaccaaag

SEQ ID NO: 27701 - DNA, 2300 bp, Homo sapien
aaccatgagccaaataaacctcatttctttataaattacccagcctcagatattcctttttggcaacacaaaaatggactaagagaactagagtagctgatagaattttttaaaagaagggtaaagttggaggaactatactacttgattttgaagctacagtaatcaggacaatgtggtgaagggacagacacgtaagtcaatggaatggagacgagagatttctacaaatatggtcaatgggttttttttaacaaaggtacaaaaatcaatttaatggagaaaagacagtcttttcagcaaatgttactggaatagttgtcatccatatctaaaaaacaacacctcaacctcacatctcatacacagctgaacttaaaattgatcatagatctaagtgtgtgaaatgtaaaactataaacctccttgaaaaaatcatagaaaatcttcatcacctggacttgggcaaagactttttactctaaaagcgtgatccatagcagaaaatgttgataaattgaatttcatcaaaactaaaaatgactgctctgcaaaaggatgatgctaagagaataaaaaagacaagctaagattaggagaaaatattgcaaagaacatatccagtgtgtgttctgaatatacagagaaatctcaaaactcaacaggaagaaaacaagccaattgaaaatgggcaaaatacttgaacagacactttaccaaagtggatatacagatatcaaatacacacatgaaaagatgttcagcatagccatcagggaaatgcacattaaagccacagtgagatatcacttacacccattgaaaaatgactacaataaaaaaaaaatctgatagtaataccaactgtcatcgaggatgaggaacagctgaaagtcatgcattgctggagggaacatgccactgtggaaacaggtgggtgctttcttatagacttgtatgtgcactcaccttatgcccaggagtccctctcctgtgtgttcaacccagagatatgcaagctgtgttcacacaaaaacctgtatgtgaatgattatactagctctctttataattgcaaaaaaaaaaaaaacaaaacctggaaacaacccaagtgtccttcatctggataatccttaaggataaactggtgcgtccacacagtggaataccactgagcagtgaagaggagccagttattgaaacaggtaatttggaggaaccccagaaacggtacagtgagtgaaagaaacttgtcttgaaaggttatgtactgtttggttccatttgtatgatattctcaaaaagacacaagaccatggggatggagaccagatcggtggctggagaggctggggtcggggagggcatgaccaccagagaaaagggtgaagagtgttttgggtggcagagctgtgtgtatgctggctgtggttgtgaggacaaaatccacacaagcgctcaagttcgtaggctgtacgccagaaaagctgtttcactacataactgaaaaaataagattgaaaaataagatgtatatattttttgtgtgcgtgtgtagaaaaatacttgaaggtaaactgcagagtgataacagtggttccttctaggtactgggttaatatgtgatttttatgtttgtttgagcttttctaagttttctacattttccgtacaaaacatgtattacttctgtaataaaagcagcttgagattatttaaggaagcaaaacacttctgttgtttctcatcaactacaggatgaagtgcaggctccctgggtggtttgcaggggccacaggccttggccccacctcgctggtgctccctctactcctttctgtgtttgaagcaagttctggttcagacagaaagcctggcctttgagggcgttgggtccccacttcctcagtcatagatgtgatgtgcttcccttgacttgggaccttctgagggatgcaaggtggaccaaaggacccgtgaatggccagggcatgcctgcgtggctttcggtttcttaagcagtgatttcagtccacttaaagggtgtgaaaattctgagaatgctacggaccaaatatattttatgtaacagttgggacccggcaacacttcagggctctttcaaaatctggtagctacgagctcttccgtgactgagatgggacaagagtgaagatttgtccttgcttttagctctgctccagttcatagttctaatgggaaattatgtgacttaaacccaggctgtgagatgcatcagtgacgtgtgggcataaaataaaccctcgagatgttctctt

SEQ ID NO: 27702 - DNA, 2300 bp, Homo sapien
atgacttttccctgagaaagagtatctgtttaacctgcatgatctcactctttagtatttgcttctttagtctacgtttgtttcctagttttgaatataatcatgatatggagagacaagtgaaatcaccacaattttgttttccaaaatgtgagactatgcaaatgctgaaatgagaattaatacatccaaaatatcgaaccacaattatggctttgctttactttttgcccgtaagagacatgtggcctaaaataggtggcaggtattcctaccacaaccttgcttagcatagtggttgactaaatataaattttagagatgaaggttgttctatacccagatttcaatgtgattgctatgcccacttcactttctctaaaatacatatttttcttacttctcactttctttttcttcttggttgacattttttggctcagggatttttttttccttatgatctcaataaatttttctcatataaaaagacataatcgtgctgggagcggtggctcatgcttgtaatcccagcactttgggaggctgaggctggtggatcacctgaggtcagcagttaaagatgagcccggccaaaatggtgaaacctcatctctactaaaaatacaaaaatttgccaggtgtggtggcaggcacttgtaatcccagccactcgggaggctgaggcaggagaatcgcttgaacccaggaggcagaggttgcagtgagccaagatcatgccattggactctagcagggtgacaagagcaaaactccatctcaggaaaaaaaaaatcataaattttcccatattaaaaaaataacacaagatccggaatacagagaggagcataatgctttgcaggtcatagatgtaatctttcttccacgaaaaatgtatttcagatgagaccagaattggaaacatattctgtgccgtcagatagcactggcttaggagatgaatgaggagaagcctgcaggctacctcaaggataagaagcaggcaaaaggcaagcacaggggtggcatgcactcacactggggctgctccttcctgggcaagtttcagaaactcactgacagttagagctagcagctcccgtagagatgaatgcccatgttttcctgaagggagaactgatgcttagaaaggctgaatgacttgtctaagactctgggaccagaacagggatcttattccagtatttcttgcatgaagccattctacttccacgtttctaatttataacttttaaaaggtcattttaaaaacgaaatagcatgaacatcaagtctggaggctagtggtgggattattcacatttatttttccacttgacatttgagggcgatagtgatgcttaagtaaaaccaaaattatcctgggagtatagaaaataatatatctgtttacattttggtgtgggatgagtagaatcttgttttcaaattccttgcttgaaaggctattaagaagaataaatcctcacttaacagttttctaaatccttggtagtgtcctctgtcctttggtaacacatgaaagtagagcacacttttctacttttgttccttctgcacccctcataaggtgaagcatgcatagagcactcccagggtcagtgtgagcccagcagcagctcaggctgccgatgctccagagtcggattccaccttccacttaaatggcagccacaggtagacgtgcccatcacaaccaactctgtgcgttcataatttctgtttattctacaggtggtttccacaagaaaaatggcacaatgtttctcagaagacaattacataagaatcagcatacttcaaattcacagcaaataatcagacaattgatgaaaatacttacccaaacactaattgtagactatgccttctgaatatgtttgtcataaacttggagtaaggaatcctcacaggcactggacaattcaaaaaacgtaaagttgtttgttagaatactggtgcttttggatagaaaccctcatccatatcctggtaaggcttgaagttgcacaggagttttcatttgtcaaaacccagaaaaccataagctttagatttgtgaattttatattgtattatatgtgacctttctttttaaaaaatgagctgtaagcagtctcccagacagtagctcagcctccagaactctctttctgcatagttgaagacccctcttcacacaagatggtagcaacaaatcataggtgcaattgcaccaaattcacagaagatcaattgaaaatcctcatcaataccttcactcaaaaaccttaccc

SEQ ID NO: 27703 - DNA, 2300 bp, Homo sapien
cccttgaggggagtgaaagcattttcatttggcctcatgcccagctgaagccagctctttcacttctggagctgggctggttgtgataacctggaggagggggaatgagttgggatgactcacttgccccagcccatcaaccctggcctaggcttgtggccagacacctggttaaccaccccaagagagcttcctttctcagggaaataatgattattgattattgatcctctatatccacttcccaggacactgtcaggcacaccacaggcccttgggcatttttgtggcatcatcagccttattcctggatcaccatgtcaagctttcccaatagcagttggtggcaaactccaactcctactgtcagaaggcatcacaaggcccagatatgctgggcctcccagctcaggcaagcccagctgtcagggacacagaaacccctgacactgagccaagatcttttccccctgtcttggcttgaaattcagatatattgatgttgagccctcctggcccgcagtgggaccccccttagccttacagaggtaatgcctatatcatggcctaggtttttccaaaaagccagactctgggaagaacctggagtggaggaaaaaaccaggcagaggtaaccccatgaggggctctggcatgtgactccctgctggaaacgtgcccctaacagggcatcaaagccaggcaggcaggggctcctgctctgccagaggctggaaatcaggactgcagcttcccatcttactctggggatgcaggtcaactattttccctcagatgagagatgctgaagttccaattttataagatgagaagaagggctgaggtgatgcccattctgccactttgctgagtccagagctgtgatgaagagggagaagtcacaggacaaagaagggggctcagggaccccggagttttccttggcagaagtcaacttgccccgcccctgagaaaactctgacctcagctgccagggaggaaagcagggactggggaggaggggacaaggagagggaatagtctggtgctctgtgctctgggagagaagtctgatggcggcagtgactcaggaagggttaagaatattcctaaaatagccaagccacagcctaagccagttcatgaatgcctcttccagagagcagatcagtagcaggaaaattcagcctgatcttcgccccactgcctgccgcctgcccctggctactagttaagcctcccaccctgtccccttcaccaactcctgtcctagtggggatggggtaggagtagtcagaggggccaaatctcccccagtcaacagggaactccagctgggaccaggagtactgggccccagtgcccgccaccaccccccacccccatccacattcctggtctgagtcaggtaggaggacttgggacagacaggcaaagtgcaggccttgtacatgggatggaaggtgccagaagagagcagccaaattctcccacccacacacatgcatcaccagccatgatcaggtgggacctccaagatcatcctcaaatactgccttctcctagctctgtgttcccctttacttagggcatcttggagtgagatgggcagggaggggtcgagtgagtcccttcatgaacaaaccttatctttgtttcagggacaggactgggtacataatttgcaggacccggtgctaactgaaaatgtggagtctgttcaaaaattgttaagaatttgaaggcagtgacaacatagcactaaaccaagttcaggtcccctctgacagtggggcttttgccactgcacaggtggcacctctatgaagccagccttgtgcaggggtttggtttaatgaacatttacttagcgcccactgctcagctcttctggctctgtaatatggtgtggctctgtgtctgcacccaaatgtcattttgaactgtaatccccacgtgttgggggaggggccttgtgagagggcattacatcatgggagtggttcccacatgctgttctcgtgatactgagtgagttcccacgagatctgatggttttataaggggactttcccctcttctgcacttctctctcctgctgccacgtgaaggatgtgtttgcttccccttccaccatgattgtaagtttcctgaggcctccccagccatgtggaactgtgaattaaacttctttcctggagtgtgaaaatgaactaataaactctgtgacctcagagactccctctctgtgaccctgttctcaaatgtatgaagatgggtgctcaaagatctctctctaa

SEQ ID NO: 27704 - DNA, 2300 bp, Homo sapien
tctgagcaagaaggtgggaagtgagcaagaaggtgaagaagtgatacattcccacagaacattacaagtttagcggaagctattattgaatgtaaagagaagaatgccccagaattctatgtggattgtcgggacaatactcatttctgtaatcaggcctactttcttttaaaaagtttatcatatcaaacctcacaaggacaaccagaactctgcgatatccactctacaaacctcagacccctacagtgtagtaaaggtggcagccaagatagaaagacagaaacacactgtttgatgaccagtctttggaagttgagacagcaaatgtggatttactcagattattttcctgtcagcacctccaggtgttattttgatggtactttgcattgggctgatgacacaatggggaaacataaactgctgacgctggacttcagcagtacagtaacagccatgtgcaaggccattgaaaaagtaaagactggtggttacattgccacgtgtttttctgcatggcatcatcatcttaactatggactttatgtgctttcacagcaagatgtttctagtatttagaaatggaccttatgcattgtatacttcctaagagcttggaaagctctcacccaggtactaccaaatgccagacatctctctatgtgggccattttctgccacagccagaattcattctgggtgacatgctgttcttggctgctaaggaagtgatgtgggggagccaggtgtctctcgctgtctgtgagtctatgggaaaaaggagaatactgaaaggcactaagtttactgccacgtttagaggagctttgtcaaggcaacacaagagtgttgtagtcctttgtggccaacaccaacctgagtttttacagcagttgttgcataatgatcacagtcacattcaagttcactttctaaatcttaggttctacaaaaactctgtctgataatgtcctatagacctttcggtagctaaaatcaatgagtttgaaaaataatttgaatttggcttgctcaccttttcagcagaatgcacttgtgagtcctgctctgtcattgtattttacatgtgtggctgtccctcttgctgtgttggaagtcagtgttccagaatgttaacttctacaaatacctatgtatagagcaaagagaaaactcttcaagtcaaaagagtgtatattatttcagggcagctctctagccttggatttgaaactatagtatttgttacacagagagaagatggttcttttttgtattttatttttaatgtttgtgggtacatagtatttatggagtacatgagatgttttgacaagggcattcaatgtgaaaaaaaacacatcctagagaatggggtatcccctcagtgattctttgagttacaaatattccaattacactctttatgttattttcaaatatatgattaagttattattgactatagtcacctgggtttgctatcaaatagtaggtttttattatatattatttcttttttgttttttgtatccattaacaattcctgcctccccctcactctctcactacccttcccaagctctggtaatcatccttctactctctatgtccatgagtttaattgtttttatttttagatcccggaaataagcgagaacacatgatgtttgtatttctgtgcctggcttatttttcttgacataatcatcttcagttccatccatgttgttgcaaatgacaggctttcatttttatggctgaatagtactccactgtgtatatgtaccacattttcttcattcatctgttgatggacacttaggttgctttcaaatattagtaattgtaaacagtgctgcagcaaacctaggagtgcagaaatctctttgatatactcatttcctttcttttgggtatataccaagcagtgggatttttggatcatatggtagtatatctgttttttttcaggaaactccaaactgttcaaggagatagttctgttgtgattacttcattgagaaatttaacttatgagcagttgaaaggaatgcaagttgctgcaaaatcagaatgaagagtgcaaaacgaccaagctacaatgttttgtcattattcactctgatgtgaaaaaggcagtgaatttaatagaaaataacttcgtagagcaaaatctcaggtgtgtttttttagtgccgcagtcttggatgatgggttcctagaagctctcaacatctcttcttaattggagaaagtgttaagccccaaagtagctggagcagtacatcttcaat

SEQ ID NO: 27705 - DNA, 2300 bp, Homo sapien
ggactcagtggtgagcaagactcaggaccccttaggggcgagggcctgggttacaccaccagggggtcacctggaccctcagcagaaggtgaaggggtgatcattacctttgcgaccctgaaatgggtggcagccacaggacacagggttcattgaacccaccttgtgtaactattgcccaggaaaaggcccagaatttaataaagacaaggcccctggcagtgcagtgttggatggggtgcaccccctggggaacccctgaccctcccccagggccttggctctgagctttgattatagacacacgtatgccatggccccttcagactgctcccttcacctttgaaaaaccagacaggatgcttctgttcctggaaacatgaatgcccttcatgtgtttttttctttgactagaaactcaacttcaaccaaaatatgactcccacacaataataatgggagtctttaacatcccactgtgaacattaggcagatcaatgagtcagaaagttaacaaggatatccaggaattgaactcagctctgcaccaagcagacctaatagacatctacagaactctccaccaaaatcaacagaatatacatttttttcagcaccacaccacacctattccaaaactgaccacatagttggaagtaaagcactcctcagcaaatggaaaagaacagaaattataacaaactgtctctcagaccacagtgcaatcaaattagaactcaggattaagaaactcactcaaaaccgctcaactacatggaaaccgaacaacctgctcctcaatgactactgggtacataacgaaacgaagacagaaataaagatgttctttgaaaccaatgagaacaaagacacaacataccagaatctctgggacacatttaaagcagtgtgtagagggaaatttatagcactagatgcccacaagagaaagcaggaaagatctaaaattgacaccataacatcacaattaaaagaactagagaagcaagagcaaacacattgaaaagctagcagaaggcaagaaataagtaagatcagagcagaactgaaggaaatagagacacaaaaaacccttcaaaaaaatcaatgaatccaggagctggttttttgaaaaggtcaacaatattgatagaccgctagcaagactaataaagaagaaaagagagaagaatcaaatagatgcaataaaaatagataaaggggatatcaccaccgatcccacagaaataccagctatcatcagagaatactataagcacctctacgcaaataaactagaaaatctggaagaaatggataaattccttgacacatacaccctcccaagactaaaccaggaagaagctgaatctctgaagagaccgataacaggctctgaaattgaggcaataattaatagcctctccctgggaatgggcggcctgggtccagtccacagggcccctcgcgggccctgacgcaggatggagttgaggtgggggcagcgctggaccccagggcccctgcctgcctcctggggagcccggtgacccaggcagccctggtgaggctgtgggtgtctgggccatagcgaggcccccgggctcccacaggacagatgcggacagtgaggccggggaggccctgctgccctccggactgtccctccagcccccagctttctgtggttctctggaccccctctgcagaggggcaggggagcacaccctggatcctgagacgccaagcttgaggaaccccagagctctagcgaggctgcttcctttgcggatggtgaaactgaggtccagaggagggcaggggcaggtcccgggtgctccctaggcaaagggagccgatctcggggagggggtcacagggagcgtccctgcgacttctagggcccgaaagctggggaggatgagagaccaggggtctttcgtcgccccctggggctgggcagaggctcagcctgtgttgccacccaaagctgcttctggcaagtccgagccgcgtccctttaagagggggtggagcttcaacctggcacgagggatgctgccagcgtgcgtgtccctacggaagctgagactgcacttcctgcgaggcccctgcagcagcagcggcgtggtcagagcgagcttcggagaagcagtggtgggttccatgtgatggtggagtaggaggcaggtctccgcggtaagtggcgggggcgtggaccccaccgggaaccctcccggctccttccctgcctctccctgttttcgtgctttcacttcttcgtgggcatctgggcccga

SEQ ID NO: 27706 - DNA, 2300 bp, Homo sapien
caggggtcatcttgttagtcatcttgtcattttgctgtgtcccatcttcgtccttgcaatttttcctttttcccattttggcatgtattgagaggagtgttatgctgatgaaatgccctgtcctcaattgctatctgattagaacttccctcaatttttaaaatgcttcttgacatggtttggatttgtgcaccccccacccccaatctcatatggaattgtaattgtcagtgttggaggaggggcttgctggaaggtgactggatcatagaggtggtttctaatggtttagcctcatccacctcgtgctgtctgatgataaagttctcctgagatctgcttgtttaaaaagtgtgtagcacctcccctgactcttttcagccatgtgaatatgtgcttgcctccttttcaccttctgccatgattgtaagtttcctgaggcctccctataagcataagtctgtacagcccacagaactgtgagccaattcaatcccttttctttttcaattacccactctcatgtatatctttatagcagtgtgagaacagattaatacactcctcctcagaaagcattcaatttagctgtgtctaaagtatgccaggtgttctagggtgttatcttagccaataattcttcctcttcagcaagatctatttgcctatgacagcttgacctacatttcctaccatacttgtcagtaacaagtagcccataacatctgaatggacttcattgaaatcacagaggttctttagttctctactttattagcaggcattcgggaaacacatcaactttctaatttaataaggtgcctgttgctttgaaaaactgctcaaaagaagataggagaggcttacttaaagatatcactataggcatggcatgctggttcacacctgtaatcctagcactttgggaggctgaggagagaggatcacttgagtccagaaggtcaataccagcctaggtgacatggcaaagccccatctctacaaaagaaaacaaaatccaaaaaatatttaggcatggtggcatgtgttgcattcccagttactcaggagactgaggtgggagaatcactgagcccagggaggttgaggctgcagtgagccatgatcatgctgctgcattccaatctggggacagagcaagagcctgtctcaaaaaaaaatgttatcactgtactatctataactattcttaattagaataactaggtttttttcaacagtggaaactcaaaacagacaaaattgttgtacctcagggtgtgttgtcgtagtcatataattcctttgcttgtaactgcccaataaatggatgaggactcacttcacccataaataagaaaggtgaacagcacatggggcctgtagatgccttttgcagggccctctttttctcttcctaaagttgcaatttgagtatttctctagatgggcacatcatagaaactgtcgtcctagatcagagcctggggagagagatacaggtgtcatgcttacatctgcagagtgggaacaagcccagaaaaatcaagatgattaagcagagagcttccatactggagataaaccagctgtgtaaaaaatcattgcaccaaaaaagcgttgcaccatcgaaataactgctttaactaagaagtaaaggaactgatgccccagcagagcacagagagccacagagacaggagctgcatttcaaacaaggtcattgctgttgtccccaccctgagttaagtatctctgcttcacccttcaagttctgcttgatcatccttttgttttgttttcttttttctgcacttcacttctttgagaaaatataaaccaaaaccttacataaaacaggaattgagcttttgacaatgttagctcttgaaacaaccgaacaaaaaggtttctattatttctcatctctgtgctacccagtacagtagccaatagccacagatgactattaaaattaaaattaattcaaataaaacaaaatttacaatttagttggtcagttgtactagccacatttcagttactcaatagccacatgtggctagtggctactgaactggccagcacaaatgtagaacattttcatcatcatagttctctaggccatggaaaaattactgaactcaatttccagtgtgcacatttatttgtgtacctaggagctttttgaccctgtgttgagatgcctaaacagcttcctgattgacctcctgatatttctgcaaatgtggactaagaggccaggattcctcaaggcccaggtgactcaggttattcca

SEQ ID NO: 27707 - DNA, 2300 bp, Homo sapien
gcttggccttggccagcatgcccaagcttcagtgcaacaactgtgctacaaatggagccatatagaaacgagcagcaggctcaggagcagggtgtgcactgcctttggggctccagtccatgcctcgggtcgtacggtactgcaggcttcttggttgccaagaggcagaccacaggccttcttgaggaggactttacattcaagtgcagaaagcagccaaaattaccatccatgggactgagccttctgtggccctggcgagacttaaaatttgtgccaaggcaggacaagctcactcggagcagcgtgtcagtagctggggcctgtgcatgccaggcaaggccaagctggctcaaagagcaaccagccacctctgcaagggtgcgcctagtgcaggcggagcatccaccacctcacccgctcgaggaagtggggatggccaggttcccacagcctgagtgtctgccaccttattgctgatggagcagaggccttaagaaaagcagatggcactgtggccctacctttagggtaggacgctaattggtgactggtacaccggctcctgctacacctttgcagaggtggctggttgctctttgagccagcttgtccttgcccggcatgcacaagtttcagtgcaacaactttgccacaaatggagccatatagaggaaacaagaagcaggttcaggagaagggtgtaccctgcctttggggctccagtccatgcctcaggtgtcacatggcactgcgggcttcttggttgccaagaggcagaccacaggccatcttggggaggactttatattcaagtgcagaaagcagccaggattaccatccagggggaccttctatagccctggccagaccttgcagaggtgtctggttgctctttgagccagcttggcctccctggcatgcacaggccccaggtgctaacacactgctccgagtgtgcttgtcctgccttggctgccacctaattcctgatggagcagaggccttaggaaaagcagatggcactgtggcccacctttagggtagaagtgatgtaccatgtctggccattagttggtgactggtgcacctgctcctggcacacccttgcagaggtggctggttgctctttgagcccgcttggccttatccagcatgcacaagcttcagtgcaacaactgtgctacaaatggagccacagagaggaaacaagcagcaggctcaggaaccaggggtgcgctgcctttggggctccagtccatgcctcaggggtcgtatggcactgcaggcttcttggttgccaagaggcagaccacaggccgtcttgatgaggactttacgttcaagtacagaaagcagccaggattaccatccaggggactcggccttctgtggccctggccagacatagaatttgtgccaaggcaggacaagctcactcggagcagcgtgtcagtcactggggcctatgcatgccaggcaaggccgagctggctcaaagagcaaccagccacctctgcaagggtgcgcctagagcaggcagagcatccagcacctcagccacacaaggaagtggggatggccagcttcccacggcttgattggctgccacctaattgctgatggaacagaggccttaggaaaagcagatggcactgtggccctacctttagggtagaagaagtgatgtacatgtccggctgctagttggtagctcgtgcccttgctcctggcacacccttgcagaggtgactggttgctttttgagccagcttggccttggccggcatgcccaagcttcagtgcaacaactgtgctacaaatggagccatagagaaacgagcagcaggctcaggagcagggtgtgcactgcctttggggctccagtccatgcctcaggcatcatatgtcactgtgggcttcttggttgccacgaggtagatcacaggtcctcttgaggaggactttacgttcaggtgtagaaagcagccaggattgccacccagggcactcggccttctgtggccctggccagacttagaatttgtgccaaggcaggacaaactcactgggagcagcgtgttattacctgaggcgtgtgcatgccagggaagcccaagctggctcaaagagccaccagccacctgtgcaagggtgggcctggaccagttggaccagccaccaagctcacctactcaaggaagcagggatggccaggttgcaacagcctgagtggctgccacctgatagctgatggagcagaggcctgaggaaaatcagatggcacatttagctcttta

SEQ ID NO: 27708 - DNA, 2300 bp, Homo sapien
attatattattaagcaatagaattatgaacaatgtaacactgatggtccctgagctggattcatggttaaagagtaatcatggccagtgattgaaaatctgcagttttatattgtcagtcactgatactaaggttaaagatatattctgccttgtggtctctcattgacctcagtgtttctgtttagggagggaaccaggtcaaaaaagcaacccaactgcctattaaaggaatcatatcttgcagaatgggacctttggtgttagtgcacaaacacaataacattctaatttatttcagttgcagaaaatcaggacagattaaaatttttatctactgtcattagtacatattagaatatattagaactggacttaagcagataatctagatacataacactatcatattacagtatataatttcaattaaaatgtaagaatttgcatctctttctgtttggtgttgatttcggctcctaataatttaaagtgtgcctacaatccagttaggaatcttttgaaaaagcacttcagtgcactgtaggggctcactagttagggtttcatgaggtaaactcttttcaagtgaggaaggttttgcaacactacaaatgatctgctgattcatttttggtagatttaacacataacaaattaagtttagtctgaacaaatagtgaccaagttaagtttgctggttcatgtttttcttctccctttggctaaggtgaattatttttcacatgttagaagccagtgatgtggcggtagctaaacatagattaaaaagttaatcttaattttaattattatttattttttaagtttaattttaattattttctaatttttattgtccatacttgattacttaagaataaaattattttaaaaacatgtgctccaaaagaggagacatcacagaaatacaacaagcaaattaaccttctgtttttgcatctgcaggaaatgtctcaagaaccagaaataaataagggtggtgatagaaaggtatacttttatattcaaatgtttgcgttgaattagatttttacattatgttgtttaacaaagtgtagtaagtgtaggcatacgtgatcctatcatgtaagtagcataaatcatcagtgaaaaatttaatacttaactcagaattctatacattgaattttaaagagatgcaaaccctagagatattctttcattattatggaatagtcccaaatggtgccgtaaaatgctaagtaatgccactttaggagctttggatcaataattttatctttcttggttttagtctgattatcaatagaaaatgtggctaaagtagataattttttattctgtgtattttccagctagaaaattttatggctatcgaatgtgaaatttggggagcaactcattttctggaattccatgattgtacctcagcagtttcactctgctccttatgttgtgggaaactttggttcccatgtttcagtgagcaccttcgtgtttttgatatcctaggaacctaatgaaaaaagaatgctcaaaggcagtgggggagaagaatatcttagtgcagaaaagggccatcttccattctattcctgaagccccatggtgtctcatcctctaaaatgactgtttaatgtaaaatctaggtggtaaagagggatgaagacacattttgcatctttgtctttttatttatgtgttcccaccagtcaaatgggggtaaatacatatataagattctgaagagtgattgagaataaaagcacaaaataaaggagggccctttttgaattttggaaaattctgttttactcattgaaacagaaatgaagcaaactttacaaaaatttctgtgatatattagtgatatgataagtacatcttaaaattatatggtaatagttctgtgtatatgatccaatttaagagtgaaatgtttttaatgactaaaataatgataaactggtcaagtgataaaatcaattaaaaatattctttctattcagtaaagggataactatccttaatatcaaactttcattcaaggttgaagaagaaatgaagaagcacggaagtactcatatgggattcccagaaaacctgactaacggtgccactgctgacaatggtgatgatggattaattccaccaaggaaaagcagaacacctgaaagccagcaatttcctgacactgagaatgaacagtatcacaggtaagtctgtggcaacattgaacaggagataactctatgctgtgaatctaattcatgatgaacaaattttatactttta

SEQ ID NO: 27709 - DNA, 2300 bp, Homo sapien
tgtattcccactgccactgggaacatgaacatttacaaaatggcttttatgaaaaaaaaaactgccaacaattaatgttatttcttacgggaaaaaaattaagctaaacaaatgaaaaaagcataacaccaaaaaaaaaaaaaaaaaaaaaaggccaacatattaaaacgagtaattgagattcctaactttatttatttcactatggacaggtgaaaaccttgtaatacattgatgctactccaaggatgtatgacaaggaaaccatagctgactactgcaaaagcttcctttgtctcctggtttctttacatagtaaagaaccttccatcaatcccagcaaactataggctacagactaaatccaatctgcattatggcattgtgagtaaagttttataggagctcagtcatgcctgtttgcttacatataattctggtggctttcacactacaacagcagacaacagcagggttaagaagacatgacagagaccacatagtctaaaatatttcccacctagtcctttacagaaaaagctttctaacccattttacaccataaccagaagccttaatactcaaatttaatcttgtgactcccctgctcaaatttctccaatgagcccctgcagcacacattgttggctccctatcaatagccattccttattctttcttgcagaagaaacacaagtctattgggatatttattatcccaatccccctcctcagcctcagaaagagaaatgtttattctaagctaatcatgtattttccttcccagtgcctggtttgggaatgagcaggtactctgacctagccaatgaaatattacaggaagcccttgcatgcttctaagttttctcccagttacgtgaataaaacactgccaacagcacagctgaaagagggacaagtgggatcctaggatatcaatgaacaaacaaaacaactctggttcctactgttttagccaccgctcatctagtatttgcagtccaaagcattctacctggtaaacttcccatggcccatggggtaaaacctactcatttctgtagtattaaaatgtctatcatgaacttgccttagctaagtattcacctcattcccaacctctcgtatctcacacttttggtattagcaaaagtgaattgctcagaatccctgcaaagttcactcaagcatcttgtcttttgcacttgctgctctttctgccaaacaggcaatctcattagatgttccttctggcaaacacacaacctcgttgcatgttccttctgccaaacattattcttctgcttctttacctagaaaaattcttctctctctgcatgcttaccttaaatcatacctacttttttccaaaattttcattcctcatcacatatgtctggcacataatcaatatataataaatcataattataagcttccagtgggcatctagcacacagtaagcactgaataaagtagtcaaataatgaaaatgacaatgataataacaagctcctgtctctacttttaattgtttgtgctctgtagcattagaaaaaatggctagtatctaaaagacatttgatagttatctgttaagtggacaagtgaaaatggaaatgttttctttgtaaattctgttgaaaaagcacagaaatgaaatggagacagctctattatgagcaccttaaagatgaaaactacatctattccatttttgtctcctgcaacttataaaacctaacttacagaagctctttgataaatagatggctaaattaaaggtgtcctcatacagtttggactatacagtgtattaggtgtctacaatcaggtagcatactagcatttttgtgagtgtgaaacatttttctacttttatgataatctgctgagcctagagttgggcaatttgcatatttattatgacactcttttggcaaatggtagcagagcatcttgttctaacaaaattactgttatcatgacaattaaccagcaggtagaagaacacatcttgttccaaaaaagtcaatatatctctttccaacttcaaatgaggaggaatgaagtcagtaatagtgagaccttattgggacaagcatatgtaacatgacctgtgcttcagtgttcttttgtgatcaaaaattccttacttttagttttttatctatggtagaaccacccagagcaggggtcctcaactcccaggccacagactcataccagtccacggactattatgaaccacaccacacaggaggaggtgagcactaggcaagccaaggaagcttcacctg

SEQ ID NO: 27710 - DNA, 2300 bp, Homo sapien
ttgcactccagcctaggcaacaaaagcaaaactctgtctcaaaacaaatacatatatggaagcaaactaagtgtctatagatggatgaatggatgaataaaatgtggtatatatatgcagtggaatgctattcaaccttcaaaagaaggaaatcctgccgtttatgacaatgtggatgaacctggaggacatatgctaagtgaaataaatcagacacagaaagacaaatatcatgtgatctcacttctctgtggaacctgaaaaagtagaattcacagaaacagagtggaagggtggttaccagagggcagggagcgggggaaatgggaagttgttcgtctaagggtagaaactttcagctgtaagttctagagatctaaggtagagcatatgactatagttaataaaaatacatcgtatacatcccagcactttgggaggccgaggtgggcagatcacaaggtcaggagatccagaccatcctggctaacacagtaaaactccgtctctactaaaaatactatatatatatatatatatatatatatatatatatatatctgggcatggtggcgggcgtctgtagtcccagctactcgggaggctgaggcaggagaatggcgtgaacccgggggtggagcttgcagtgagccaagatcgcactgctgcactccagcctgggcaacagaacgagactccttctcaaaaaaaaaaaaaaaaaaaaaaaaagggccaggtgcggtggctcatggtctaaaaagccatcagggataaaggtttctctgagtgctgctaaaagaaaccaagactggggcccagtgtggtggctcatgcctgtaatcccagcactttgggaggccaaggcaggctgatcacttgatgtcaggagttcaagaccagcctggccaacatggcgaaaccgccctgcccctgtgtctactaaaaaatgcaaaaattagccaggcatggtggtgcacacctataatcccagcacactaggaggccgagggaggtggatcgcttgagcccaggagttcgagaccagcctggccaacatggtgaaaccctgtctctactaaaaataccaaaattagtcaggtgtggtggcacgtgcctgtagtcccagctactggggaggctgagtcagaagaatcacttgaacccaggaggcggaggttgcagtgagctgagattgcgccactgcattctagcatgggtgacagaatgagaccctgtctcaaaaaaaaaaaaaaaagaaaatatacaatgcctggatttcctttaaaataatccagggaggggagaaagggtggagactatagatgagataaaactgcccatgaactgatacttgttgaagcagggttaatagtacattatatcattctttcatatactattattttgtattttttgtatccaatagttttcataatcaaaagttaagttttcataatcaaaagttaattctaaaatctgaaagaatatgcacaaaaatgtaggaagtcaatgtgaaattacactaacacatgaatactttcctccttttcttcttcttctttttttttttaaacggagtcttgctttatcacccaggctggaatgtggtggcttgatctcggctcactgcaagctccgcctcccaggttcaagtgattctcctgcctcagcctcccaagtagctgagactacaggcttgtgccaccaggcccagctaattttttgtatttttagtagagacagtgtttcaccgtgttagccaggctgatcttgatctcttgacctcgtgatctgcccgcctcggcctcccaaactcattttcttctttttctgtagcaatgagcatgcataatcagaaagaaaaataatgtttaaaagtgggtttaaagtctctgtacaagttgtggctaaaaggggcaccaaaagtagccacttgtgggcaggatgctccctcctccctccgggagaaacacaggtgctgctttgtgcctttagctcctggatcctggggctgagctgggagggactaaaggagagggggatgggagggtgtgtactggggcctgtattctacgctgggcagagtcccagccactcctcatgcagcttgtgaggaagcctttggtggtcatctttaacaggtgagtaaactgaggctcagagagatcagtggagtcatctgagagaatgtgcgttgatgcatgttccctgctgggcacttcctctctcatctaatccctgaggccagccctgtggggtgggtatcattctccccaatttatagaggaagaaacagcacc

SEQ ID NO: 27711 - DNA, 2300 bp, Homo sapien
ggacttcatgaggaaatgttgaacctaaagaagcttctctcaccaaataatgaaaaacgtgcgatttccaatggccccaaaaaccagtcaatgaagaagagcaagaaaaacaaggtgaaggaagcgaggatgaatgggaacaagtgggcccccggaacaagacttccatcacccgccaggcggattttgttcagactccaatcaccacatttttggtggccacatcaggtctgtggtttaccagcagagtgcaaaagaatctgccactttgcagccatttttcacgttgcagttggatatccagtctgacaaaatacgcacagtccaggatgcactggagagcttggtggcaagagaatctgtccaaggttataccacaaaaaccgaacaagaagttgagaaaagtcgaagagtgactctggaaaaactccctcctgtcctcgtgctgcacctgaaacgattcgtttatgagaaaactggtggtgccagaagcttattgaatatcctgtggacttggaaattagtaaagaactgctttctccaggggttaaaaataagaattttaaatgccacagaacctatcggctctttgcagtggtctaccatcacggcaacagtgcgacgggtggccattacactagagacgtcttccagatcggtctgaatggctggctgcgcatcgatgaccagacagtcaaggtgatcaaccagtaccaggtggtgaaaccaactgctgaacgcacagcccatctcctgtattactgccgagtggacctgctgtaaaccctgtgtgcgctgtgtgtgagcccagtgtccgctttgtaggacaccacctcacactcactttccgcctctctttattggctctttagagagaaactctttctccctttgcaaaaatgggctagaatgaaaaggagatgccttggggttcgtgcacaacatagcttctgttgactctaactttgaaatcaaaatcatttggttgaaacagactgtcgcttgattttaaaaaacacacaaaaacccatatttctgaaataatgctgattcctgagataagaaagtggatttgatccccagtctcattgcttagtagaataaatcctgcaccagcaacacttgtaaatttgtgaaaatgaattttatcttccttaaaaaagaaatgttttaatccatcacatttttcttccctaccctttagtttttgataaatgataaaaatgagccagttatcaaagaagaactagttcttacttcaaaagaaaaataaacataaaaaataagttgctggttcctaacaggaaaaaaattagtaattgtgctgagggaaactgcttacatagacattgcagatcaaatatttggagttaaaatgttagtctacatagatggatgattgtaactttactgccattaaaaagatttcagattgcattcatgcttctgtgtacacataatgaaaaatggacaaataatgaagatctctccttcagtctgctctgtttaattctgctgtctgctcttctctaatgctgcatccctaattgtacacagtttagtgatatctaggagtataaagttgtcacccatcgataaaaatcacaaagttggtttaaaaaaaaagaaatagtcatagatgatggtataggtggagaggggttgctgggctttatgtaaagtgctattcaaagcttcacatataggtttcattcaaactttaagaagaaaaaaatgaacaatcagaaatgggtaagatgtggggatataaatagatattttgtacataagacttctgcatccccaaatattagcttgttgtggaattctgtcatctattcttgtttcagtcaaaacaagcaaaaaaaaaaaaaaacagtcagaacagtatgaacaacaatcatctagttccaccaaaaacttttcactcagcaagcaagcattgagtccctagctgaagatgcaaagaggagcaagaaatattctcttccattgagacggtcattgtctaaaggaaaatgtagataagcaaccagacattcagaatgacctgtgttacaagcaataataaagctgagcgctgggtactatggggcacttgggaaggctgcctaagccagagagcttcacagggagccttgatgtctgagtaagaattaaccaggtgaagcagaaggggaaataggctctaggaacagagagctttgagcgcaaaggcaggcagagtgtgaggagaggaggccttacttccttgtgactgcagcatgaaggtaaggggagggctgagagaaatgaggctc

SEQ ID NO: 27712 - DNA, 2300 bp, Homo sapien
aggatcatccctttggttaataaatgaatgtgtttctgcttaaaaaaaaaaaaagaaagaaaaaaagaaacatttctcaggccgggcacagtggctcacagaccaggcacagtggcacacgcctgtaatcccagcacttttgggaggccgaggcgggtggatcccctgaggtcaggagtttgagaccagcctgactaacatggagaaaccctgtctctactaaaaacacaaaattagccgggcatggtggcacatggctactcagtcccagctactcaggaggctgaggcaagagaattgcttgaacccgggaggcagaggctgtggtgagccgagggtgagccgagattgcgccattgtactccagcctgggcgacaagagcgaaactccgaaactccatgtccaaacaaaaaaagaaacatttctctgagccaagataatgttgagggggaaatgatcacagaatagcatatatgtatcataatcttatgtaaaatggtgtaaatctataattatgtatgcatataatatgtgcaaagtagtaatgttcatcaagttgtaaacaatggttatctctggactaggattccaaatgacctttcccctattttttttgagacaagtctcactctgttgccctagctggaatgcagtggtgcaatcatggctcactgaagcctcaacctcctgagcttaagcaatcctcccgcctcagcctcccaacgtgcagggattacatgcatgagccaccacgcccagactaaatatgtgttaaactaaagcagaagcatcattacccgagtaggctctataggaggaaagaggagacaagtgaggaaaggagagagaatgaaaaaaagagacttaaattgtaagcattgaaggttaggatgggaaggcgattcgcatttaaatctcaggaccccatttaggcttctacctccctgaccgctgggaggctggttgcttttcacccctctgggttcacttctatttgtctgtgagctgtcagcatccttccccacttgtcttgccctgcctctgccagggaggcagagttgggagtcgtggcacaggcatgcacgctgtgcagcctcccacacctgcaccctgaaagaccaacagacaccctaagaaacctgatacacaagcacaaactgataagatacccaaaaagtcaaaggcagacagcaaaacatggctaatattacacagtactgcaagagaaagtaacaccaaaacaaaacaaaacacagacatcatctctcagttccttctcaaataaaaaaaaaaggccaggtgcagtggctcacacctgtaatcccagcacttttggaggccgaggtgggcggatcacttgaggccaggagtttgagactaacctggccaaccatggccaacatggtgaaatccccctatctctactaaaaatataaaaaattagccgggcgtggtggctggcacctgtaatcccagctactgagaggctgaggcaggagaactgcttgaacctgggaggtggaggttgcagtgagctaagattgtaccactgcactccagcctgggcaacagagtgtgactctgtctcaaaaaaaaaaaaaaaaaaagggtgggtgaggtggtggctcacacctgtagtcctagcactttgggaggccaaggtggaaggctctcttgaggctaggaattcgagacctgcctggacaacagacagaaacactgtctctacaaaaaataaaaaaactagctaggtgtggtggtgtgtgcctgtagtcccaggtacttgggaacctgagcaggaggactgcttgagaccagggagctgggcctgcagtgaaccatggttatgcccctgcactccagatagggtgaaatgggtagtttttcacttgatctcctcctcattgtctcttacgtttaaacaagtctcaaacctggtgcagaggtgcatgtacctccattgctggacaaggcctgacttttgcctgctggtagggcctcctcagttctaaccagccttctgtgacctcattctctatcctggttccattttccactttgtgacttcatcagttaaagatcccatttcagccaccaaggttgagaggccccaagacccagttcctttacagaatcaaccctggggtggctttaggactgggctctttggagctcatccttggacccacagtggagtgctggtccgtgctgatgtcttcagataccaatcaatgggcatttggctccttgcttccactgacctcttgagtactttcaacgatcggtgtcaggagtgccc

SEQ ID NO: 27713 - DNA, 2300 bp, Homo sapien
actcggctcacttttctgctcttagtaccctttgtttcttgtgaactctccagcaggagtgacttgcaatttgtatccactgacacttaagttctcggaagtgctggagaagtgtatggaagtaaattatcctgatgtataattttgtgcatgtgaaactcaccgtggaagtgcctatctaatttcagtatggaacacagctaaacatttggatcaataatccagttttgaaaccacacttcatttaaagtacaatgtgctgaaaaaaatgaaaaaagggtgctttcaaatttgtacttagtaaactttcactagatcacatcatatgtttatcactagtcatgttgtatttctatgtgtaatcgccaggcacttttaatttctagtttgcatttaccatgccagcctcctcctcaatcccaaatttcctttggttataaatttagtaaatttgaaagagccagcagggattaaaccctgaaggtattcaaatgactatctgacgttattcctcatttcagccatttcgaaaaattatgctttcatttagaataggctctgggaatcaaagtgtgtgtattttgcccaagtagaagacacagtttaaagttaacatcctagctactagaagggaaagcaaacaacatcgctgcaaaaggagcctattttttttttaccttacactaaaactacattgtgaagatcaaacgaaatcaagatgagagtgtgcctcttaacgccaggtccaaagtagatgcttattaaatgatagtttaccccaatccttcacaaatggttgataggtcttactatttcccccctattcaaatctagaattttttcactcccatatactaatcgatagttaatggaaagcacagaatagatcatcgtccaagtgttaggtattagcctgaggaatccggaatcccatatttgtaactgtccttcttgagaaagtgcatttttcaggcggattctagccccatttttccttttaccatttttacatgttatgagaggtggcttagaaatacttcgatttttgcctcttcatcacaacacactgaacgttaaaatcaagtggttgggtttttattggcttattttgtctctaaccgttttatttctcgagctgtcatcgttcttttcgtcttacatccttatgaaccttttctggattaaaaaaatgacgttataataaggaaactgtaactggcgttggattagaacgaagttgactccattccttttcctccccgtagtgtgggcgatacgaggaaagacctcggcaagaaccagcgaagccccggctgccctcgccctgcgggcgcacacttgctcctcgcgccgggctgcgccgggcgcccgcgccgcctcggcgtgtgtccgcggctccctcccgccctcgcccgcagtcccccgatcccgatcccggatctctgggtccacagcttggctccctcccgagccggagccggagccggagccgaagtcgcggctgggcccggccgccccgtcacagggggagggaacccatggggagggggaggggcggtgaggtcagcggcggcggcgcgtccgcgggcggcgggagcttcgcatgcgcggagcgaggcccgtgagtggcagcggcggcgcgcggggggcgggcgaggggccgagagtgggggagcgggcgggggccgtcgaggaggcgttgtgtgggcgcgacggctgcgagttggggaggtctgtggtgcgggtcgccccgggggatccccggcgcgggcctcgcgcgacggccacggtcgcgcggcgtgtgtggggggtccacgcacacccgcaaaacttcctcctcccctgctccgggagagcgagcgagcgtgtgtgagagcgagtgtgaggagcgagccgcggcccgacgcccagcgccgccgctggagcagctgtcaaaacttcgccgccgcccgggccccgcggcccgccctccccgcgccgggcccctttctcttcctgctgcgggcggcccgggggaggggccgcgggcggagaccccggaggccggcgcccctcacgccgcccgcccgcccgctccccgcccggcccctgcgcgcgtgcgtgtcctgctcgctccatgttgccgcctctcccggtacctgctgctgctcccggggcttcgggaaatgcgagagtctgagccggggaggaggaacccgagcagcggcggcggcggccgcggcggcgggagccccccaagaggaggaccgggatccatgtgtctttcctggtgactaggatgtcgtcggaggagaacaagt

SEQ ID NO: 27714 - DNA, 2300 bp, Homo sapien
cttcttgggcaatcgtatccagtcccaagccttttaaaaaaacaagctatacccatcctggtggaattcctgcctataaaagggcgcaccttcagacctccaggcatgtccagcgaacactgctatgcacacggaaccaaattcagttgtgtgggacctgcagctgcaattgggtttccaacttccattgctgatgatcaagttaaaatacgaatgtgctggattaaatgctttattcagcttatctgcatctaggttatctaaattacacacccacttaaaacattctgtcacctcttctcttggaataattaattattttaatgtaattcagatctcattttatcctagcccagcagtacctgggagagaatgactcaatcatagtaaaatcatattaaattatattccactgattcagaattggagataatctggcaattaaagtgagaagtgtgtcattcctctcctggaagaaatgaacagtaatgatgggatcacagagatcatacatataagggcccaatacaggttcaaaacatgcccatcggcaactgccttacatacctggctcccaaccatactgttacaatttctatctttcaaactcactgtaaattacaaatgtggtacccaaatacctgtatgcacataaatatgaaaaggtaaactcttttttttttttttttttttaggtggattcttgctctgtcacccaggctggagcgtaatggcacaatcttcgctcacttcaacctctgccttctgggttcgagcaattctcctgcctcagcctcctgagtaactgggattacaggcgtgtaccaccacatctggctaatttttgtatttttagtagggacggtgttttaccatattggccaggctggtcttgagctcctgaactcaagtgatccactcgcctcagcctcccaaagtgctgagattacaggcttgagcaaccttgcccagccaaaagtaaactttttaattccatcacaatatgttctagatctttgacagactgaaagacatagaatgtcaaaaggtgagactctctcatgtggctaaacaccctcctactgcagatacagaactgagcccaagagcattcacatgctggtgagaggtggtggccaggggcaggcagatggttgcaccactctcagggtcagcatcctccccagtgtggcatgggggaggggaggggagggggcacggggcctgggaggctgtagcctaaaggcacgcagcgggcaagagactactgggcggacccctgccagccttcagttccatgagcgtctggtgccaggacgctccttgtgggctctgccctgggagaagtgcccttgcccagtgctccttctcggtgtctgtgacgtgctgtctccagtcctcctcattagcataccttggccgacctttggctcatggaaaaacactttgctcttctcggaacaatttctttttcacaactgagcaaatgactgatgaggtgaccacactcatgaccatactcatctgttggtggtgggtggggggtggactggatgaggacagcattgggcaacactctttctggcctccccactgcagggagccacaattactgtgggaggccagggtagtccagggtttccctttgggccatcagcattccaactgctcctcctacttctggcctctggagaactaaattaccaccatgcacttcccattccacctgtgcctcagcccgagggtcctgctcttcctgcatattcaagctgatctttctagggagtagcctgcactgtgccagcactacccccttgtcacaggcagcacctccctgtgctgggggagcctcagtctgcccttgggctcaggcccctaggctcaggttagctgacattcccaggaaatcctacaacttctcctttcctttcatggctgtaagacacagtccactatcagtctcattgtaaaagacatttctaaagagtgtcctcctttctttcccaacactagcagggacagtaagtgatgtttcctgggagatgctatggtgttatttttgcactacaagggctctgaagactgccaggcttgaaatgaagaacgatgtcacctgcctatcacagccaggtgacaatggacaaggggcttcacctctgagctgttttccagctgcactgggcacattcctcccctcaccctgactcacaaggtgttagcaataatggacacttctctaccttctgccacactctgaacaatgccacacttccatcaaatggattcatcccaaaggtaaa

SEQ ID NO: 27715 - DNA, 2300 bp, Homo sapien
aagggcaaacttgcactgacttattcccctgaaagacagtagctttatgcaggttttgacttacatctagtaacgggaaaatatataaacccaggcctccccccaaaaaaagcatgtgtgtgtgtgtgtgtgtgtgtgtgtgtgtgtgtgtgtgtgtgtgtgttttgagacagagtcttgctctgtcgcccaggctggagtgcagtgacgcgatctcggctcactgcaagctccgcctcctgggttcacgccattctcctgcctcagcctcccaagtagctggtactacaggtgcccgccaccatgcccggctaattttttgtatctttagtagaggcggggattcactgtgttagccaagacggtctcgatctcctgacctcgtgatccacccgcctcggcctcccaaagtgctgggattacagacatgagccaccgtgcctggccaaaagcgtattttttaagtttctaacctaaaatcaacttaaactatggtactttgatatgagtctccatgttattgtatttctaaagccctttatacccatgttgagagtgagtctaggcccatggggaagaagactctatggaactctggggttccttgcttatgtcttctgattcctttgtccaagatccctctacacaaataagcttaggctctctgccaagttcacatggccaattagagtggaaataggaccatacacagaaagctttctgctggccccacgggggcttgtggtatacacctcccatgagcagaaacttgaatgtcctggtctatataataatcttctttcaaggccaaatcttatgcatgggcaccctggggtctcttgaatagtatttttgtttctttggcgggtttgttttggaactttttttgagggaagtaagaaaggtattataagactcacgagagcacagtttgtggaggaaggaattgcccaaggtgaccatggtagggaggtcttcgatttgctggagcttcaccatgttggagtcgcctgctgggccggccaagatccgtagctgggctgcatcgtagcgatctccaattccaacagggaacactgtcactcctagagtcagcaaagagacaagaaaggatctgtgggcaagaaggttcaaaatggactggcctgacgttatatccagcatctgaatacagcctcgtgttttccaggctggtcacatacaccagccctatgaggaagatgttcagtcaacagatattaatgagctcctactctgtgtcaggtactattgtcagcaataggggtacagcagtgaaccaagcacataaagtccctccctgtcccccgtcctcatggagagatagacaacaaacacacaaagtaaatatatagaatttcagatgtggataaatgcttaggaaaaaaacaaaatgagataagggggatgagaatgcccagggctgaggtgtgggttatcgttgtatatatggcagttggagaagcatttggtgaaaagatggcatctgagcagagacctgatgtaaggagggaaggagccaagaggatgtctgagggagggacatcccaagcagagagaagagtgagtgcaaaggccccagagtagaagtgtgactgcatgctcccgggggctggggagagagggacaagcaagagagggaaagggcatggatcaggcaatgctccattggccacagtaagggctcaccatgttctgtgaatgaaacaaaccagccaagactacagagcagagggacaggggctgactttgatagtaaagggccactgcagctgctgtgctgagaatgagctgcaggggacaaaggtggaagctgggattccagttagacagctatttcaatagtccaggtgagagatgctggggactcagattgaggtgaccctggtggacatggtgtggagaggtgcaactctcaaagtattttgaagatggagctatagtttgttcatggcttgcatggaggtatcaggaaaaaggaagaagaatcaaggatgctgggctttttgaactgaacaactggaaggttggaatcgccattttctaagataagaaagacggatgtgaaaatcaggagtttagttttgcctgttagagcatgcaagctgagttgaggtgaggctggagatacgaatttcaaagtcagagatgtataaatatattcagacccatgacactgaactagaccaccaacagggtatatgtaagaagagaagagaaaatatcacagggctgagcccagagaatgtgcatgctcatttacacatgagaaaccgaggctt

SEQ ID NO: 27716 - DNA, 2300 bp, Homo sapien
cccctgttttgcccttctgccttctgccatgtgagggcacagtgcatctcctcctgaggacagagtgcacaaggtaccatcttggatgcagaggtcaggccctgaccagacaccaatcctgctggcacctggatcttggacttccagcctatggaactgtgagaaatacatttctcttcttcagaaattacccagcctagtgtattttcttatatagtagcacaaactcattaaggcataatgcttcttgtcattttcttctacaattttctttgttgcctctttagcagtgggtcattttatatttgatccttcataatatctcttacttttggtttttcacatttctgttccaagtgtattcttagatacatatttttcactgtttgttattatccaggtcagaaagtccaggatacatttttttaagggtttggtttctgcaacaatgaagtattaatgccttctgtaaactaggtatttcctttccaattgtaactgccatctggaagcaaagtggaattacaggctatgagtgtggggttgatatttagtgtatctagagtatggttaaatgctggtttttaatcacacggatacatcgattgcttggcacactagggtatcagttgctagttatctctgtatttatccatgctgttacagagggaaagtacagaccgtgaggttggaccagctgtcatacccatatttggggagctttgatttttttaaccttcagctgctttactgtcacacgtagcagctcaggtgaaaagcacttttattgtggggactttcccttagtgctctgtggggcacaagagcagacctatgtagaagcattaagtattttgtgcatcaacaggacaattaaaggaacaaattcttattgtatcttttagtccctgaagacaaaaccacagtgacagtaactaggtcaaggcattgtattcagagagggtcagccttggtctttgagagtgagtcccctttaccccactgtcaagactcactgagcagacgggaacgttcaggtggaacatgcagtgaatagcaaacacggtggggggcgctcactgtcatgcactgccatgcctgccatggtcagcagacctcttctacttgacaacaggcaggttgagaaacattttcttggagagtttcttgattcttgccagttgtggcaggatggattgacttagaggagctcaggaaggttgttaaacaacacagaaacacaagatgaattgtactcctcagcaggcctaggttagagcagcaggtgcttgaagcctcagccactcgtgggacacaacataatgcccctaatgatttgaaatttggtggagagtgggtcactaatccctgtgtccagggacaaaaagagacatcaacagcaaaaagttataaaataagtgggactaacatctgcttcttgtgggaggtaggaatttaagatataagaatttagctgcaggagcgagctcacacctgtaatctcagcacttggggaggccagcgcaggaggacagtttgagcccaggtgtttgacatgagccaggcaacgtagtaagtccccattcgtacaaaaatgtttttggagaaaagtagttgagtgtgggggcacatgcctgtagtcccaggtacgtgggaggctgaggcaagaaaattgcttcagcctgggagattgaggctgcagtgagctctgatcaccacaatgcacgccagcctgtgagtccggagacccgagctggcgccttgaagcggggtcccctgcaccggtagaagtcggctcaaggaggttctgagaacaggactcccgggggtccggccctggaggacccgaagcccccagtcccataaacgccccctactacatccccactccagccgccactgcgactgccacagaacccccgccacgtgtcgccgaacctgtttaaaggggccacagccggagtttgaagagcaaagcaggagtcggcctgggcaatgcgcatgcgggaggcacgagcccattctcccgtgacggtgactccaacggttggctgaggacgattccctgagccttgacaaagcaggagccctccgtggcagtgcgtcggggtcgaggctccagcctgaccaatccagggggtcgacaaaacagattcgggacaccatgctacacgcagggcctaccaggatgcagaaacagcagacggagtccggggaaagcagtgcggcatcccagcctcaggcctgcccgtacggtgttcgggtgagttcccccaaagccgtgccccccgtgatctcga

SEQ ID NO: 27717 - DNA, 2300 bp, Homo sapien
agtaccctaaagtttcatattttgaattggtgtcagatttattattattgatctctccattgctggagaaaactaagcaataggtaaactctattcttttggtaatttgtattttctgaatgtttcacagtaaatgtttactagtcttgtgatgctgcaaattggcaatcagatatattttaaagtgacaaggttgccctgttcatcaccagttctgtacatcacgcagatcaaaagtaaggtgtttaagtttattttaaatgtttttcccaaaaattctgcttccaccacttttccaagctctaccagatggatactcaagaattgaccaaggcaatctcttctctcatatttcactgtcaaatactcttaatcagtgagtcctgtcaattctgtgtttctaagaaatgatgatggtggtcatgattataatgatgtcaataggaacacctttccaaacttcactgtgtaccacgaactcttcttcctgctgccgatgtattattttctctacactgctatctccccaggaagattctaatgatgttatcattgtacagatgtggaaactgtagcttatgaggttttaattttgcaattcaaggaaatgacaggattctggcagtgtggtagctcatgcttgtaatcccaacactggaaggctgaggcaggtggatcactttagctcatgagtttgagaccaggaagatggtcaaaccccatctcctcaaaaaacacaaaaattagtgtacatggtggcatgcacctgtggtcccagctacttgggaggctaaggcaggaggatcatttgagtcctggaggttgaggcttcagtgagtctaggtcacgccactgcactccaacctgggtgacaagggcagatcatgtcttaaaaaataaacaaataaatacccaccacaaccaaaagcaaaggaagcaagcataataagctagttaatatgcttgttagcaatgtggacatttattttatagttaaaagaaaaaaatagaagtgacagtattgtaactcagaaagtctggttccagagtttgtactgctaaccagaacaacttgagcatcagttgatattttccattttttttgctctactttgtctgatattaatatagccattccagcagtcttatcactagggttagtagtgcacagctttattccatctcttccgtagtaattgtgtctttatgtcaagtatgggtttccaggagacaacatataactggattttactatttttatttctcttataggctttaccttttagttgtggtatataagccatttacagttaatgtgctgattgatgtagctttctgttttctccatgtgttacttgttccattttctcttatctgtcttcttttctattatttatttatttttttaatttcctattatggcctttgttggtttcttagctgttactgttactttagttcttgctttgaggtttgtagtgtacatctcaaatttaccacaacctaccttgaagaggtattacacttctctatggacaatgttaaaacactaaaataacatgtaccattatcccctctcagcctctgtgctacatgcatttttaaaattatataaccacaatattttattatttcaacagtcaattgcatttttcaaagatttgattaaagaaaaaagtctaaaattaacatacaaaattgccattttcagtttttgtcattttataagatctattatatctttgtggcacctatcacagccatttgataaattaatttgtagatacagtaagaatgtcatgtatttattaaagtttttaatagtgattttaaaatttcttattaggtggcaaaaaataataaaaataaatgcccagaacgagtatgttataaaactaaactgtaactccatgtaacagctatagcatagtttgtttgaactgaaattcacataaaataatcatattgaagtccaaaaaatttaaagatgtagtgtaaattcaatttatatgaaattgaagcacgaggtttcctagatacctgctgcctacagagttagaatctaattcttctgattattcttgtaacaaaatcttttgaaattctaaattctgatgcagaacgtatcagtgaaactccctcccactgtctcttgtattagcatcaaggaagcgagaaaaaataaggtaaaaaaaaattctgctgtgtttatttttttaccttcgaaatcttgctgagtattactgttcaacaaatgaaaaaaaaaattctcatcagttgtacctgtttattgccaatat

SEQ ID NO: 27718 - DNA, 2300 bp, Homo sapien
ggtctcgttttcaacactacgtcctttgctttgcaggtaaaattgcttattttcttgcctttttatgactaaagtaggcttgcagtttggagtcaggtgactgcactagctgagtcatcttcccttgaaaacaccaaggcattcttcctccctacagagtcacacatcttagttccccaaaacgctcagccacaatttgacttcgattgtcctacatttaaggtgatatttttctgattctcccattaactccctcttctcttcgcacccatggcccatcttttgctgctgtctagtagccattcatcccctcccatcacaaaagaagtctgtacttccttcagacagagcaacaagaaaattccccagaaagcaaacaattaaacaaattttaattttgccttttttaaatgaaaattctgtcaaaattgatgaaccacatctggtaggagcacctgttttattttcacaaagagttttctgatctggacatttttgttacttactgctaatatggaaaattttgaactaaacaaaatacacccccaaaacttaaactatgttaaaccaagacaagcttctaacaatgacacctctttccagtatgagagaactgcctcctacagtataagaaatatcaaaatcattatttttttattccacacatattcaacacttaaagccaaggcattagaattttaatataccacctctcaagcatgaacatataaaaattcttactgtaaatggggcatgattatttttcaaagagaagaaatattttattcaattctaagattaattcacaaatttgactcctgttttataatgataactttacgttgcaggacacagagattattccttaagaaatattttttaaatagatatttggctcttggaaccaaataataaaattttctgcttagacatacatacaaatttactttacttaaaacactttcttgttattattacatttttaaatctcccactctttgggatctccttataagtaggtcacttgcttttaaaatcttacataattaacatgtcagatatttacagacataccaaatgaaagtattatttattctatgatatgaataaaaaatgttttgaatagatacatacatgaataactttttattctgaaatctaatcagttttattcatatttgattttattttaattttttaaggtatgtttcacataatacaaaattacattattcaaaattatattattaaaacatttctatcatcaaacaggaaaccccattatctacttaacagttctttctattccccagcccctgacaaccattaacctaccttttgtctatatggccatgtctttttaccatatatgttttacactgcatcagttttcaatccaacatgccaagctgagagagtttttaaaatatttatttttatttttttgcaccgtccaattaccaggccctatgctcctcgcaccaatctagtaagactgtgtgtgtcaaggagaaaattatgtttatttcagggattgaggatattaattaatttatttatttatttatttatttatttatttattattttcttaagacagagtcttgctctgttgcccaggctggagtgcagtggcacaatctcagctcactgcagcttccgcctcctgggttcaaacgattcttctgcctcagcctcccgagacctgggactacaggcacatggaccacacctggctaatttttgtatttttagtagagacagggtgtcaccatggtggtcaggctggtctcgaactcatgacctcatgatccgcctgtcccggcctcccaaagcgctgggattgcaggcatgagccaccatgcctggccctccttattaatttaaaagattctgcaggcatgaaacttttgcagaataaactgtgtaagtaatcattctatattttatttttaccagatacatttctgagactggaaagtaaacagtcttggccaaatttttatgtttgttgctaggtgaccaaagtcctcttgtgatgccattgctactcaggttggaaaccactgtggtgatctcaattactttacctgagtagactactgaagcagcatttgaagctgcagtcttgaaacacatgcaggctggaaaagtcgctaaagaattacttatttgagatggcacatgtttctgcagaaactcaagatgtttctcctaaagatgaatcaactggttcaaaagcctcctctgggtctccattgtgtgaacacataatccctggggattcagacttaaggtca

SEQ ID NO: 27719 - DNA, 2300 bp, Homo sapien
tgtgattgtgtgagttaatacttaataaacttcctgtattagccagtgacatctagagggacagaactaacaggagatttatacatatacacacatacatacacacacacatatatacacagacacacatatatatatacacacacacacacatatatacatatatatatataaatgtaggaagtttccgtttttccctcaaaacaagtacgttcccccaagttcaggcccctgaataggcagcaggagggtgtatgcagagtctccactaaagtgatttgaccactcctagtcaggcatcagtaatactccccagaaccccaggctgaagcccactgatgctgatgtagttcaatccacttcctctacgactgcaccaggctgagatgccttggcccctgttaaagatgtgacatataatggatgcgaatctgtgttcagttttgtccaaatccaagtgatttctccatatacatgggtacttactggaaaggagatggagactctctgtcctagatgtgagacaggaggctggcacctgggttaggatgaccttccctcactgctaaagagtaaaagaggaaagaaagtggcattgatagtgcaaggcagggatatgccctgagcagcagctgccctcactaggagggaagactcactgtcctggtctttcccaagctctccccgtcacctgatctccaggaatccaggctccagaggagctcctcctgagtccccaggaacatgctagtgggcagtgcagcccagaccattactcagggaatatggcattagtctttttttggagacaattgatccctgaataatttcaagtttatcctaatccatgcttctataattggaggaagaaacaagtgactttttttttattttttaagtagtcaggtctagcatcactactcagcccttcatgctgatgaatcctgggaagaaataaccaatgacagaaacaggaatagaatatggaggccctgaaaccaaaaataagatgcattccataaaatccctggcgttaaagaggtccataggtttggataatggtagatctgtgagcaatacatgctttgaggttgagggtatcatctttgtgcatctgcagggaattgcttgaacagatagtgataatcataataatgaattaaagtcattccaaaatactgaaagtatttaaatactgaaatatatttagcattatcttgataaatttttttaaagggaagaaacaatttcacactcacagaaatgttgtaagtataccacaatgtatccccttccctttcagagtatatcaaatacccgatgatcacaccctctaaaactttactatcattttcctacagagaagaatattctcctaaataatcccaatacaccaatggaatatattatttcatcaggtactcagcagtatttcaaattttgagaagtatcaaaaaatgtgctctgtgacaaagtggtccccaggaagaaacacgttatttacagacatatctgtactgccctggtttgacctgggaccctagggacattgttcctatgctgagttactgagatgagccagccctgcagctatgcccagcctgctccactccctgctgattagcatgttcccagagcacagccccctgccctgaagacttcttaataggctggtcacaccctgtgcaggagtcagccccagtcaggacacagcacggacgcgagggcccccactcagctcctggggctcctggggctctggctgccaggtaaggaaggagaacactaggaatttactcagccagtgtgctcagtacagcctggctcttcagggagggcttcttataaatgattgattatgtagatgtttgtttttatgtttccaacctcaggtaccagacgtgatatccagatgacccagtctccatcctccctgtctgcatctgtaggagacagagtcactatcacttgccaggtgagtcacagcattagtaataaattagtctggtatcagcagaaaccagggaaagcccctactctcctaattcatgctgcaacaaaactgcagacgggggtcccatcctggttcagtagcagtcaatctgggacagatttcactctcaccatcagcagcctgcagcctgcagcgtgatgatttggccacttattactatcaacagcattacagttaccctcctactgtgttgcaagtgataacataaaccacacagggaagcagatgtgtgaggctgggctgcccctgctgctcctcctggtgccctcatctgctgagagcaatt

SEQ ID NO: 27720 - DNA, 2300 bp, Homo sapien
agtcagctgccaacacagctagactataagcaggcagaaaaatgtgaaaagagatgggcctcacctcccagcctacatctttctcccgtgctggatgcttcctgccctcgaacatggactcctagttcttcagttttggaactctggctggctctccttgctccacagcctgcagacatcctattgggagaccttgtgattgtgtgagttaatacttaataaacttcctgtattagccagtgacatctagagggacagaactaacaggagatttatacatatacacacatacatacacacacacatatatacacagacacacatatatatatacacacacacacacatatatacatatatatatataaatgtaggaagtttccgtttttccctcaaaacaagtacgttcccccaagttcaggcccctgaataggcagcaggagggtgtatgcagagtctccactaaagtgatttgaccactcctagtcaggcatcagtaatactccccagaaccccaggctgaagcccactgatgctgatgtagttcaatccacttcctctacgactgcaccaggctgagatgccttggcccctgttaaagatgtgacatataatggatgcgaatctgtgttcagttttgtccaaatccaagtgatttctccatatacatgggtacttactggaaaggagatggagactctctgtcctagatgtgagacaggaggctggcacctgggttaggatgaccttccctcactgctaaagagtaaaagaggaaagaaagtggcattgatagtgcaaggcagggatatgccctgagcagcagctgccctcactaggagggaagactcactgtcctggtctttcccaagctctccccgtcacctgatctccaggaatccaggctccagaggagctcctcctgagtccccaggaacatgctagtgggcagtgcagcccagaccattactcagggaatatggcattagtctttttttggagacaattgatccctgaataatttcaagtttatcctaatccatgcttctataattggaggaagaaacaagtgactttttttttattttttaagtagtcaggtctagcatcactactcagcccttcatgctgatgaatcctgggaagaaataaccaatgacagaaacaggaatagaatatggaggccctgaaaccaaaaataagatgcattccataaaatccctggcgttaaagaggtccataggtttggataatggtagatctgtgagcaatacatgctttgaggttgagggtatcatctttgtgcatctgcagggaattgcttgaacagatagtgataatcataataatgaattaaagtcattccaaaatactgaaagtatttaaatactgaaatatatttagcattatcttgataaatttttttaaagggaagaaacaatttcacactcacagaaatgttgtaagtataccacaatgtatccccttccctttcagagtatatcaaatacccgatgatcacaccctctaaaactttactatcattttcctacagagaagaatattctcctaaataatcccaatacaccaatggaatatattatttcatcaggtactcagcagtatttcaaattttgagaagtatcaaaaaatgtgctctgtgacaaagtggtccccaggaagaaacacgttatttacagacatatctgtactgccctggtttgacctgggaccctagggacattgttcctatgctgagttactgagatgagccagccctgcagctatgcccagcctgctccactccctgctgattagcatgttcccagagcacagccccctgccctgaagacttcttaataggctggtcacaccctgtgcaggagtcagccccagtcaggacacagcacggacgcgagggcccccactcagctcctggggctcctggggctctggctgccaggtaaggaaggagaacactaggaatttactcagccagtgtgctcagtacagcctggctcttcagggagggcttcttataaatgattgattatgtagatgtttgtttttatgtttccaacctcaggtaccagacgtgatatccagatgacccagtctccatcctccctgtctgcatctgtaggagacagagtcactatcacttgccaggtgagtcacagcattagtaataaattagtctggtatcagcagaaaccagggaaagcccctactctcctaattcatgctgcaacaaaactgcagacgggggtcccatcctggttcagtagcagtcaatctgg

SEQ ID NO: 27721 - DNA, 2300 bp, Homo sapien
ccccagtcggtacgaggtcactgcaggggctgagctcccttccatccaggaagaccttatctgcctcattcctgccactgcctctctcccgtctcaccccatccaaacctactctcatctcagggcaggatccaactgggtaccctgtggcctcgttggctaactgatttatactaaggtatgtgtcctttacagtgtgagctgtgatggtgagtttagaattgactcgccatgactgcagcctgcagagggagccagcacctccaggaaccccattcttgccatcagcagagggtctatggctcccacctcatccagtgtctccctgagcaccatgtctgcctgaccaggacccagtggtcctcccatgaggatgctgcctagggctccaacccaataggtccaaatacacctcaccaacctcccctcggggctgtccccccattccccacctcagggtcgggtcactactcatatctcatccacccacatgtctcctcagtctcaagactctgcaatttcctccatgtggctccatctccacttttcccaccagctcaagccaaatcttatctctatggacatcccattggccctcatcaggtcccccatgtctgcttgttcctgcaatccattctcaaaacataaagcataacatgtcacacagtttcacactcttcagcactttcctttgctctgaggagaagccaggcacccactcacctggccccacccagcacccccatccccacacactcttccttgcatcctccctgctacctgatggggcccctgtgcccctcttgtaagctgacatgcagtgcacattggggatggcttactgaagaggccccttgtctgtcctgttctctaagacatctgcagaggcaagaacagatcctgtgcatatcagatgcccccaactgtgctttcacacaatgtgtgaacaaagaagcaaaccaagctcctccagaggcaggagacaaggacctccggcttcttggtccccgtgacaccgggtctggttgaggccaagctgccctcatctttgacctgttctctccttcccttctctccccaggcaacatgagaacctccaactggcccagggaaggaacttgtaaagcccaccccaaccaggataagacagtggggcataaatgggaggagaggggttggctgtcagtgccacactcaatgaacactcacacatgcacacactgatgcgtgcacacacgtgacataagtacacacggtgacatcccaatacattcacaaacatacacaacacaaacaggcccaaaccctcactctgaaacctaaccccacccccaaactgcaacccggaactcaagtcctagcctgaaccttgaccccaaaccccaactcaagtcagaaggtaaaccatgggccgaatcccgaactggaactcaaaccccagcaggaacctgaactcttccattgtctttcctcatctggcgcatgggactcagcacctgagactctgttgtggccctctgaatgagctgcgcccctcgttcttgtcctctccaccagctgcgctccctgtccctcttctcccaaggagccacccggcccatgtcccccgccccggtggtcccgatgagatgcacccaggctgacccagggtgcaaatccccaccccaatccccaacgcaaaccctgaacgagaggcctcgtctaaactttaatcccaaactccacctcaaattggaaccggaaccacagatggaagcctgaaccggaactcaaagcccagctggaacctgaaccccgccctcgcctgtgagcacctgcgcccgggtctcgccctccccacgagcttcacctctgaccccgacctcccctagaactgcgctttctaccccgcagtcccagggtatcgcaagccgtccctcacaccccacctccagcaacgccctctcgccctgtctcccccaccttcactgtgagctgcagcccccatgtccctgccgtccccctcaccctcccgggagctgtgcccacctgacccggcatttgcgcctttgtcttcgtggcccggaagtggccccgccggcggaagcacgagaagtggccacgtgctgtacagcggctggctgaggaagtcgccccccgagaagaagctgaggctctttgtgagtggggcagtgggggcggtaccaggagcgccacggagggtctggggactccgggaggggcgtgggggaggcggcctgggtccacgggaggagctgcgggtggaggcgacttctccacgtctgcatgcgaaggcgact

SEQ ID NO: 27722 - DNA, 2300 bp, Homo sapien
gctccagacagaccctggcggcccattctgcagatgttggtgaggttggtatttctgcggaggtgtcagcaaaggttgaatgtgccaggcatgaggcaaaggccaaggtttagggggacttctacacacacacctgcccccttgccttgtccagccagaaagcagagagcagtggcatctgcccagcacagaggcagatgggtggatccactcatcggaggatagagcagggaagacaggacaggagaaatccaagagggcttctcaggggaggaggcgtgtagtttggcttagatgcagaggctagacaggggcctgagcagatgagtaggggactgggcatttgaagccaagagtcttgcacctccctacccctttctttgcaccctcatacttgagcatttattagcaacttgtgctaaccactgagctaagctgacctccaagtaattagaaagcttaagtaaaccaacatctgtagatgagaaaggtgactgaggacctactgttacaaaggcaaggtaatttgaggctgcaatgagctatgagcaactgtgttccagcctgggagacagaatgtaaaaaaaatagtaataacagaaagtatgcatcaatctcaatttttttaaaaaaaggcagatgattttacagttgttttatcaaaactcaaagaacaggaaagcccaaattatttcaacaaagtcagaccttttaaacagatgatagctgcccaagtcatttttatgaaacttctttatatcaaaacgtaagtctaaaaagagaaaagtgttgaccttgatacaggctgtgttaggcagagatttcaaggaaatcctctctgaagaggtgacatttgatctgagacctgaagcaccggaaagaggcagccaagccaggaagaggcaggaatgggaaggtctagggaaagactggtcctggcaggcagaactgcggtggcaaaggcccagcggtgatcaggagcttggcatttggaaaaataaagagtgtgtgtgactggacagcgtgatcaagtgggcagaggaggagatggtgatagggtgtgcactggtcaggccacctagctcctggagcccacagtgagaagcatgggcttgactctgagggcaaaggagagccacagagagtttgggtaaaggggaaagttggcatttaattttatagctttttgaagtttgttttgttttcttagaaacagggtctcagtctgttacccaaactggagtgcagctcaaaatattttccaatttatcttgtgatttttttttgatccaatgatttagaggtgggttgttaaattttcacatattttcagatgtccaatatttcttactgttgttagtttctaattctgtttcagtcagataacttatttgttttccctgtctctcctgtcttctgatcctgtttttccattgactaccatttttaaaataaacttatttcagtgtgtcatttacaatcctattttaattttttgctctatctctgacgtggttgttccagggattataatgtgcttttaaatttttccaacgaatgaagaacgaagtgatcgacttcttgcctctgccggggctctgaagcgctgccccgaggcggtggacggagggtgccaggcgtgacatcaagagctctgcagccagggcctggggcaacctcccgctccacctcccgggagcctcgcagccagcatccccagcggctcgtgctccccggccaggcgggacctcagcgctgtggcggccgcagacctcacctgggcaggccccgggccgcatgcggaccctagaggcaaccagcgggctggatccgcacagcggccctggggaatggatcgtgtacaggggacaaagctacacatgtctttcattttggaggggggaaaaaagaaaaaacggaaatgaaagattgaaaatgtgtgggctctccgtcctttcctttgctcctgcgcgctctctggggtggggggctcagcgagcttcaagaggtggccgagattcccccaccccgcccccagatccccgggagaggtcagcacggcccctcccgtgggtgtcacagagaccgataccggtcccgctccccgggaaggagtgggtctgggtccagtccgcaggaccccctcgcggatgctgacgcagaatggagttgaggtgggggcagcgctggaccctagggcccctgcctgcctcctggggagcccggtgacccaggcagccctggtgaggccgcaggagtctgggccctagcgacgcccccgggctcccacaggacgaatg

SEQ ID NO: 27723 - DNA, 2300 bp, Homo sapien
aagaacaggaaagcccaaattatttcaacaaagtcagaccttttaaacagatgatagctgcccaagtcatttttatgaaacttctttatatcaaaacgtaagtctaaaaagagaaaagtgttgaccttgatacaggctgtgttaggcagagatttcaaggaaatcctctctgaagaggtgacatttgatctgagacctgaagcaccggaaagaggcagccaagccaggaagaggcaggaatgggaaggtctagggaaagactggtcctggcaggcagaactgcggtggcaaaggcccagcggtgatcaggagcttggcatttggaaaaataaagagtgtgtgtgactggacagcgtgatcaagtgggcagaggaggagatggtgatagggtgtgcactggtcaggccacctagctcctggagcccacagtgagaagcatgggcttgactctgagggcaaaggagagccacagagagtttgggtaaaggggaaagttggcatttaattttatagctttttgaagtttgttttgttttcttagaaacagggtctcagtctgttacccaaactggagtgcagctcaaaatattttccaatttatcttgtgatttttttttgatccaatgatttagaggtgggttgttaaattttcacatattttcagatgtccaatatttcttactgttgttagtttctaattctgtttcagtcagataacttatttgttttccctgtctctcctgtcttctgatcctgtttttccattgactaccatttttaaaataaacttatttcagtgtgtcatttacaatcctattttaattttttgctctatctctgacgtggttgttccagggattataatgtgcttttaaatttttccaacgaatgaagaacgaagtgatcgacttcttgcctctgccggggctctgaagcgctgccccgaggcggtggacggagggtgccaggcgtgacatcaagagctctgcagccagggcctggggcaacctcccgctccacctcccgggagcctcgcagccagcatccccagcggctcgtgctccccggccaggcgggacctcagcgctgtggcggccgcagacctcacctgggcaggccccgggccgcatgcggaccctagaggcaaccagcgggctggatccgcacagcggccctggggaatggatcgtgtacaggggacaaagctacacatgtctttcattttggaggggggaaaaaagaaaaaacggaaatgaaagattgaaaatgtgtgggctctccgtcctttcctttgctcctgcgcgctctctggggtggggggctcagcgagcttcaagaggtggccgagattcccccaccccgcccccagatccccgggagaggtcagcacggcccctcccgtgggtgtcacagagaccgataccggtcccgctccccgggaaggagtgggtctgggtccagtccgcaggaccccctcgcggatgctgacgcagaatggagttgaggtgggggcagcgctggaccctagggcccctgcctgcctcctggggagcccggtgacccaggcagccctggtgaggccgcaggagtctgggccctagcgacgcccccgggctcccacaggacgaatgtagacggtgaggccaaggacgccctgctgccctcgggactgtccctccagcccccagctttccgtggttattgggccccctctgcagaggggcaggggagcccaccctggatcctgaggcgccgagcttgagggaccccagagctccagccaggccgctttctttgcggatggtgaagctgaggtcccgaggagggcaggggcaggtcccgggcgctcctcaggcaaagggagccgatttaggggctggggtcacaggaggcgcttctgcgacctctagggccctagagcccgggaggatgagagactgggggcctttcgtccacccctggggctgggcagacgctcagcctgtgcaacccgaagctgcttctgcccagtcccagccgcggcccctttaagagggggtggtgcttcagcctggcgccagggacgctgccagcatgcaggccccgacggaagccgagactgcgcttcgtgcgaggcccgggcagcatcggcggcgtggtcagagcgagtctcggagaagatgtggtggcttccgtttgttggtggaggaggtggcaggcctcggcggtaagtggagggggatgaaccccacctggaaccctctgggtctccctactccttctcggccgctccctgctttcgggccctgacttctaagtgg

SEQ ID NO: 27724 - DNA, 2300 bp, Homo sapien
aaaccccgtctctactaaaaatacaaaaaattagccgggcgtggtggcaggtgcctgtagtcccagctactcgggaggctgaggcaggagaatggactgaacccgggaggcggagcttgcagtgagccgagatcacgccactgcactccggcctggatgacagagcaagactccatctcaaaaagaaaaaaaaaaaaagaagaaaaataaaatatttcttaaatgctgaatgttgctttgttctatgaataagcaatatttgttcacagatacatcaactaattaggaataaaatgaatttcaagtaattcatgtttaattacttattaacatgtattatatttacattattttttatcaattatgtactaataatggcaatgatgaaatgaagatctcagtgtcttgcactgggcagaggcctttctcattctctgccacttgggccccagcatggcttccctaagagctaggagctcagagggaggggctgggcaagacagaagtcaggatctttttgtaacttaatcttgtaagtgacatcccatcatttttgtcttcttctattcatattctattgttagaaccaagcctctgggtccatcccacactccgcgaggaggattcagaaggtcgtgactcccagggggtgggatcctagaacacatcttagaagctgcctacgacaaccgctgatttttaagtaacagttacatcctctacatctatttagacttaggatggagaattttagatgtcatctttaaaatgcatgagaggatgcagttttccaaaattcttttagaaacagacaatttgaaggccactgagcttcaggcttcattcagctgggtcgtgtctgcgggcggggctcatagagatgtcgctgggggtcagcgggtgcttcgggcagcgaaaaaacccacctctcgagggcagtggaaaatacagggaaaagccacttgagtgtagactccgtgcgtgtcaaggccaggcagaggcgcacttgataggcaaggaaaagcggacggtggtggtcttgggaggaagagaggagaggcgaatgggcaggagcgtgtggatgcactagggcaggacgggctcgaagcaggaacctaggatagaggcagcgcgggccggcttgggagggtcctccagggtccggagaggagaggacgcaggctgcacgcgtgctaagaaggagactcatgaaatgtgtaattcgctggcgacagcttccgcggccgtggagtgagcctctgggaagtaacgactctcttaggtgcggctgggacacagtctcacagaccaggtaagttgcctgccctccaggaactcaagtgtccccgagtccgagccaggaggctggaagtgactgctgtcccatcctccctggagcccggagctgtccttgtcttgagaaagagaaagcaaagccaaggaaagcagagcgagcagaaccaggcaaaggggtggggacaataaaatgggatatggcccgcgcttccatctactcaggaggcagaggcaggaggatcgcttgagcccgggaggccgaagctgcagtgagctgcggttgcaccactgcactccagcctgggagacagagggagaccctgtctaaaaataaagtaaaataaaaaacaaaaataaaagggacagagactaagaaaacggacttcctgaaatcccaagttgggatttcacgtccagtgacccacaagagaagcaagaagtctgaacagggccaagaatcaagtgagtgggggcggaggattaaaatcgacagttgctgcggcacggccagggtggagggtgcatgtggggcaggcgaggctccagctggagttgacgctagcccgacgcgggtgcaactggaggcgcgacgggccaggcccaggagcagcgggaggagcgcacctggggcgcgcgggcggaggagggccggggagggacgccggaaggactgggtagggacgcccggaggactgagcgtagggccgagaggaggggcgcaaggaggaacggggggagggccctgtctcaccctaaacccctccccgtcccagactaaactcctcccctcggcccggcccgcccctgggcccgggctggaagccggaagcgagcaaagtggagccgactcgaactccaccgcggaaaagaaagcctcagaacgttcgttcgctgcgtccccagccggggccgagccctccgcgacgccagccgggccatgggggccgcacgcagcccgccgtccgctgtcccggggcccctgctggggctgctcctgctgctcc

SEQ ID NO: 27725 - DNA, 2300 bp, Homo sapien
ctgagctgaaggattgtggttggggaaagcgtagtcccagcaaggaagcagtttgtgggtaagtgctgggaggtgagtggagtgagcttgtcagggagctgctggtggagcctggaggggaaggagggaggcagtgagagagatcggggtggggggtggggggatgtcgccagagctcaggggtggggacagccttgtgcgcatcagtcctgaggcctggggcacctttcgtctgatgagcctctgcatggagagaggctgagggctaaacacagctggatgtcacctgagttcatttataggaagagagaaatgtcgaggtgaaacgtaaaagcatctggcaggaaggtgagtctgaagccctgcacccgcgttccgactatcagtggggagctgttagcacgtaggattcttcagagcagctgggctggagctcccctgagctcaggaagccccagggtgcaagggcaaggaaatgaggggtggtgggtcagtgaagatctgggcagaccttgtgtggggaaggggtgctgctgtgacttcagggtctgaggtccaaagacagcatttgaaaagaggctctgaagccagtgtttgaagaatttgttcctgaagtacctcctgggggtaggctagaggcttctggcttcagggtcctgaagaacacattgaggtgccgtctgacactggaatagggtgcccttcattcctatgcctgagtccttaactatatttccaacctccagtgaggaggagaagattcggaaatgtgacaggagagcaaacaggacagtttgcatgtgtgtgtgcgcacacatacatgtgcgtgaaagattatcaataaaagtgcataaatttgttgatctggtaagagtttctagcaggaaggtcgagccacttactgtaggtcaagaagttgctagttgcggagttttttcttgcagttagactttacctagtggtagcagggccaccaaagctctgtgtcccagatggtgtatggcccataatccacccaacagcagcaaaggaccaggcaaaggagaacaggagcagaagcctcccagccactagccttttgggctcagtctctccaataatcctggagaggggcttcgttgggtctggacacctaccatgcattctgtgacctttccctagcttccaataaataactgtttgacgcccagagtacaggataccacaatgcactcttcctgcgtagagcacatgttcccatctgctcccattcctcaggaaccttgaattctagctctgctggcctttgagcccatgccagtaaatgtcctgatgggcattgcctactatctccagggcagctgcctttgtcctcctaacagctttattggagtacagttcacttaccatacaatccacaattgaccctgcacaatttgatgccggtttagtatagtcacagttcagcagccatcagcacagtcagtcttagagtttactacccccaaaagaaatccagccccccttagtcaccaccccaacctccccatccctaggcacccctaggctactttgatctctgtagacttgcctcttctggacatgacatagagaaaggagtcataaattctccaaggtgtctgtttcttctttaatgtcattccctgtttctcctcacattccctccccatttcctgggcccagtctcacactggtccttgcttaccctaaatgctattaattccatcactctgagtatggtgtttgctgtccgctgaatgccaagagcttcaagagtgtgtgtaaataaagccacacctttatttttgtattattctgaaccatggctaataaattgtttcaccaagaaatgtctctctaagaacaggtgccctccacgctgtgcccctcccacctcttcagctcgtctcctgagtgtgcagaggtggttccggttgggaaagaagcagcggagcatctaaccatgcctgtgtccaggccgattatgcacgcagccaccaacaagctcccaactcccgcgtagagtttcatgactttttcctgcctactatcttgatcctagttttttttttgttttttttttttttaaggaataattactttgattcaaaaccagtttctcttttctgcataggaaggtccttgaaggtgtttagggtctaaaaagggtggtgttcggtctctgaaacatccattcagcagtttgagctgggatctctgaatgcaagggtatgatggatatacttctttcttgcttttgttgtgttttggttttttgtttgtttttaagtcagggtctc

SEQ ID NO: 27726 - DNA, 2300 bp, Homo sapien
gaggtggtggaggggcggagggcggagcaccgtagccccctctggcccgactcggggaggcccgattgccccggtcccagcagccctccagggcctccaggccccggcagccgaggaagaagaggttcttgagcatgaagatggagaggggctgctggtagctgaccaccaggaggcagcgcagcgccagcaagggcacgtccaccaggcagccgcccagcaggcgcagaaggcggctgcagctgccaggcccggaggcctggccccaggatgcagccgctgcggccgcggcgttgagctcgtagagccagagcaccggcgaggcgagggtgaggaagtagacggcgataagcaggtagcgcaggtgcgcgggcagcggcacgcggccctccagcatcagctccaccagcgtgaagctgtcgagcaggtccaagcacgtgcccaggaagcatccggccgcgcggtgccgctggggctgcagcagcaggggtcctgccgatcccgggggcgcgcccgcctcgctgatggcccgcaccaagctgtagagcaggggcaccgacagcgccatggtgagacggaagcccgtggtgccgaagggcgcgcgtagctcgatgaggtctaggatggacgtgcccaggatcagcaccaccttgggagtgaaggcgatggagtagataagccaggccaggtaggcgaaggcgaactcgcccgctgccgcggccgcccccaggccgccccccgcgccgccggcgcccccgcgggctccgcgtgccttggccccagcggtagcggccgagggggcgggcagatgcaggggcggcgcggcgtggtggtggtgcaggtggtggttgtgcgcgccgctggctgcgccgccccgacggccccggctgttcttggcgaagaagatggcccagcccaccaccaccaccaggtcagtggcgatccaggagcaccagtacaggtcggtgacggcgatgaggtacaggtccagcaggccgccctgcgccagcagcagcaccacggacagcgcctggtagccccagcggcacctgggactgggggcgcagccgcggcgccgacctctgcggccggggcggtctgggcagccgcagcagcagcaacacgggcagcaggaggcgccgctgccggtcccggtgccgcccgcgccccccgccgagcggctcccggggcccccgacggccccggccgcggcgcccccgccgaagtccgcggctgtcatgctgcaggaggaggtgggcgtggaggtggaggaggaggtggccgctgaggaggagaaggcgacaggcgcggggccggcgggggcgcccacctgagccggcggccccaggagcgcggcgttgggcaccagcggcttgctgacgctgaggctctcgtcgtcgtcctcgcgctcggcgcccgtgctgctgctcggggagccgccgcccccgccgcgtctgccgccgcctcccccgcggctggtgctggtgctggtgctgctgtcgccggagcctctccggccgcggaaggagcccccgcggaggaagaggggctgcagccgggcggctgccgggggcggcgggaaggaaccggacgcggaggagaccgagcgagggtggccgagcgccgggcgcattgtcctccgaggggctctggggccgcccagctgttccctccccgccaaccccgggcgggcgaggcgggctaggcggccgaggggagccggggcccgccgcctccccagcagtggggactcgcacctgggccgggcggcggcgagatccggactggagccactggactgggcgagccgggccgggcggcagggagagggggcaggcggtgaaccgagcggaccgcggtgaagacaggcgaggcgggggcggggcggggcggggcggggagcgagtcccgccgggagggagggaggctggcggcggggaaaccaggactggattcgagggggagaggaagcagcgagaccagaggaggagaaagcgcggcgcgctggatcaacgggaagagaaggggcgggggtgcagtgcgtcacagtcgggtcgggagccctgtggcctggaggaagcgggaggaggcgcgggcagccgccagggcgaggcgacccggtgcggggggactcccatggagcgcggactcctaaggaagtcgctgggaatcccaccggctgtaccgcagggcgttagtacctagatggcttcggtgcccccaagcgatgggctcaagctacagggcgggctttgcacctggccttctcagctctgaggcaggcagtgggcagcttcgcc

SEQ ID NO: 27727 - DNA, 2300 bp, Homo sapien
acctttaactgagcatggactctgagccagggactggctctgtcatcgaagagagattacacacatgatctctcttcatactcacaacaatcccttaaggtaggagtgaggtccttttttttttttttttgagatggagttttattcttgttgcccaggcaggagtgcaatggcacaatcttggctcactgcaacctctgcctcccgggttcaagcgattctcctgcctcagcctcccgagtagctgggattacaggtgcgtgccaccacccctggctaattttcgtattattagtagaggcggagtttcactgtgttggccaggctggtctcaaactcctgacctcaggtgatctgcccgcctctgcctcccaaattgctgggattatcaccatgcccggctagttttgtacttttagtggagatggggtttctccatgttggtcaggctggtctcaaactcccgacctcaggtgatccgcccgcctcggcctcccaaagtgctgggattacaggcgtgagccaccgcgcccggctggggtggggtcctgtttacagatcaacattctgaggtgaaatattcaggctaagaccacaaaggtgttaagtggcacaggtgggatggcggccccagagctcctgccctcaccaccatgccagctttccaaaagtggtgtgtgtgggggaggtggagatggtgcaggttctaaattgtatatttaccagggattggctgtgcagactgacctccacggaactggaaaaggcaggtttggctgaaacggactcttatttaagaggcagatttaggggcgaggcctgactaacccctgcggctccactgcatacagctccctcacactgcatggtgttatcacgctgcaagctgttacctaggggagatgagcccgcagcagcagcttcaaaggtcatgaaatcagggagcccacaggccccacaagggtgcagaggccaatagggcaggcaagctttctgccttgttttcatggggctgggaatgggatgtttccattattggtgaacctcagattgtttttgagccccaactgctctagtcatttccttctcccttaaacccctaaaggcagcactctaccttctgccttccagagttgctgcatcgacatccatccccagccttggatgagtcctggggtgagctggtgtgctctctcctgagactgtctacgcagggccactgactgcattccttccttggtgtctctgtctactgtggtgggctgtaaccctcaccatcatccctttggagcctttgttttcatccaggtgcccacacctctaaatgcccctttattttactctctgctagacacatcttcctattacgtcccattctgctttaaaaacctttgagaagcccgctgggcggatgccacttgcccaatctcgttccctcgtctctcctcccaggcaggtgttttcagggaacttctccatccgctggaatcgggtcgtccctgagatggctcgcgaccccagggctgggtacatggatatttaggactataggtctggggctgctgcccgagccctttttgccaacatggcctgactcctccactggtttttagtgccttagggagaggcggatggccccatgggaagggcgctggacggagggtggaggcgaagctgcccactgcctgcctcagagctgagaaggccaggtgcaaagcccgccctgtagcttgagcccatcgcttgggggcaccgaagccatctaggtactaacgccctgcggtacagccggtgggattcccagcgacttccttaggagtccgcgctccatgggagtccccccgcaccgggtcgcctcgccctggcggctgcccgcgcctcctcccgcttcctccaggccacagggctcccgacccgactgtgacgcactgcacccccgccccttctcttcccgttgatccagcgcgccgcgctttctcctcctctggtctcgctgcttcctctccccctcgaatccagtcctggtttccccgccgccagcctccctccctcccggcgggactcgctccccgccccgccccgccccgcccccgcctcgcctgtcttcaccgcggtccgctcggttcaccgcctgccccctctccctgccgcccggcccggctcgcccagtccagtggctccagtccggatctcgccgccgcccggcccaggtgcgagtccccactgctggggaggcggcgggccccggctcccctcggccgcctagcccgcctcgcccgcccggggttggcggggaggga

SEQ ID NO: 27728 - DNA, 2300 bp, Homo sapien
gccacatatggtggcgcatgcctatagtcccagctactcaggaggctgaggcaggagggttgcttgagcccaggcgttggaggctgcagtgagctgtgatcactgcactccagtcttggcggctgagtgagaccctgtctcaaaaaaaaaaaaggaaaaagcccagagaagcgaacggctttatgccctgtcctctctgtattgcttataattagctgggaacccgtttcagagccacagcatcccgtccaacaaggagttccagacttactggctggccttcccagtgctgcccaggagagctggccattgtgaagttagcaatcctgaggcccggcactgagctgccctcgggagaggtagcttgcttgcagaggaagcactggtcagtctgcacatctgcccaggtgccctgtgcgctgggctcatttttgagcactgactttgtcccctaactcatctgatcccttggtgatcctctgcagcatgactgccatctcttgaggtgcccgttggctcactttctcctcatcgcaccgtctgtgtatcacatagcccaggtcttgagtcagaccattctcacagtttgacgacatgcagttataaacagataacttactttttatttgctgatatagcttaagtccttcctcctccagcgctttctgatggaacagagcacttcctcccctgtgagggctttctccctgacctgtgcaagttctgtggagaaccagaatgtcagagttggaacagatctcggaatagctcagagacagccccacacaggggagtgacctgtcccgggtcacatagttgtttagtggcagagccaagactaccatggcctggggatggagtggaccctcgaggctggtcgagtgaagctgcctgctcaagaaccgacatgaggagaaatggcccatcaggcgtgatgccgccttcgtctccacggcctcaccttagctgcctgattttagactcttgcttggctatatcttgtgtcctctcccaccagagaaagacagctgaccacccttcctcctggtgacttcacccatggtgtcctgcctgttctgtggccccacctggccattgtcttttcgcctttcttgcatctttctcagtcctctccagctttcccttggcttgggcttgaccacgggtgtggggtctgtggagtgtgtctcccctcccctcccagcaccctggaggtggggttgtggttctcctggagtggaaggcgacttgtgttgatagcctctcctttgtctctctgcagcccctcccgaggaatgacttcccccgcattgaaggtaagagaggtcctctttgatgagttgtgaggtcttttctccgtctcctctctggccctcaggctgtctcagtgtgactgcctgcagcctggttcagcagcaaggggccttggagtcaggacacctgggctctggtctggatctgccacttaccacctctgagactgttgttagtctttccttccccatgccactcactattccaggaaaaccgtaagcttagagaattttagtggtggaaagacacctagaggtgatctagtctagtgtttctcaacttttaaacccagttctcccctttttataccaagaacattggaatatcccctttattatcctgaagtgaaattcttaggtaatataacttctgtacacacatattaaaaattagttcagtataaagccctaactgtaatagggggatataaaaggaaacatttttagtaagaagataatgtatttcagtatgtagtagttatccaagaagtaaaatggttgcactaaacagaatcaccatgaatgttaacagctacaaatgcaggctgatgtgtgtttataggtgtgacaggcgtgttttaccggtgactcagaaattaggggcagcattgccgttggtcaagtgattttccaaaataggtaacagttcttggtagagttttgaaaaggcaaagtacagtcttctcttgacttacacgatagttgtatttttggaaaaattgatgtttattgaagctgtacaaaaatgctttgtgattgtatgtaaaatagaatcgttcaagtaattctgaaaaggttgttcacctgtgtggataccaggatatcaggtgggacattcaaatgttatgaggacatgggaaagttttttctttttcttcttgttgttttgtagagacgggctctcactatgttgcccaggctggtctcaaactcctgagctcaagcaatcctaccaccttggcctcccaaagtgctggaattacagac

SEQ ID NO: 27729 - DNA, 2300 bp, Homo sapien
gatctgttgcccgggctggagtgcaatggcccgatctccgctcaccgcaacctccctcccaggttcaagggcttctcctgcctcagcctcccgagtagctgggattacaagtaatagatccattacatagatggggaaactgagcttggaaagctatgtaaattgccttaagtgaagccgctaacagactgcacaggattcaattctaaagctcgtgctcaaactctgtcatcctgcattcttctttttctgctctaccggaagagtcacttggagacatttcgggactctgcagagatgctagagccaatacaacagttataaataagggcgatatttccttatatttatatcctgacagtttgtaagtccttttatcaacatattctaatttcaaacttccaccttggtcacgtctagctatgtgacactggccaagtcactcagctgctttgaaccttagctgctccatatttaaaaatcataaaaataatacagctgttaagagcttagactctggcaccagactacctgagttccagattctgccacttaccagctgtgtgcccttgggtaagctgcttaacctctctgtgcctctgctccatctataaaatgggaagactaataatagtactttcctcggagttgttataaagattatacgaataactgtgaagtacttagaatagtgcctggcacaaagtaagcactatgtgtttttttcatgcaagtaatttggccgggtgcactggctcatgcctgtaatctcaccactctgggaggccaagatgtgaggatcatctgaggtcaaaagttcgagaccagcctggccaacatggtgaaaccctgtctctactaaaaatacaaaaattagccggatgtggtggcgggtgcctgtaatcccagctactcgggaggctgagacagaagaatcgcttgaacccgggaggcggaggttgcagtgagcagagattgcgccactgcactccaacctggtgacagagatgccgtctaaaaaaaaaaaatgcaaggattactgtgaaatccgtatgttaatgtaaaatattacttgtgcgtttagaagacaaagtgattcctttttccagaaaaggcaaaacggcccaagggagcgtgagagccgtggatctgaccaacctggtttagtgtcctgtgccgtctcccagctgcaggacctgagaaaacgtacttgaaaactcgtcaagcttcggcttcctgaccacacaaggtcacaccttctcagaagttgcggggaggctcacacatcactaccgcgccgggcacacagcaggcgccggctccagccctcctgctcccgcccgcggagcctccagcgctcagtcgaggtcacagcgagctgaactgaacccaaggcccgcaccaaacccacaggcacttgggggcggagcacccgcaggcgcggctcccggcgcgcggcccagtttcctccacatgcagatgaaaatcacgacccaaacgtcctcatggtggaaatcagaagacgcgcagggaaaacagggacgcggaaactgccgggaagcgcaggggctgacaagcagcctggcccaggccgtcccacgagcgctctcccgcgggagtagcgtttccgaggccgccagcgagtcagaggaaggcagggcgcatccgccctccagcaagaacgcgatgcactcgggcgcgacgacggtccaggcagttcccaggaggctgggataccagcccggccgcccctccttccccgcggctccccgccccgcctccggccctgagtggcgagtggctcggccagaacccggacgtcctcacctgagcggggcccacagcatagcacctgcgggcggggcggccctggagccccgcagccgcgcgcgccgcccgccagcaaagcccacgcgccgcgccgagcgcagccacacagccccacgcagccatccggccgtcgccgtgcgcacgtgcacggcgtgcggccccccccccccgcgagtccgtccgctgcacagccaatcagcggtcggcgcgcgcggcatcacgggagttgtagtcctgtaagcgcgcggagcccgtcgggcgcctatggaactcgacccgcaggccaaaggggctccgttgcaaggaagaagtgcggggtcccgccgcctcctagaccgagatcgcggtgagctggccgcggcgcacaatgggcacggcctgggcggcggcgtccgtactatcgccctgtgcctgcggatcccggtaacattgcgcggcaggccccaggccggcctccctcagcttcgcgg

SEQ ID NO: 27730 - DNA, 2300 bp, Homo sapien
accatgttggccaggctggtcacgaactcctgacctcagatgatccacctacctcggcctcccaaagtgctgggattacaggcatgagccactgtgaccggcctttttttcttctttcttttttttttttttttgagatagagtctcactctgttgcccaggctcgagtacagtggcacgctctcagctcactgcaacctccacctcccaggttcaagcgattctcctgcctcagcttcccaagtagctgggattacaggtgcatgacgagctaatttttgtatttttagtagagacgggtttcgccatgttggccaggctggtcttgaactcctgatctcagatgatccgcctgacttggcctcccaaagtgctgggattacaggtgtgagccaccgcgcctggctatgcttttgaggagccgattgtcaaaaaaaactgtgggcatgtttaaaagccatcataccaagaaatttctaatgactaaatcagtttctaggtagtttaatagaaggaagggattaggaacattgcaatcctagagagctatgtcccctggcagggtttaagtgtcgggctattgtgagtttgactgacttgaattagtcttccaaattctgattagctgtagttgaactgaattaagatcttgcccttcaaagctgaggaccaaaggacaccgctaactacttcttcattttattattattattattatttttttttttttcaagacggagtctcactccgtcacccaggctggagtgcattggcgcaatctcggctcactgcaacttctgctgcctgggttcaagcgattctcctgcctcagcctcccgagtagctgggacttgaggcgcctgccaccgcgcctggctaatttttgcagttttcagcagagacggggtttcaccatcttggctaggtggtcttgaacccctgacctcctgatccactcgcctcagtctcccaaagtgctgggattacaggtgtgagccaccgcacccggccctattttattatttttaaaatagagaaggggtctccctatgttgcccaggctggtctggaactcctggactcaagttttcctcccaccttgaccttccaaagttctgggattacaggggtgagccaccgcaccctggcctgctaatgtgtgagctagtgcagtctctgtccatatcctcgactccctctctgctagtgctaagtacattgtagggtcccgcgtttttagcatagctatacctatgaatgggccaaagaatctgagggcatcctacacatttcaaacggtgggaatggagacctctttcctccagcagaatctcccctcatgaccgggggactaccagatccagctctgctaagggcctccacggacggagtcggctacctctccactttcagtgaccgaaatccattctttgttcattcacccttgtgtctactccgggaaacgcgcagcggacacagtcgtgttccctaagtgtttgctgacttagtcatctggccctctctggagtagtcattttgtaccttgtactacattcgtgcctctacctctccgcagtgcgcgcgggggcggactcacgtgcgcagtctccctatgcgctgggagggcgtcagcaggtttacagaaacaatgaaagacttaacaattggcgcgcgacgagcgtcccttgactggcaggggcccagaggacctgaacatcactaagggtctgccccagcggcccggccctgaagtcaaggttgagacccccggcccagacagtccgcgaagctgagggaggccggcctggggcctgccgcgcaatgttaccgggatccgcaggcacagggcgatagtacggacgccgccgcccaggccgtgcccattgtgcgccgcggccagctcaccgcgatctcggtctaggaggcggcgggaccccgcacttcttccttgcaacggagcccctttggcctgcgggtcgagttccataggcgcccgacgggctccgcgcgcttacaggactacaactcccgtgatgccgcgcgcgccgaccgctgattggctgtgcagcggacggactcgcggggggggggggccgcacgccgtgcacgtgcgcacggcgacggccggatggctgcgtggggctgtgtggctgcgctcggcgcggcgcgtgggctttgctggcgggcggcgcgcgcggctgcggggctccagggccgccccgcccgcaggtgctatgctgtgggccccgctcaggtgaggacgtccgggttctggccgagccactcgccactcagggccg

SEQ ID NO: 27731 - DNA, 2300 bp, Homo sapien
gctcactgcaagctccacctcccgggttcacaccattctcctgcctcagcctcccgagtagttgggactacaggtgcctgccaccacgcccggctaattttttgtatttttagtagagacggggtttcaccgtgttagccaggatggtctcgatctcctgaccttgtgatctgcccgcctcggcctcccaaagtgctgggattacaggcgtgagccaccgtgcccggcctccctgagttactttcttctatacatgggtcaggatgttggaaggtcacccttccacccctgccccccagctatggcaaggagcgttgaggccgagggtgagggtggatgggctcagtgacagagtgttcagcctgggaggtgcctaatcttttctataaatgtcacctgcctatgaatcagggccacacattccatctcagactgggtcaccatcccagcttactgaccaggaccccagccccagtccactgcagccctagcacacatatctctggcaagccttggaagcacctcattcatcacctctttttcccaatgcctgggcacagccataaaggggcctgagagtttgggagtcaaaatcttgttaccctcagcccagaattaacatggccatgtcctgcacctgactttttctaagcaggagagacaggtgggcttgataacatgaaagaacttgtcccaaaatccgtgcagtgtgtaagcttgccactggagccctcgggcctgtctctgcctgtcgcttcgccttgtcattctcatagtgccccttgcctttgccttccttgccacgtgcagagtttatgttcaggataggaccaagtgtcaggtattgatgccacagagggaatgagctcaccttttagcattctctgttctccctgtggttcttgccttcagaagggacctggggagtcagggaggaacggtcccgagatggcatgggcacctgaactctcattacaacagaggcgccagttattctgctcatctgcgggggatgggaaggtgcagtaggggtctctagtatggggctggtggggaaagaggctgttggagttttaggaataaatcactttcggaggccaaggcgggaggattgtttaaggccaggagttgagaccagcctgggcaacataaggagaccccatttccaaaaaatattagcctggcacagtggcgtgtgcctgtagtcccagctactcaggaaactaatgtggaaggattgcaccagtgcactccagcctgggcgacagtgagaacttgtctcttaaaaaaaaaaaaaaaaagaggccaggtgcagtggctcgtgcctgtaatcccagcactttgggaggccaaggtgggcggatcacttgaggtcaggtgttcaagaccagcctggccaacatggtaaaactggagcccatggtgaaaacttgtctctactaaaaatgcaaaaattagccaggtgtggtggcgcacgtctgtaatcccagctactctggaggctgaggcaggagaatcgcttgaacccaggaggtggaggttgcagtgagttgagatcgtgccactgcactccagcctgggtgacagagtcagactccatgtcaaaaaaaaggcaaggtatggtggctcatacctgtaatcccagcactttgggaggtggaggcagaagaattacttgaggccaggagttctagaccagcctgagtgacatagtgagaccgtgtctagaaaaaaaaaattcgctgggcatggtgatgcaagcctgtgatcccagctacttggaggctgaggtgggaggattgcttgaggtcaaggctgcagtgaactttgatcgcgccactgcactccatcctgagcgacagagaccctgtcacacacacacaaaaggaacccaggctttcctgcttaaatctaaatcattgaaaaagagacaagggacatatgagaataaaaatgtcagctttattactgctaaaagcttgttggagaacaccacttatttgggagacaacacggacttgctgatgctgccgttggtgtccttggcacaggtataaagcccagccctccgtgctgcagggacaggcagaacacagacttctggtggaccagctggctcctaaagaggagaggggactaaatcatgtatgcttggttctttcttcccagcttctctcaggtaactcacgtttcctcttccccaggtagagagaggccaggagtattattaacagaagtcccattttcagggaaacatgactagtaggaaatatgtatcccttccctacagagaactccac

SEQ ID NO: 27732 - DNA, 2300 bp, Homo sapien
atcttgctgacttaatcagcaagaggccatatggttactgggtccagccgacccatcagggacttgggtgacctgtggccctttgcaggtgtgcagtggacagagagctgcccctgagctgcatccatgtctacacccccgacagagatgcagggagagctgggaacaaggccacctggcctcctctaaacgcagacaaataaaactgttcccgtgggtcctctgaccccatctacttttcagagactacaggtgcccccagagccagcaagggtctttgataagaatggatttgggctacatatctctcagggatcacaatggcctggtcagggtggggtcaggagggcaggggtgcctcaggtttgggaaacgggacctgcacacttggggctggcccagccctgcacggagggtgtgctctggggtttgtgctctgtcggtgctgggcactgtctcctggcttctctgtctgtctcacagatccaaagatgtggctgtcatcgcagaatccatccgaatggccatggggctccgaatcaagttccccacggtggtggcagggtttgacctggtaacccatgctgtgaacagaagggctgcctgttaagggggcatgcgaggatgcctgtctgggtggagcggcaactccctgggaagggagcgcaatgtgcctgttggtaccctgacatcccagggcaggctcaggctgctgacacagcagggctgctcagagctcagcgctgaccctcttcagaggcctacaggggacggctgtcactggagaagggagagcagacagccagttctaacaagctaacaaggaaagttccagaataaggatggcattcagggagtttggaccacagttatgggctcattccccatggccctgcctgtgcccttttttctatcccacactgctcacctaggtgtgggtcttaaaaccctcaccagcccctgtagcacgcggggtggggactggggggtaatgtctggaaacagagtccaggatggagccaggcctttgcaaatcctcaaggtagtgatatttgtccctccctctccagccatcatgcctggccacaccagtttttgaagctacacattcataggtgttgtcattgtcccacacctccccaccaaatcgaagcacaaccaggacatttcttaggtgacagctcggcaatctcataaagaatctaggccgggtgcagtggctcatgccctcagcactttgggagggcgagacaggtggatcacctgaggtctgaagttcaagaccagcctggccaacatggagaaaccgcatctctactaaaaacacaaaaattagccagccttggtggcctgcacctgtaatcccagctacttgggaggctgaggcagaatcacttgaactcaggaggcagaggttgcagtgagctgagattgcaccattgcactccagcctgggcgacagagcaagactccatctcaaaaaaaaaaaaaaaaaagaatctagattagtccagggcagtggctcactcctgtaatcccagcaccttggggggccaaggtgggagggtcacctgagtccaggagttctagaccagcctgagcaaatcggtgagaccccgtctttacaaaatatatatatatatatattttttgctcttggccaggctgtagtgcattggtgtgatctcagctcactgcaagttctgcctcctgggttcatgccattctcctgcctcagcctcccaagtagctgggactacaggcacccgctaccacacctggataattttttgtatttttagtagagatggggtttcactgtgttagccaggatggtctcgatctcctgacttcgtgatctgcctgcctcggcctcccaaagtgctgggattacaggtgtgagccaccacgcctggcctgctcctggtcattcttaaaaggctgtgtgacaaaggtcccggcagtggtggcagggtacaaggaagggtgtgcacaggctccagggcgcgccatcagcaagtgaggcatgcgccctgcagacacctccctgtccctctctgtcctgcaggtggggcatgaggacactggccactccttgcatgactacaaggaagctctgatgatccccgccaaggatggcgttaagctgccttacttcttccacgccggagaaacaggtgagcctgcgggatgcgagcagaggcagcggaggtggtcaatgggagagctcctggccacaggcccatgcctcagggttagagcctacaggcgtttccagagccctttcctgtgctctatct

SEQ ID NO: 27733 - DNA, 2300 bp, Homo sapien
catgcccggccttttccttagatatgttaatacccttggtgagtttagcggcaaggctggatcctggagagtccgatctcttgtgtgatctgcatgtctccacttggatctgttgcttgttttctattttaactctctgagtgcagagttatatttccatttctgagttcttgagaagtgggaggggaacattaactttgccttgcagtggagctttcatcagttttgtggacagagcagacagacaagacacaggacacaaatcatccttttaaaagaaaagagagggtctcatcttttattgagaaaagaatttctgaaaagggaggcgctggcaaaaattgatgagctgactttgctcctggcctaggtaggctggaagaaactgcacttcccagagcaggtgattcttgtgtttgtttgtttgttgtttttgagacattctgtgttgcccaggctggagtaaagtggcgtgatcttggcgcattgtaacctccgcctcccggattcaagtgattctcctgcctcagcctcccgagtagctgggattacaggtgtacaccaccgcactcagctaatttttgtatttttagaagagatgagatttcaccatattggccaggctggtttcgaactcacgacctcaagtgatccacccaccttggcatcccaaagtgctgggattacaggcgtgagccaccgcgcctggcgagatggggttttaccatattgcccaggctggtctggaactcctgagctcaggcaaatacacccacgtcggcctcccaaagtactaggattacagacgcgagccatgcccagctattaattcatcttattgatgtcgaaactaaagcctggaaaggtcaaagagcttgatgaaggtcaaataggtagtaaggggtggctggacccagaccagggctcctaagttcgtcgctttcctcaccgcgctgggctctctgagcgtcctaatagccacgcccacctcaaatggcgatcccagagagcatctggcttcaattttcctttttccggaggggagatggattccctggaatggaactgggctctggtaggggagaacttcctgttgggcaaatcctgacaactgtcttggtgtgggagtgcatagggaactccgaccctcgcagaaccctgggatcttcgtgggtggaggggaagaggatagaggaggggagggaggagacgctgagacagaggctttcatcttgagcctggtggggaggcatgtgggagaagttgctgagcggttggatcggagggaggaagagaagggccagagcactggcttcctgttccatcttcccccttgttctgcaggtggccattttctccttccagagccggaggtggagagacttgggggcctgcccagctccagtcctctgtcctcactctgcccgtctccgcccgtcccccagccaacctttggagaaggtgctgggctgctaggatttgggattctggtggagggggagggggaggggatgtgcccatttgttcgggtctgaccctggaacaaaggcttttgccacggagagtctaggtcttaatgccccccattagccagagttggggggccaccaacacattaacaactaaaaacagtcttcactagaatccttttgctgagccccctcgcctccccctgcctggtcgcaggctaattccggcctgggctgctgtggacggactatcctggccgctgagcctcccattgtgttcctaatgctcagtaacaaaggctgctcgccggtagcaacggtcgctaggcgggtcttatctcctgggctccggccccttcccccacggcagagtctgaggcccagactgggtcccctgagtctttagcatggggctcttccaagaccccggagggttatccacaggggatggccctgctggcacttatggaggggagagcttatgggagacacgtcggtggcagagaacctgtgacagtcgttcccagacgttttctaagacgttgtcgttcatacagtaagcatttctagtgctccctgtacccgcgctccccagcccccatgcttttgcctggattcttagcagacctttcattcaaaattccatttggctccttgctgaatgaagcgaaccctgtgtcatgttgctggtgtcgctttacgagaacacgcaccctcttaactgctccctttttgacaggactcatccgactatgctgtcattgtgctatttacttgtctgtcgattggaacagtggcagatcttcagcccagctgtatatcgcaccctag

SEQ ID NO: 27734 - DNA, 2300 bp, Homo sapien
agagcagccctaggtgctcaaatactgctagagttttatttcagtgagtttattggagagaactttcctgaggatgtttttgttgggctgagggagatggggtattgtgggagtgggcaggatccttgggtgttttatgtggtgagctcagacgggtttgagctggttaaaggttatcagtggcttggggaaagtgacctttggtagagtcttctccacattgtatccaagagagtctgctcgttcatttacatattgatcggatacacaaatgccttggggactgacagttaagcttgtggaaaggcccacatggtggcagtattttagttttgttagcatattctgtaggcttttatacgctccgaagtttactgtttgtagacccagaagtgataggactccgcaggatcaatacacactgaacaaattcataagggatagatgtgtaaacaagaaagtcagaatgctgttatcattcggaccagacacttatgcttcatcaggaaattctcctcttttcttttctttcttcttcttcttttttttttttgacagaatttctgtcgcccaggctggagtgtagtggtatgatcttgcctcactgcaacctccacctcccaggttcaagcgattctcgtgcctcagcctcccgagtagctgggactacagatgcacaccaccatgcctggctaattttttgtattttcagtaaatggggtttcaccatgttggccaggttagtcttgaactcctgacctcagctgatccactcgttattcaagttattccagtttgtgggtctcaactctccctttgcttggcatcctggactgacccacctttttccttagatatgttttttttttttttgaggcagagtttcgctcttgttgcccaggctggagtgcaatggcaccatcttggtttactgcaacctccgcctcctgggttcaagggaacctcctgcctcagcctctggaatagctgggattacaggcgtgcaccaccacacccagctaatttttgtattattagtagagacagggttttaccatgttggctaggctggtcttgcactcctgacctcaggtgatccacccacctcggcctcccaaagattacgagccaccatgcccggccttttccttagatatgttaatacccttggtgagtttagcggcaaggctggatcctggagagtccgatctcttgtgtgatctgcatgtctccacttggatctgttgcttgttttctattttaactctctgagtgcagagttatatttccatttctgagttcttgagaagtgggaggggaacattaactttgccttgcagtggagctttcatcagttttgtggacagagcagacagacaagacacaggacacaaatcatccttttaaaagaaaagagagggtctcatcttttattgagaaaagaatttctgaaaagggaggcgctggcaaaaattgatgagctgactttgctcctggcctaggtaggctggaagaaactgcacttcccagagcaggtgattcttgtgtttgtttgtttgttgtttttgagacattctgtgttgcccaggctggagtaaagtggcgtgatcttggcgcattgtaacctccgcctcccggattcaagtgattctcctgcctcagcctcccgagtagctgggattacaggtgtacaccaccgcactcagctaatttttgtatttttagaagagatgagatttcaccatattggccaggctggtttcgaactcacgacctcaagtgatccacccaccttggcatcccaaagtgctgggattacaggcgtgagccaccgcgcctggcgagatggggttttaccatattgcccaggctggtctggaactcctgagctcaggcaaatacacccacgtcggcctcccaaagtactaggattacagacgcgagccatgcccagctattaattcatcttattgatgtcgaaactaaagcctggaaaggtcaaagagcttgatgaaggtcaaataggtagtaaggggtggctggacccagaccagggctcctaagttcgtcgctttcctcaccgcgctgggctctctgagcgtcctaatagccacgcccacctcaaatggcgatcccagagagcatctggcttcaattttcctttttccggaggggagatggattccctggaatggaactgggctctggtaggggagaacttcctgttgggcaaatcctgacaactgtcttggtgtgggagtgcatagggaactccgaccctcgcagaaccctgggatctt

SEQ ID NO: 27735 - DNA, 2300 bp, Homo sapien
tctgttaattgtttctttgctatttaattaattaattaattaatttttttttcctctttttttgagacggagtctcactctgttggcaggctggagtgcagtggcacgatcttggctcactgcaacctccgcctcccggattcaagcaattctcctgcctcaggctcctgagtagctgggactacaggtgcatgccaccacgcccagctaatttttgtattttcagtagagacggggtttcaccatgttggccaggatgctctcgatctcttgacctcgtgatccgtccacctcagcctcccaaagtgctgggattacaggggtgagccactgcgcctggccaattcatttatttattagagaggatatgacattgttacccaggttggattgcagtggcgcaattttggctcattgcatcctcgatttcccaggctcaggtgaacttcccacctcagcctccccagtagctgggactataggtgtgcacaaccacgcccagctaatttttgtatcttttgtagagatggagtttcaacatgttgctgagaatggtcttgaattcctgggcttgagcaatccacctgctgtgccagcacctggtcttattttaattttatttatttattttgagattgagtcttgctctgtcgcccaggctggagtgcagtggcgcgaactcagcttattctaacctctgcctcctgggttcaagtgattctcctgtctcagcctcccaaacagctgggactacaggcatgcgtcaccatgcccagctaatttttgtatttttagtaggacgggttttcatcatattggccaggctggtctcaaactcctgacctcgtgatccacccgcctcggcctcctgaagtgttgggattacaggcgtgagccaccgcgcccagccgtatttttattttttaataaaaaaatattttttttagagacaaggtcttgatctgttgccaaggctggagtgcagtggtgaggtcaaagctcattgcagcctcaaagtactgggctcaagtgatgctcccgcttcagcctcctgaatagctgggaccacaggcatgctggttatatttaaaagtaaaacactggctggacatgttggctcatgcctgtagtcccagcactttgggaggctgagatgagtggatcacttgaggctaggagttcaagaccagcctggccaatatggtctctattaaaaatacaaaaattagctgggtatggtgacgcgtgcctgtagtcccagccacttgggaggctgaggcacgagaatcgcttaaaccctggaggcggaggttgtagagggccaagatcacgtcactgcagtccagcctgggtgacagagcaagactctgtcttaaaaaaaacaaaaattaaaataaataaaataaaataaaagtgaaccactaaaaatcagattgcagtgtctttatgcatgagccagggcttgtttgacctcatggtgacctttaatttgggaaaacctgccgggcgcggtgactcatgcctgtaatcccagcactttgggagactgaggctggcggatcacctgaggtcaggagttcgagaccagcctgaccaacatggagaaaccccgtctctactaaaaatacaaaattagccgggcgtggtgatgcatgcctgtaatcccagctatttgggaggctgaggcaggagaagcacttgaacccgggaggcggaggttgcagtgagccgagatcacaccattacactccagcctaggcaacaagagtgaaactccatctcaaaaaaaaaaaaaaatgccaggtggtgcagtggctcacgcctgtaatcccagcactttgggaggcccaggcgggcagatcacgaggtcaggagatcgtgaccatcctgtctaacacagtgaaaccccgtctctactaaaaatacaaaaaattagccgggcatggtggcgggcacctgtagtcccagctactcgggaggctgaggcaggagaatggtgtgaacccaggaggcggagctcgcagtgagccgagattgcaccaccgtgctccagcctgggcagcagagcgagactccgtctcaaaaaaaaaaaaaaaaaaattgggaaacccctacctgtctgtacctgtaggtcttttctctggggtctggaagaagaatccttcaatatcttgccttctggtaatctgagagcagggcgagaaaaggaagatcagagttccacccttaaatctgtaggttttcactcccccactctcctttgcagtcccgtggagtctccatctgagccctttcctagt

SEQ ID NO: 27736 - DNA, 2300 bp, Homo sapien
gctgctcagccaggagctttcttgattttgtgtttttcaaatgagaagcatcttaccagctaagtaagtctaagagtgtcatgactcatggaccttggaaaccaatggtcagtagtttgggattctttgggtggatcaagagattttcttggggacctaggagcacctcgatgtgtggagggcctgagcagatggactagtgccctcctctggatggaattggaggttccccttacgccccaatccctccacccctgccctggggcttttttttttttttctttttttgcttggtggaatgggagagtacttttcaaagttacagttacatagaaaagttaaaatcacagcactattgcatatctgagtgccaagaattacgtttgtcttgctgcaggtgagggaaatgaggtcacttctcaagaagtttgcattttctgagaaaatgtggacacaatggaaaagccaaggcataaaaccatacacctgagaaggctgaagcaaattgctccaggacttacagcacagtgggtacgtgttccgcaggtgagaggcagcctctgcagaggctgacaagtcctttttggatgacactgtgactcagccctcatattcccctctccagggcgatgatccacctggtgctgtggctgctgagattctagtcatcctactcgctctaggctggtgtgattcttttgtttgtttgtttgtttgagataagtctcgctctgacgcccaggctggaatgcaatggtttgatctcagctcactgcagcctctgccttccgggtccaagcgattcttgtgcctcaggctcctgagtactgggactataggcgcccaacaacacaactggctaatttttgaatttttagtagagacgggtttcaccatattggccaggctggtttcgaactcctgacctcaagtgatccgcccacctcggcctccccaagtcctgggactacagacctgagccactgcgcctggcctagactggtgtcattctgacatttccaggccacgaagcagtcccagactcagcagccctgggcatctgccgtagccctgttgtatgatctgctctgccactcatgaggcatgactcaccctcctaccctctccgagcctcagtttactcatttaaatctcaaagcctccacagataattgggaaatgaaaggaaaatcgtgtaagtatgaataccttccacagatagcgggatctcattaatactagttttcccctttccatacctcccagcaaagaaaagttggtaactgcaggcctctgaactagtgccccacatcggagataccggccacttcttactgaacatttgcctgtgtctactataaggatataagatcatctcaacctcccaagaagccgatattagcacccccatttttgcagctaaagaaacttaggtgcagaaaaatgaaatagcatattcaaggtcacagaatgacctggggcagagctacagtctagacccccatctgtctgatataaaccccattctatgaaccctcaacattgctactccccttccaacgccactggagcagaaagctccaaaactgggtgaagcacatacagctctatagcaggcaaccccattcctgtgttccacctagtgaagaaccaggaggttgtgcatgaccaaggtggttcagggtgaaggtcaggggctggctgaaaatggaaggcatctcaggctgggtctttgactgtgattatgtcagggttggggctgaaatattgtgagtggtaactgaggtttcaacctcttccctaggaaagagtgggggtggggtggtgaagctggttaattgagatgggagggttggggtgggggcaggcagagccttccaaggccttcagatccggtgctgttaccgtaaacaagtgcaaccctcagctccctggagggcctggggagcaaatgcgtgcatccctgcttcgttcccagcagctgttcactggaggacgcagcctgccatccccagccgacctcctccacagccttccccagcccccagatcaagcctcaggaagtggcgctgctgagaatctctcctccagccctgcctcctgccgagagtgtcttcagcgccagcatttcctggcctaattaagctgggtaatgagtagctaagaggaggggataaaagccctaggcggcttagagctgggacagtttatgacaggggcgtctgcagctggtgacattcctaggaaaattatttctcataaccctgggaagttgcatgctgtttccttagcagcagagt

SEQ ID NO: 27737 - DNA, 2300 bp, Homo sapien
gtcttgctgtgtggcccaggctggtctcaaactcctgggctcagtgatcctcctacctcagcctcccaagtgtctgggactgtaggcatgcaccaccacacccggctagtttctacatctttaaattgagagaatggaaatacgtgatctgtagtttcatttccggctctagctgattctgacttacctatcaaatgagattggcctgggagttttggctttgaagattttgcttctgttgtaagtcactgggaggcttgcccagtgcccagcttaaaacatgagccattcaagtcttccctcgcctcggctggcctttacttgtggcagatcttgaattcctatttctccgttctctcatttagtaagtcctttagaaccttcctcttgtgctgttgcttgggctaacatctcccctcccaccctctaccactagaattccttgtatatacacagcagctagattagtctcactttgcctctctatagaaataaactgaggtagatctccattgtctcccgaagaaaggccaaactcattagctgggtattcaggatcgcctgtcaatctcagctcacattactccccttcacataatctaaagaatagttaaactgaacctaatatcctcctgcacctggtcatgccctgcctctctccattgtcactcggtcacaattaccatctcacgaaatctcccaggcttccacagcagaagtaacccttttcttctcagctcccatagcgtgttttctgtacctgctagtactgattgatttgtgttttttgtttgtttgagacagtgtctcactctgtcgcccaggctggagtacgctggcacgatctcatttcactgcaatctctgcctcctggtttcaagcgattcttgtgtctcagccttagtagctgggatcacaggtgcgtgccaccatgcctggctaatttttgtatttgtagtagagacagggtatgaccatgttggctagactggtctcaatctcttgacctcaagtgagccaccatgcctggccagagccgtattatttctatataagaaggaaaccccaccccgttttgtgtctgctatcatgtaattgctgttaagatcacaacttgcatcttatgcacatctcgtacttttcagaaccgttaataagattgtcagaagtttggtttttctggggattactgatctggttatgagcaagtcaaaccatagggagcagactcttgggaaatggtttgcatgcagaagattgcatcctggttgaaagaatgtgggcaaacttttctagtaggagacttgatggcctagaaaacattctgtcatctaagaaaatacctgcttattttgggggtgttgggaagggaaataggatctcctaaagttccccaccaccactttttgtccagtggtccctttccaaacaattgcttgttggaataccgtgtcgaggcaagctgaaccccaaggaaagcaaagacattcacagagacgttacctcattctgtttagatgatgtaagattagccttggatctcgcaatcacctttcatcagccatgtaggtgtggcatcccaaaataaaaattgtcattatcacttactaacaaatgccattcaaaatacagtggttctttaaagctgttgcagatggtttatctcttgagaaggttgagtaaatgacaaatgtttcataaacaattacatgagcactcctttcctctcttttgcgattaaaatagcagtacagcacatttgtatttatactcgattatatataatcaaagagttaagctctttaattatgcagctagcattgatttatcaaaaagagttatgtgtgtttcttctcatgtgccggtaagaggaatggggttggggagggagtagtgagagaaataaaaccctgggaaaaagaaaacgcggaatccggttgctcttctcacagtagccagaaggaagggcagagctgatctctggcaagtccttccgctgctgggaccattcagttcttggggcttgtgctggcggtaggaaggggtgtgtattttaagaaatctctgtttgatttctcaacttccctctctccctccctcaggagttagaagccgctcttcacagagatgacgtggagtttatcagtgacctgattgcctgcctgcttcagggctgctatcaacgaagagatatcacgtgagtaattctgatctttctaagcatttcttgccccaagaactaattaaccaaccatagtgatgtttcctgtctcctgtgacaaaccagaaccgatcattag

SEQ ID NO: 27738 - DNA, 2300 bp, Homo sapien
atggtggtgcaggcctgtaagttcagccacttgggagtctgggtcatgagagtcacttgaacccaggaggcggaggttgcagtgagccaagatcacgccactgcactccagcctgggcatcagagtgagactctgcctcaaaaaaaaaaaaaaaaaaaaagattattttatatagatatatacacacacttacacactattgtatattgtagtcttagttaagaccttatttttaggtcgaatagtaagttaaagaattctgagaatgtaaacaagcataggagtctaattaatttgattgggcttagtaaatttccataatatgttaaaaatgcctcttttttttttgagatggagtctcactctgtcgcccaggctggagtacagtggcacaatcttggctcactacaatctccgcctcctgggttcacgccattctcctgcctcagcctcccgaatagctgggactgcaggtgccggccaccacacccagctaattttttatattttttagtagagacggggtttcaccgtgttagccaggatggtctcaatctcctgacctcgtgatctgcccgcctcggcctcccaaaatgctgggattacaggcgtgagccaccgtgcccggcccctaaagatgccttttgagtttcatgttgtaggcgtcttgtcttcaagacatgcagacaaaatgaatgtattcattcaacaaagtgattgagtctgtgtgcatgaactgagaggacagtgagacggagaagtccctcctgtggagcttttattctcgtggagcagaaaccaggcatttggccttcctgagcgcccgtcatgccctgttctttctggttgcatcccattttagagcttcccagcatggccagtgattctgatgacaaccatcccctcccagtgtgtttcacgtgcatctgcctagagtccgtgagccacaagccgtctctcagcctcttacgaatcgggcaacccacggttaaggacatttccattctccggcccactgtaagagtgaatgtagaggtgctaggttttacctttgtgtccgtgaaaggagtgaaaggaagtgtacagggaccccaatgtcctgccctctttcagggactcaaacaatttccaggtggggcttgaatcaccacacatccaccttaatctgactcaggcatgttcttcacattaatactgtcatttcagctactgagttattttttctcctcttttttttttttttttgcagcagagccgttgcctggccttgaagagaaaccaccaggtgttggtacttcagagggggtctacctcacacaactacctcaccccacacctcccctgcagactgactgcaccaggcagagctcaccacaagaaagggaaacagtgggcccggagctcaaaagcagctcctccgaatctgcggacaactgtaaagcaatgaagggcaagaatccctggccctcggatagcagctaccccggcccagccgcccaagggtgcgtgagagacctctccacggtggcagacaggggcgctctatccgagaacggagtcattggggaagcatctccttgtggatcggaggggaagggccttggtagcagtggttccgaaaagctgctctgccccagaggcagaacgttgcaggaaaccatgccatgcacgggacagaacgcagcgacaccgcccagcacagaccccggtttgacgggaggcactgtgagccagtttcccccgctgtatatgcctggcctagagtacccgaattcagctgcccattaccacatcagtccaggcctgcagggtgtgggccctgtgatgggagggaagtccccagcatcccatccccagcattttcccccaaggggctttcagtctaaccacccacattctggaggctttccccggtatcgccccccacaaggaatgaggtattcctaccacccaccgccacagccttcctaccaccactatcagcgaactccttactatgcctgtccacagagcttttctgactggcagagacctctccatccccagggaagcccaagcggacccccagccagtcagcctcccccaccaaggtccctcttctcagataagaatgccatggccagtctgcaaggctgtgagacactgaatgctgccttaacttctccaacccgtatggatgcagtggctgctaaagtcccaaatgacgggcagaatcctggtccagaggaagagaagctggatgaatctatggagaggccagagagtcccaaagaatttttagacctggacaaccataacgc

SEQ ID NO: 27739 - DNA, 2300 bp, Homo sapien
tatattttagtatcaataaagaattgcacaggtttgaataggaaaaatgtattctatagatttacagtttgaatttaggaatatttcagtatatatagtttttattcgttttaagtgaatcatagtaaaatcagtcatggtgatttaaaatagctatcaagaacaagttcttggaattatctgttgtatctgtgataggaaaccattttacagtattaaattactttattacagttgtagagttgaattacactggattctccctcgttagcattctgtatttgattttagctgaaaggtcaccaaagttaggacccatgttttaaacttttgaatattccacaaaagaaaaaactaaggaaaatactgaaattacaggtctttgtaaagaatagcatatttttaagcatgcttttgggatagtagaagagtctctatgaaatattaatctgccctagtttcttataaattcagctgtgggaggggccagtagagtgtttccctccaattccaggattcctagtgaagcatggaactgtcgtgtttacagtttgctaaacatatgctgtccgtggaaaaggaagctaatcggaagcatccatgatacagagaaatgaaagccaagacaccagttccaggatgatggaagttcatatccgtacgcaaatgctgaacctggtgctgctgcctagggctcaggcagatttgagagttgagtagggaacacaggtgcctctaaggtataatgcacaaaaatacagattttctctcagagaggttttaattttaaatttgatgtatttgcaagtggattgagttttgagcctgtgttctcactggatcctaattcttgttagaaacctatcactggcataacctggtttagaagagtgaagaggacagaaggattgtggatgggtctgccctttagctagtatccgctaacatggggcattactacttcagtttctgtgtttgtgcagaagcagggaggaggtaaaaagctagtttggagctggttagacctggtctaggcccagagaatttggccactgacagcctttctcttttcctggtaatgctggtttgaatcagaggcctctcacttctccttaacaggagcactgacactgtgggcctctccccatgactaccccaggggcctgggtgggagtggctgtaagcagcagttgggccattgccccctttccttctgccctcgtggtccttgagcagttgtgtgcacactcttccaggtaatcctgtctcctctctctcccagtgaccgccccaatcagctgttgctagagcgatgctgtgaacgatacaggaaaagtcagtaaatccctttatccttaatctcccttcttggttttcgacagaaaatattaaggaagagcaataggaaatagaactactgtattataacactgtgaacaagaacatcagcagcagcagaattgtcagccttcctgcgtcctgtgtgggaatgtgtccatgccttataggtactagtgcttcgtccattgtccagggagtgtcctgagctttcactggtctttgaagtgcagatctgctataagctgtctggagctgcaaggttgcaggaatccacaggagcgtgagctgctgtgaacccctagcccacccatccccaagcaggatcttcttctcaccttttcttcctcctctagcacttctctttccaagtgtcttaagcagatgcaatgtcttaaagcagatgcaaatgcatttgccatcttctccattaggaaaatgatggttatgtgatatgttatatttaggaagtagtgtgtaaggtatcctgaaaaggtttgctctcaagctagaaggacatttcaccctgtgggtcactgtcaccttgtcagcgtgccggctctcagtggtccccaggaggatggggatagctgagatcgtggagaatgggaaataccattgcatctctttgatttaacactcatggctcacctttagtagagttgttaataagttagaaacttgtgtccctaaggcccaagagaaaagatgagcttcttgggaggattctgggtttgttttcccctcagaattaaaaaatagtttttaattcagctactttttcccctcagttaaaaggtagcaggagctattggctgaaatttgttacagtgaatgaatgtggagaataaataagaacaaaccctgtaggattcttgttgacgtaactttccatcccacctctccgcctctccatcaccagccttcatcaggttggtttagtttacctggccgtacacacg

SEQ ID NO: 27740 - DNA, 2300 bp, Homo sapien
gcagccaccctgtccgggagggaggtggggggtcagccccccgcccggccagccgccccgtccgggaggtgaggggcgcctctgcccggccgcccctactgggaagtgaggagcccctctgcccggccaccaccccgtctgggaggtgtgcccaacagctcattgagaacgggccatgatgacagtggcagttttgtggaatagaaaggcgggaaaggtggggaaaagattgagaaatcggatggttgccgtgtctgtgtagaaagaagtagacatgggagacttttcattttgttctgcactaagaaaaattcttctgccttgggatcctgttgatcggtgaccttacccccaaccctgtgctctctgaaacatgtgctgtgtccactcagggttaaatggattaagggcggtgcaagatgtgctttgttaaacagacgcttgaaggcagcatgctcgttaagtgtcatcaccactccctaatctcaagtacccagggacacaaacactgcggaaggccgcagggtcctctgcctaggaaaaccagagacctttgttcacttgtttatctgctgaccttccctccactattgtcccatgaccctgccaaatccccctctgtgagaaacacccaagaattatcaataaaaaaataaattaaaaaaaaaaaagaataacaagaaacatctattctctgttttccataccctaagcttggttctaagcaccttatgttcattgacttattaaattctcacaacatgaaaaaaaaaaaaaaagataggctttaatttttcttgagacagggtttcactctgttgcccaggctaggtacagtggcatggtctcagctcactgcagcctcaatctcccgggctcaagcagtcctctcaccacagcctcccaagcagctgggactacaggggcaccccaccacacccagctaattttttgtctcacgatgttgcccaggctggtctagaactgagctcaagtgatctgtctgcctctgcctcccgaagtgctaggaattacaggcgtgagccactgtgcccggcctttattttttataaggaacttagccatttagagtgcttccagatttatcttcttcgggccaaaaccagcaacaaatatatgtaccaaaagttagcatcttccactggttaactgtttcaaaacagtgcagtaggcagtgtaaatgtggctctatttttggaactgttactgtttaacgcttgttaagcatcctgggtaaatatatcttacacagataatcctacacagtgagcttcttaaaataagagcataaaagctactcgggcaagatttagggagacaggaagctatacattgttactgtagattagtctcaaaagttctgatcaactttctattttgacatttggagacatccataggtgcttctcttgttaaagattaatgtctcttgtctctaaaccaattcgtgttactggaaggaaaggcaacgcaagttttataaatcagcccctttgtgggctccattttgctatactctatgttctctgagagtgctaccaacggaattgagaaaataaccatccagacgggctatttgggggctgatctttaccctggaatcttcctggaaggtgaacggcctatgtcatgcagttgttatgcaagaggtatcatgggacctttccttctgggcgctcatggagccgcggcagagccctgggtgacccagcagcagctgcctgctgtgtggctgccttcactgtcctcccccacaactgctgttgatttctctgcattgaccctgcagatgtttccctggcctcgtggtgttcctttggacttttaagggacctctgtgcatctattttagtcccctttctgctagcaatgctcactcccctagtttccttaagcagttttataaaaaaccttcagtgaaaaatactagccaagaaggcgaaggcatctggaaaatccccagatttggctattgtgtgctgcaatcccagcccccttctacagccatgacatgcatatcaatgcaggtgcccttgagactcctgcaggttcgagaaagcatgacatgctcccagaatcctggatttggacttcattctggacagcatatgacaaggacgaggacccctattctagccagttaaagctggacagaatttttaaaagcaatgaagccagttccttggatatatccacgggctttgctttgagaaggaactgagtaggcagtgagaagagtcgagtgaagcctggcccgtgagtgcctcaacaactgagat

SEQ ID NO: 27741 - DNA, 2300 bp, Homo sapien
cttgttagcccaggtttcacagtagatgggactattgtaaacaccagctcctgcagcaggtgctgattttcttaggacttggccctgctgctgtgacattatctctcctgtagcagcctttgggggaggaatcgaggtgcgtgaggagggctctcacagcaaactcagctcctcaagacgattcacttatgaagggatagaatcaaggcttaaaacccagtgtcactaacaagcagatatttccctatggctgtgttcctccacccccacaagtaacagtttgaagagtgacgggggtctgcttctatgccctttttaatgtttggttttgaaatggacgtagaaaagtagatggtgatagcattcactgcagcctatctgctgtacccactgatgaacagatgagattttagccattcacctttatttcagagtgttccttggttacagggaggggtgtgcaagaccctgggctctgggggaggggctgagctgcccagtcagagccggcctcagccccctcagccatccagggattcgaaagggtgcttggtctcaaactaggtgctgactctgagggctttcacggtcccttgaacttctgatcctccttttcctcaaaatcagtgctaggactcataagttatggagtccaagattaacaatgctaaatcctcaagctgactgaagaatgccgagtttgactgtgaaatagaaatgttaaaatacagaaacaacccttctattgtgactacctgttaaggtcctgcaattaatacaacgaaagtaccatttttgttgaaaagtaggtggttaggggcttccaaaagcccctggtagctgtgcccacaaaggaaaacgagtgtagacacgaaggggaagaaggctgtgctcaacttgttagaatatagggctgtttctcccgagattgaggtagcactacaacgcagaggaccaggcaggccagagtggccccacctgcccttgccccctctaggctaagtgaaacagctagagagagggcggcaagcgcagggacttgacctccagctctgtctagtcaaaacactttaagatgcgctctccaatcccaataaaatagaccccttgagcaatcccaaagagaggtgctatgaccagtgcccggcagccagcgcctttcatgaaggcagatggtccctcctgaatccagagtttcctggggagaaagaagagccagtgagctgatgggcaggggcattctgcaagcagccctcagtggcagcctctccatttgtgcacctctcattttagaatagtgccttccacaacaagagcaagaggccaacggtgtgggagctgtgcctcgcccgctaggtgcatgcaggttggttacttatgcagttgggtcaaggccttggaaacaggcttgatgtggctagaatctttggtgagagatgctgtagggatgccaggaagaagaaaaaggctcccagtacattctgttttctttgagaggtgagggaaagacagacttcaaagaaacccagagcccagcaattcaagttggtctctaaatctggtctaggcagacacccacgcagaggaacctgtcccagccaccatttgaggggacactggctctcacctggcacagtcggtgatcccactgtacatgtcctcgcccaggcctttcttgagggtttggattcgagttttcagaactaaatcaagtaaaagttaaagtaagtagtgaacagcttactttcggtgtcctcccctcaacactaaggggctgggccctcctgtagagccaccacatataaaactgactcataggccgggcgcagtggctcacgcctgtaatcccagcactttgggaggctgaggtgggcagatcacaaggtcaggagtttgagaccagcctggccaacatagtgaaaccccatctctactaaaaatacaaaaatgagccgggcgtggcgcgttcctgtagtcccagctactcatgaggctggggcaggagaatcgcttgaaccagggaggtggagcttgcagtgagccgagattgtaccactgcactccagcctgggcaacagagcaagactccatctcaaaaacaaaaaaagaaaaaaaaaaacggtcatgaggccagttctgccattgtgtgatctgtaagtggaggtcttcttctttgggcctcagctataaaataaatgagtcatgttactgtggctttgtttggttttgttgagacagggtctcgctctgttgcccaggctggagtgcagtggcacaatcagctcactgcagcctcaacc

SEQ ID NO: 27742 - DNA, 2300 bp, Homo sapien
aaaagtaaggttattaaaaaaaggttatggctgggcgcggtggctcacgtctgtaatcccagcactttgggaggtggaggcaggcagatcacctgaggtcgggagttcaagaccaccctggccaatgtgttgaaaccccatctctactaaaaatgcaaaaattagctgggcgtggtggcagatgcctgtaatctcagctactggggaggctgaggcaggagaatcaattgaacccgggaggcggaggttgtggtgagccgagattctgccactgcactctagcctgggcaacagagcgagactccatctcaaaaaaaaaaaaaaaaagaaaagaaaaagaaggccgggtgcagtggctcacacctgtaatcccagcactctcggaggccgaggcaggtggatcacgaggtcagcagttcaagaccagcctggccaacacagtgaaacctcatctctactaaaaatacaaaaattagccatgcatggtggcaggcacctgtaatcccagctgcttgggaggctgagggaggagaatcacttgatcccgggaggcagaggttgtagtgagctgacaccatgccgttgcactgcagcctgggcgacagagtgagactctgtctcaaaaaaaaaagaaagggttataaagtacattgatggattgatgggacaaaggaatttgttttttttttttttgtttttttgagacggagtctcactcttattgcccaggctggagtgcagtggcacgatcttggctcaccgcaacctctgctcctgggttgaagcaattctcctgcctcagcctctccagtggctgggattacaggcacacaccaccacgcctgttaattttgtatttttagtagagactggggtttctccatgttggtcaggctggtctcgaaatcccgacctcaggtgatctgcccacctcagcctcccaaagtggtgggattacaggcgtgagacaccgcgcctggcccgggacaaaggaaattaatgttcagcctagtaaactaaatttcctgaatttgctacatcctcgttcttatgacacactaaaataggaagtgtgtgtgtgtgtgtgtgtgtgtgtgtgtatgaaaataaagtgttaatgtacatgtagcaaaatgttaacaattgttgaatctaggtgaagggaggtcaatgcagtattcttacaagttactatatctcaaatttcttcaagataaaaagctaataaaaatggtgggtaaccatagcacagtaaaaagaaaaaagtgggtgtaccatttgacctcttattctactattaggagtcagtctatcctaaagataaaggaattttcaaaagtttttgcctttgggattttggggaaaaaaacgggcttgaggtaaatccaaataaaaacaaatgagcctggggggatttctgtcctaatattcctctaaatgggacctgggaaggcttttgaaaaatatataggctatctcagaaaagttccaaataaattatgtagctgctccaccctaataaggaagttgagcatagcttcccactccctaggtgtgggctttgtatagtggcttccttcctaagactacagtatggaaagggggttaaaaaaggtaacttcagagtggagaaacctacaaaccctacactttattcaggtaatcaaggttgacatgaatagtcagaaatcatgtatcccccttttttttttcttttggtagagacggggttcctctatgttgtccagcctggtctcgaacttgaggtcaagcgatacacccgccttggtctcccaaagtctccggattgcaggcgtgagccaccacgcccggccaacaatcatgtacccctaagcccataaccctgtgtaattatgcgaaaaattccaataaaggcacattctccaatatacctaaccagtactcctcaaaacagcccgactaatttcagatagaggaactccttatcttttcttcctcctacccaagatcccagtttaggaaaaaaataccggtcaggtcacgagtcagcgacgtagaaggacccgaggacgcgcccacaggccgggacagggcgggacttcctgggcgtcgctctcttcccattggctgagaagggtcatgaggatgaactgtgcagtcacctggcaggaaccggaacccgcggttataaagtaaaggaacccgagatctgcgcaggggttccctttgccgatttctctcacctcacctttcaaacctaaactcgagcctactgttcaccggcctagcattgctctcgccatggctctcagcgatgc

SEQ ID NO: 27743 - DNA, 2300 bp, Homo sapien
gagttggagaccagcctggccaacatggcgaaaccctatctctactaagaatacaaaaaaaaaatattagccaggtgtggtggtgggtgcctgtaatcccagctactcaggaggctgaagcaggagaatcgcttgaacccaggaggtgaggttcagtgagctgagatcgcgccattgcactacagcctgggtgacagagcaagactctgtctcgagaaaataataataaaaaataaataaataaataaaggaaaagactgagagcaatgtgaaagaaatgaacttaagtatgtaccaaattggtaacataagtacctcccaaaataaattattgcatgttacatttttgaaagtttttttaggtaaagtgtacatacagtgaactgcacagaccttaaaagtaaaattagggccgggcgcggtggcgcacccctgtaatcccagcactttgggaggctgaggcaggcggatctcttgaggtcaggagtaggagactagcctggccaacatggtgagaccccgtctctattaaaaatttttaaaaagccaggcacggtggctcacgtctgtaatcccagcactttgggaggccaaggcgagtggatcacctgaagtcaggagttcaagaccagcctaaccaacgtggagaaactctgcctctactaaaaatacaaaaattagctgggcatggtggtgggtgcctgtaatcccagctacttgggaggctgaggcaggagaatcgcttgaacccgaaaggcagaggttgcagtgagctgagatcgcgcccctgcactccagcctgggcgacagagtgagactctgcctcaaaaaaaaaaaaaaaaagtcttcatttttggttacccatttcactgcaacctttgcctcccaggctcaagcgattctcctgcatcggcctcccaagtagctgggattacaggcgcgtgacaccatacctggctaattttttgtgtttttagtacagatggggagtttcaccatgttggccaggcaggtctgaaactcctgacctcaagtgatccgcccaccttggcttctcaaagtgctgggattacaggagtgatccaccacacccggcctgtactattagttttccaaggtcactaagcctttcctttgcaaaactttatgtccctattaatggcaccatcctttcctcagtcactcgggcttaaaaagcatcctgtggcaccagccccacaatagcagttcaactcttttatcacttcctttagaatagccttgttgagatatagatctcataacatagaattcacctatagtgtacaattcagtagttttcagtatttcaaagagtcgtgccaccatcaccccaaaaagaaactctgtatccactggcagtcactccccatcaggattttatcacttctgatctggctcagtcttctaactccttattgtcaatgccctccttgttccaattcagtacacacaccacgggcaatttgatctccctaaaacacactgtatcctctctcctagataccttccgatactcctccaaagaactctcggattcaagtaaacaaacatccattaatacaagttaagtatgttccaggcgctgtgtgttccaggtactgttaacaaaagcgggttactagttaagacttccttcatgccctggcgcctctgctcagccagttcccttcgcctaggaggacctctctacaccaccccgctatattccctccccggaattccttcccaaccttcaaggaccatctgccccaactagtggcgaacatcgaggctgtcgtgactgtgtagatacttatttgacctgctcccttggcaaacacttgaaacgcaatacatgtttgtggaactgaacatagcctgtgcatgcagcaaggcttctttccctggaatcgcctgcccttcctccaacacagcgaccagccggtcagaatcccaacccctcgactccggaaatgatctgagagacggaacttccgaacgtcgcaatcagatttgggcgggctaggagggtttgggtcttcaggtcacatctggacggagagacctccggggcctccgttggtcggtccttccgctccggataccgttccggatgtcaggtagttcaggtcccgccccgacgccggccgtgacgaaggcacgccggggtgacctcaccctccaacatggcggcggcggtagattagggccgcgggtcggagcactcaccgccgctgggggaccctgtcggaagcaactgccgccgccgcctctttcatctcttctggggcaggggccag

SEQ ID NO: 27744 - DNA, 2300 bp, Homo sapien
ctccctggttcaagggattctcccacctcagcctcctgagtagctgggattataggcacacgccaccatgcctggctaattttttgtatttttagtagagacgaggtttcaccatgttggccaggatggtctcgatctcctaacctcgtgatccacccacctcggcttcccaaagtgctgggattacaggcatgagtcaccacacccagcctaggaatttctttttaaataggcatccaaagtaatttgatgggacaagtttgggaaacaaatacaaaagactgtcatgttgctgcatatttgctttacataagaactaatagtaggatttttttttttttttttttttggaggcagagtctcactctgtcacacaggctggagtgcaatctaggctcaccgcaacctctgctttctcggttcaagcgattctcatgcctcagcctcctgagtagctgggattacaggcacacaccatcacgcctggctaatttttttatttttagtagagacagggtttcaccatgttggccaggctggtctctaactcctggcctcaagtaatccacccaccttggcttcccaaagtgctgggaagtataggcgtgagccaccatgcctggtttatagtaggatttaatagctgctgtgtaccttctgattatgtttcataaaatgtgtctaattcctacaatataatcagcactggtagcattctggaacttggactggtacttgtaatagaaatctggtttagaaaagaaaatgaaccatatattgtagaattgtggatatacatttgttgttaaaggttcatggatgttttatttgtggctggttttggagatgacaccaaatgaatacataaacacagcatgaagttagtctaggtttccttaggctgtttggctagcaaccacagttggccctctttatccagtttccatatctctgcagattccaccagtcttgattggagaatatttagggaaaaaaacacaaataacaataaaaacaatacaaatgataccaatacagtataacagctatttaatggcatttacattgtcttaggtattataagtaatctagaaatgacttaaaagtatatgagagggaggaagtgagtaggttatatacaaataccacaccattttgtataaggaacttgagcatctgaggattttggtatccacaggtatcctggaaccaatcccacatgggtaccaagggacaattctacttgaaacttaatagaggaacaaagtaaaaagattaaggcacagaaagaaacaggtgggttacatattatgtttaatagtttgaatcgtacaaattatagcaggttttttgtttgtttgtttgagacagagtttctcgctcttgttgcccaggctggagtgcaatggcacgatctcagctcactgcaacctccacctcctgggttcaggcgattcacctgtctcagcctcctgagtagctgggattacaggtgtgcatgccaccacgccaggctaatttttgtatttttagtagtgacggtgtttcatcatattggtcaagctggtctcaaactcctgacctcaggtgatccgcccaccgcaccctcccaaagtgctgggattacaggcatgagccactgcgcctggccaagatagcaatttttatagttaagatcatctatgtatttactcacttctggataccaagaacacttgtactaacttgaattttaagaggtcctattagataaaattcaatgagtaaaggtaactatatgtccctctcatcatttgaaaagaatcttgaaatatctgtctttttttttttttttttttttgagatagagtctagctctgtcgcctaggctggagtgcagttgtgcaatctcagctcactgcagcctctgcctcccaggttcaagtgattctcctgcctcagcctccagagtagatgggattacaggtgcctgccaccacgcccagctaatttgtgtgtgtgtgtgtgtgtgtgtgtgtgtgtgtgtataaactacatatatatatatatatatatatattttttttttttttttttttttttctttttctttttgggatggagtcttgctctgtcacccaggctggaatgcagtggcacaatcttggctaactgcaagctccgcctcccgggttcacaccattctcctgtctcagcctcccaagtagctgggactacaggcacctgccaccacgcctggctaatttttttgtatttctagtagagacggggtttcaccgtgttagccaggctggtttcga

SEQ ID NO: 27745 - DNA, 2300 bp, Homo sapien
gttagaccattaaaatggatgctctccagcttgctcaaacaacaaagtatttgtgaactttgcagccatttgcatctttctcggaggcaagcactttataaagaaacacatactttatagtaaaatttgcagccttataggagtaagcgttagattaatgcaataaatacttaatgcagatgacggctaaatcttgggagtgggtgcaagcggcctgctttcctggtagctgatgccttgcatcgcatttgtactctggaacaagttactctgcttgctcttcctgcagttagggaatggttaagtgtctacaacaagttatgactgctttttctggattcaagttttattttatttttatttaattaatttggttattttttggggagacagagtctcactttgttgcccaggttggagtgtagtgtcatgatcagggctcactgcagtcttgacttcctggactcaagtgatcctcctacttcagccccccagtagctgggactataggcgtgtgccacagcacccagctattattattattattattttcttttttttgagccagagtctcgctctgtcacccaggctggagtgcagtgtcgcagtctcggcctactgcaagttctgcctcctgggttcacaccattctcctgcctcagcctctcaagtagctgggattacaggcgcccgccaccaggcccagctaatttttttgtatttttagtagagacggggtttcaccgtgttagccaggatggtctcgatctcctgacctcgtgatctgcccgcttcagcctcccaaagtgctgggattacaggcgtgagccaccgcacccggccccttttttttttttttttgagaaggagtttcactcttgttgcccaggctagagtgcaatggcacaatcttggctcgctgcaacctctatctcccaggttcaagcgattctcctgcctcaggctcctgagtagctggggttacaggcatgcaccatcacgcccggctaatttttgtatttttagtagagacggggtttccccatgttggtcaagctggtctcgaactcctgacctcaggtgatctgcccagccttggcctcccaaagtgctgggattacaggcatgcgccaccgcgcccggccttaatattttgtatttttagtagagatgtggttttgccatgatgcccaggctggtctcgaactcctggactcaaaccatctgcacacctcagcctcccaaaatgctgggattacaggcatgagtcactgtgctcggcttctggttcaacttttatacttgtttgtataatcttcatataatagtttgaaaatttatccatgtgtagtaatattaaggttgaaagttcattttaataaggaaatgaaagcaatggactcatcctctgaggatgattagaatctgatataagtgccagttttataaatgtaaaacaaaatcttaaaaacagaattttaagagaaggataatagagccaggaattgcttctcatttatcattattatacttgttggtcagtaatcataaactaaattgattagcttattataacatgtcagtttagttgtttcttttctcttaaatctaagctttttcattaaaacctaaaagaacctctaaatttatgacctatcaatgtttacgtgccaacaaagattaatgtccacaatgattatctgacctttttaagtggcttgtaatgattagcttgttcctaatagtgggtgtcttaatcctgtggccttttatagcgcaacttttgatattgttgttttttttttttttttgagacggagtttccctcttgttgcccaggctggagtgcagtggcgtgatcttggctcaccacaacctctgcctcctgggttcaagtgattctcctgcctcagcctcctgagtagctgggattacaggcatgtgccaccacacccagctaattttatagatattgtttattatattaggtttttcttttgtcctatcttcagccttcaccagcacaggctttgaccgtcacacttctccagtgttcagccctgccaatccagaaagctcaatggaagactgcttggcccatcttggagaaaaagtgtcccaggaactgaaagagcctctccataaagcattgcaaatgctcctgagccagtgagttacactgctgagtgggatgtgcttctttaagtagtctctggatctctcatgcagcactggattggttagggctgtgttttaggtgaacagtgtcacttcttttctcacttttctttacattttct

SEQ ID NO: 27746 - DNA, 2300 bp, Homo sapien
ttcttgttagtccttagacctcatctcaactgctctgttgaaggtaatgatttattggggggaaaaaacaacgccaatttatcctctctgtattaaagtgataattctgggcccacagaaatcagtcagtacctgcggtgtgccttaaggggactctcatgatcatcattcccttctagagaacattctagatgaagaaatgcaactgttgaccttctggttcacccatctccccctcgaggcattcttgataccccttctcacctgcatttctgtcccagggataccagatgcagccactacctaactaggcttgtcctgggggagtgagccgtgaacctggagacatggctttgacccacagctactgttcatttcctcaggctttgcgctgattccctcaataatatgacagtaaggcaagtagtctccttgcctttctcctgaaaggtatgagatgtggacatttcagtgtttgaattattttaagagatgttttatagaaataaaacgttttgtagctaagaattttccctttctcttaatttcttacatctttccacacaaacttatctttccaagaatttgaggtggtgatcatacccatcaagacggccttgtaggctatctgattgctaacagacacgacctagagcttctgcccaaattcccacacaagcattatctcgtttaacatctcagcgacatactggataccagaataatgtttcctcttctctggtgcaccaaaacctgcccttagtgataatctctcaattatgacattcatttgagtttagggtgtataatttttcctaaaaaaaattcatgtcgataattatattttagcaaatactagttgagcatttataacatgccagagacggttctagtgctctcacataccttatttcaccttcacagttctaatagctgtttgtattccttttattcccatattacagaatgaagaacctaatcagagtttgttagtttttctttttccttttttttttttttttttttttttgagacagagccttgctctgtcgcccaggctggagtgcagtggcacaatctcggctcactgcaagctccgcttcccgggctcacgccattctcctgcctcagcctcccaagtagctgggactacaggcgcccgccaccatacccggctgctttttttgtatttttagtagagacagggtctctactatgttagccaggatgggctcgatctcctgacctcgtgatccacccgccttggcctcccaaagtgctgggattacaggcgtgagccaccgtgcccggcccagagttagtttttctaacgtcctcaagcataggcgaggcaaggcaatgattttgccggtttttatcattttcctggcactgcaaagcagtattggcaggtcccctgcaaacagttgcgccagttgtttactgcataaggactgactggggacaaattccgacgtgcagcctgtgctctgctcaccatgctgtgggctctgggagaagcgaagtatttttctaatttgtacaaaggcaccatataggctcacttaaacattaagcatgttctactacaaaaaaacaagagtgagggttaggtccaggactggtctcagcttccaattatgtagctgttttccctgtagacattgagtgagatgctttgtggttacagaattcacagtcattgccgatgagctttcattagctttcttgattaaatatttttgcttgtagacaaggttaggcaatctgtcccagcagttatcacaaagtgctaaatgaggggggtgaagacagcaccacgatgcatttcttggtctttttctgtttgttcgagttcgtcccttctcccctgtgtatgccatcataagggtggggctgtggagtgaagtaggggaatacctggaagcattgcttggcctctggacagacaaagaggttggggacttaggagggttgaccaggtatggccacaagtacgtcagctcctggaggatcttcccagtgaaaagcctcctactacattccacagcacttcatggtaattataaccttggctagataatacctgctgtatggtacagaatagtgacattcaattacctcatatataaagagagctccatggagagctggaaagtgcatgccactacaatattaacacatcccatcttccctttctttttgcaaggctgttgaatttcagcccggcatccccacacactaacaccatcaggtcttccacatttgatggttacaccacaggagcccacaccagactg

SEQ ID NO: 27747 - DNA, 2300 bp, Homo sapien
gcagagactgtgggggccaattggtacaggtcctgccctgcatgacagggccagtggcccccacagtgctgaggataaaatccaactgctcatccaggctgctggagcctcctgccttcaggccaccccactggcctcttgcccactgtgccccactgtccaagctctcgcctgccctgggaggggcccctgcagcttcttgtgcccaggtgcacgtccctctcttttcccatctgggcgcctgctgacattgtaccatgaatttgaacaccaccctgcagatgacctggcctcagtccatgaagtttccctttcgtcttctgcagggcaccggcccctaatgccatctgacggtttccctgctcacaggatcttccatttgttagccccccagagtgcccagcccgagtgaagagcatgcaggaaacaagcccctgtcctcgtggaggctacattccgagaggggaggtaggcaacacacacacaaacgactccgtggtatgtcatgctgcgatgctggctgtggaggaaaatgaagtgaggcctggtgaaagccagaggccatggggctgccgaggaggaacagggacagggtaggatttgcttagagcagggcaggtcgcgtgggactctgcgggccactgaaaggaacttggcttttattcagaggatgttaaagcgtgagtgacatcctctgaccttttataaaagaggcaagagtctagggagcccgggtagaagtgagggcgtctggaggagccacagtgggctcagggagtgagcccacgcgagggcgcagagcaactggacgctccaacagggctggtggaagtgccgaacggtgtgcatcaccttggaaagcaggcagtttttaataccatgaagctcgtccagccctatgattcgcatttccactcctaggtatcacactcaagagaagtgaagacgcccacaaagggctctgcagcagcactgccggtgagagctgcatccggggatgcatggactggcctgtcattccagcaccttgggaggccgaggtgggaagcatcgctggagcccaggagttcgagaccagcctgagacctccagaggtggagaccccccccccaccacctccactaaaaactgaaaaagaaattagttgggtgtggtgtgcgcctgtagtcccagcattatctatatgttaaactgatgttttaaatcagagttgatatccaaataattaaagaataaacaacaagcacagggactggtgaggggctgggccagattctctgcaacccacatggcttcacccactttccaaacccctggttccgtgaggacctagaatgaccaccccagactgttccagaaacagcctggggattctgaatgtttcccagagaatcattaggaattatcccagcggcgctggagtaagtggccaacttaaagttggacgacactgtctgaaacagtcgcgtaaggggtaagggtggaaagcctggttctcactgcgctgccggctccccgccccgctccacagccccgcgccggcgcgggctccccgggtccccgcaagccgccgggggcgggccggggcgggccggggcgggcccgggcgtggggggccgaaggaggaagcgcgcggggcgccataaggaggaagcgggtagtcgaccgtgtccgcgcgcctgggagacgctgcctcggcccggacgcgcccgcgcccccgcggctggagggtggtgagtgcacccgcgcccctcccggggtacgcgccgagccccagcccgtgacccctgcctgccgcctgccccggcgtggagctcagggcccgccgcccgccctgggcccgaccgcggtgggagccagaggaggggaggcggggggtcagagccccaggcctcagcagcgacctgagggccgggtctctcccgcctcccctccgcccgggcgccctcctcggcgcggccggcaggtcggtgctgagggtcgggtccgcctcggaggcggggaaggctttgttgtgtcctctccacgtggcctggggattcaggggaggggtgcggggcgcggggagggggaggggccgaggccagccccggagaggagaaaacccgcgggcctggccgggtgcaggccacccttgccggcggatcggaatccccgcccacaccgtggtctttccagcaccgcagacacctgccggctcctcccgagcggagctcagggctgacaaagcgcggtcagagcggccgcttactggggctcgcccgctccttagagcactggcaatgatgtgcggatcctcg

SEQ ID NO: 27748 - DNA, 2300 bp, Homo sapien
cacaccactgcactccagcatgggtgacagagctagatcctgtttcaaaaaaaaaaataaagtcatcattctctcatgtatgtgtatattgtttcatttgttaattaaggtataattttacatacagtaaaactcaccattcttcgtgcagagttctcacaaaagtgtacaattgtgtggcatccaccacaatccctgtatagaagaatcccatcatccccggaatttccctggacccttccatagccccccagtccgtcaccccctgaattgttttctggcaccccgcccccctttctttttgaagtggttgttttgcaggaaacatcaccctctctcattttacaaatactgcagacagattttgaagcccaaagcatcatagaggcagcagatcaggacagggaggattgaggcggggaggctctaccctgactgtaagaagcacttgagagacctgcaaaaagccaacaggagaggcagagactgtgggggccaattggtacaggtcctgccctgcatgacagggccagtggcccccacagtgctgaggataaaatccaactgctcatccaggctgctggagcctcctgccttcaggccaccccactggcctcttgcccactgtgccccactgtccaagctctcgcctgccctgggaggggcccctgcagcttcttgtgcccaggtgcacgtccctctcttttcccatctgggcgcctgctgacattgtaccatgaatttgaacaccaccctgcagatgacctggcctcagtccatgaagtttccctttcgtcttctgcagggcaccggcccctaatgccatctgacggtttccctgctcacaggatcttccatttgttagccccccagagtgcccagcccgagtgaagagcatgcaggaaacaagcccctgtcctcgtggaggctacattccgagaggggaggtaggcaacacacacacaaacgactccgtggtatgtcatgctgcgatgctggctgtggaggaaaatgaagtgaggcctggtgaaagccagaggccatggggctgccgaggaggaacagggacagggtaggatttgcttagagcagggcaggtcgcgtgggactctgcgggccactgaaaggaacttggcttttattcagaggatgttaaagcgtgagtgacatcctctgaccttttataaaagaggcaagagtctagggagcccgggtagaagtgagggcgtctggaggagccacagtgggctcagggagtgagcccacgcgagggcgcagagcaactggacgctccaacagggctggtggaagtgccgaacggtgtgcatcaccttggaaagcaggcagtttttaataccatgaagctcgtccagccctatgattcgcatttccactcctaggtatcacactcaagagaagtgaagacgcccacaaagggctctgcagcagcactgccggtgagagctgcatccggggatgcatggactggcctgtcattccagcaccttgggaggccgaggtgggaagcatcgctggagcccaggagttcgagaccagcctgagacctccagaggtggagaccccccccccaccacctccactaaaaactgaaaaagaaattagttgggtgtggtgtgcgcctgtagtcccagcattatctatatgttaaactgatgttttaaatcagagttgatatccaaataattaaagaataaacaacaagcacagggactggtgaggggctgggccagattctctgcaacccacatggcttcacccactttccaaacccctggttccgtgaggacctagaatgaccaccccagactgttccagaaacagcctggggattctgaatgtttcccagagaatcattaggaattatcccagcggcgctggagtaagtggccaacttaaagttggacgacactgtctgaaacagtcgcgtaaggggtaagggtggaaagcctggttctcactgcgctgccggctccccgccccgctccacagccccgcgccggcgcgggctccccgggtccccgcaagccgccgggggcgggccggggcgggccggggcgggcccgggcgtggggggccgaaggaggaagcgcgcggggcgccataaggaggaagcgggtagtcgaccgtgtccgcgcgcctgggagacgctgcctcggcccggacgcgcccgcgcccccgcggctggagggtggtgagtgcacccgcgcccctcccggggtacgcgccgagccccagcccgtgacccctgcctgccgcctgccccggcgtggagctcaggg

SEQ ID NO: 27749 - DNA, 2300 bp, Homo sapien
ggaaatcacaccattgcactccagcatgggtgacacagccagactccgtctaaaaaaaatttttaaaaaattagccaggcgtggcggtgcatgcctgcagtcccagatacttgggaggctgaggcaggaggatcactcgagcctgggaggtcaaggctgcagtgagctgtgatcacaccactgcactccagcatgggtgacagagctagatcctgtttcaaaaaaaaaaataaagtcatcattctctcatgtatgtgtatattgtttcatttgttaattaaggtataattttacatacagtaaaactcaccattcttcgtgcagagttctcacaaaagtgtacaattgtgtggcatccaccacaatccctgtatagaagaatcccatcatccccggaatttccctggacccttccatagccccccagtccgtcaccccctgaattgttttctggcaccccgcccccctttctttttgaagtggttgttttgcaggaaacatcaccctctctcattttacaaatactgcagacagattttgaagcccaaagcatcatagaggcagcagatcaggacagggaggattgaggcggggaggctctaccctgactgtaagaagcacttgagagacctgcaaaaagccaacaggagaggcagagactgtgggggccaattggtacaggtcctgccctgcatgacagggccagtggcccccacagtgctgaggataaaatccaactgctcatccaggctgctggagcctcctgccttcaggccaccccactggcctcttgcccactgtgccccactgtccaagctctcgcctgccctgggaggggcccctgcagcttcttgtgcccaggtgcacgtccctctcttttcccatctgggcgcctgctgacattgtaccatgaatttgaacaccaccctgcagatgacctggcctcagtccatgaagtttccctttcgtcttctgcagggcaccggcccctaatgccatctgacggtttccctgctcacaggatcttccatttgttagccccccagagtgcccagcccgagtgaagagcatgcaggaaacaagcccctgtcctcgtggaggctacattccgagaggggaggtaggcaacacacacacaaacgactccgtggtatgtcatgctgcgatgctggctgtggaggaaaatgaagtgaggcctggtgaaagccagaggccatggggctgccgaggaggaacagggacagggtaggatttgcttagagcagggcaggtcgcgtgggactctgcgggccactgaaaggaacttggcttttattcagaggatgttaaagcgtgagtgacatcctctgaccttttataaaagaggcaagagtctagggagcccgggtagaagtgagggcgtctggaggagccacagtgggctcagggagtgagcccacgcgagggcgcagagcaactggacgctccaacagggctggtggaagtgccgaacggtgtgcatcaccttggaaagcaggcagtttttaataccatgaagctcgtccagccctatgattcgcatttccactcctaggtatcacactcaagagaagtgaagacgcccacaaagggctctgcagcagcactgccggtgagagctgcatccggggatgcatggactggcctgtcattccagcaccttgggaggccgaggtgggaagcatcgctggagcccaggagttcgagaccagcctgagacctccagaggtggagaccccccccccaccacctccactaaaaactgaaaaagaaattagttgggtgtggtgtgcgcctgtagtcccagcattatctatatgttaaactgatgttttaaatcagagttgatatccaaataattaaagaataaacaacaagcacagggactggtgaggggctgggccagattctctgcaacccacatggcttcacccactttccaaacccctggttccgtgaggacctagaatgaccaccccagactgttccagaaacagcctggggattctgaatgtttcccagagaatcattaggaattatcccagcggcgctggagtaagtggccaacttaaagttggacgacactgtctgaaacagtcgcgtaaggggtaagggtggaaagcctggttctcactgcgctgccggctccccgccccgctccacagccccgcgccggcgcgggctccccgggtccccgcaagccgccgggggcgggccggggcgggccggggcgggcccgggcgtggggggccgaaggaggaagcgcgcggggcgccataagg

SEQ ID NO: 27750 - DNA, 2300 bp, Homo sapien
agccgcttcgggaaatcatctgtctctttttctgaaccggcttgttctcataacaacattctcttgctctgatttgtgggagaggtgggtccacctgaggcaggcgggacacaagtgctcaaagttgaaggaggcaaatttattcttccctcgcctgtaggcttgggaagcacagctccgcacaaggccgccccacagatgggatggatggagcaacagggagcgcggctgtggttgcagcctgcctggaattctcaggacttccctgtcttgtgcgccaccacacaccctggtttccctaatgcctttcagccgtttaatatggctggtgagaccacaagagcagatgtgactcaccttgaccctcagagcggctctgcacaaggtgtgatggaatgagaagaggctcctgctgctgcctgacgtgcttttggtgaacagcacttactgatggtagttcaattccctttactgggcacaatcaagaaatggcagctgggtggcacacaggaacactgccagcggagggccttttgggagagatgggtggtttccctcccagttttgctgcgtctgtctctgagagcaggaccccctttcctcccgcaccccacttctactcccccggagcattcagcaggaagaagtgggctgaatttccacaagcacatggtcactcaaggagaaaagcatctagaatcacatattttaacggctttaactttacacaagggacagtgagatgaggcgagttttgggggtggtgaggaagaagctgtttcttcccaataaaagagtgaaccccggccgtattcaaaaccaggtccactcagacgccgccgctaggatcttcacacccagattcctacctaggcagtcctgtgtgacttcgtgaaaaataatctcgtgttttaagtcttgtgtgtttgttttcaacttctaacttattttgctccatttctgtgttcttaatttttaatttgttaatcattattattattactattctgttttgttttctgatgccatccgcttaaaagtcaatttatgtaccacacgccttggcattcaggagatcatgtgcatcaaaggtagtgtctcgttcctgtcagctggtcaccgttgcatgcatgtctgtgattaaccacccggcgccggccccggccctccagccacatcctcactaactgtgtttgtgcgtgcatggggctgtggcacacactggcagcagtacttccgttagccacgtcatgagtgggaaggaggatgagacacctgctcctcaccggctggagtgcatgtggtcattttgttccaggttcctcgggtcgggacacagctgccgctgtggggctgggcaccccagagaggggcagttcagcagccctcagctctgatcagcaaggtgcagcgctgaaacaccactgatgacccttagggactgactgttcaggggaccctctgtcatttgagctcttcgagtgaagattatgagtatagaccccaagtcatgtttgtcttctttgaagtctataaaagttttcttgttggccaggtatggtggctcacacctgtaatcccagcattttgggaggctgaagtgggagaatcacttaagcccaggagattaagaccagcttgggcaatataacgagatcccgtctctgcaaaaaaaaattgttttaattgtccgggcgaggtggcacacgcctatagtcctgactactcgggaggctgaggcgggaggatcacgtgagtccaggagtttgaagctgcagtgagccatgatcgtatcactgccccccagcctgggtgacaatgagaccctctctcaaaaaagaacttttatatagtctccttgtttcattttcttagaggcaataaagagggtcttatgaataaaggcaaatccccaatctttgcccctcttgttgcccatggtttgttcaaagcatctgatgctcccttgagcccttggcacccacgtaggcagggggctgtggctgtccagtccgtggacttgcactggattgggccattgcctcttctgttctcgatggcgctaggcgcaacagccctggccaggccacaacctctcttcttcctagcggccagcggctgcctctgcagaccccagagtcagtccaggttcacctccacaattccttcttcagactgtacttgacttaaaagagaaacatccttgttctctctacttgggtgtcatttcttggaagactctcatggatactgctcttctgaagaaagtgacctttgataccaaacaggaaaataaaagg

SEQ ID NO: 27751 - DNA, 2300 bp, Homo sapien
cactgcaagctccacctcccgggttcacgccattcttctgcctcagcctcccgagtagctgggactgtaggcacccaccaccacacctgcctaattttgtttttgtatttttagtagagacgggatttcaccatgttagccaggatggtctcgatctcctgacctcgtgatctgcccacttcgtcctcccaaagtgctgggattacaggtgtgagccactgcgctcagccgtctgtgaaatggggaggctttgtttgaggctcttggatggggtgatataagggctggtgcaggaatctctgcacatctttgagcttcctagggaggacaatttgatcataatgcaccgtgataaatagctgtggtaagtcttcttacagtcctggcccctctgtacgtacgtcagggatcttggcgctctggggcctcctggagggtgagaactgcattcctctatgtccttttggccagtgttcctgtgagtggacaaagaatataggatgtatttgagatgaaccaaatcctgaaaacccagtttgtctaaactaagcagagtggttctaaggttctaaacactgaacacctggagcagaaagtggaaagggttttcctggagctgttctaataacagctggaaggacggggaagtcctgcagcaggcacaggtgcaggcactttgagtgagaaggctccccgaggatgctgctggtcgtgaaagcccacaccttctcagcggcttctgtcttccttccctgtaggggccccaactcccacctgtccctgccgccacccaggagaaatcacctgaggagcgccttttccctgagcctttgctccccaaagagaagcccaaagctgatgccccctcggatctgaaagctgtgcactctcccatccgatcacagccagtgaccctgccagaagctaggactcctgtctcaccagggagcccgcagccccagccacccgtggcggcctccacgcccccacccagcccactccccatctgctcccagccccagccttccaccgaggccactgtcccatcccctacccagtcccccatacgcttccagcctgccccggccaaaacatccaccccactggcccctctccctgtccaaagccaaagtgacaccaaggacagactgggcagcccccttgctgtggatgaggccctcagacggagcgacctggtggaggagttctggatgaagagtgcggagatccgccgcagcctcgggctcacacctgtggaccgcagcaaggggcccgagcccagcttccccacgcctgccttcaggccagtgtccctcaaatcctattccgttgaaaagtccccccaggatgagggactccaccttctcaagcctctgtccatccccaaaaggctgggcctgccaaagccggaaggcgagccgttgtccctgccaaccccccggtccccgtccgacagagagctacgcagcgcccaggaggagcgcagggagctgtccagcagctctggcctgggcctgcacgggagctcctccaacatgaagacactgggcagccagagcttcaacacctcggactccgccatgctcacgcccccctccagcccgcccccaccgccacccccgggcgaggagcccgccaccttgcggaggaagctcagggaggccgagcccaatgcctcggtggtcccgccgcccttgcccgccacctggatgcggcccccccgggagcctgctcagccccccagagaggaggtgcggaagtcgtttgtggagagcgtggaggagattccctttgctgatgatgtggaggacacctatgacgacaagactgaggactcaagcctgcaggagaaattcttcacgcccccgtcctgctggccgcgccccgagaagcctcgccacccgcccctggccaaggagaacgggaggctgcctgctctggaggggacgctgcagccacagaagagggggctgcccttggtgtccgcggaagccaaggagttggccgaggagcgcatgcgagccagggagaagtccgtgaagagccaggcgctgcgggacgccatggccaggcagctgagcaggatgcagcagatggagctggcctcaggcgcccccaggccccgcaaggcgtcctcagcaccctcccagggcaaggagcgccggcctgactcccccacacgccccactctcaggggctccgaggagcccaccctgaagcatgaagccaccagcgaggaggtcctctccccgccgtcggactcagggggcccagatggctctttcacttcatccgagggc

SEQ ID NO: 27752 - DNA, 2300 bp, Homo sapien
gtacagatgtcagtgagccaagggaagaagtacatagggtgagtccaggaaggaaccagactcagcttccattgtgctcactgtggggccaggacagctgtactctcttggtctcgatgtgtgacgatacgccaggagtattgctcacctgagcaatactaagaccctgtgtttggagtttttattacataggcaatgattgattgattatccacatggttgatctcagtctccgggtcactggataccgtgctacccaaagcctcaccctaatcacattactagactatgcaacatgaaccggggtctccggcaaacagtgacagccccataggcagggcaccccaggcgtgtctaggttactttcgtggagccaaggacaagggctggagtcctctctttggacaaggcgagattcttcacctggcagtgatcgccctggcagtgcccctcagtgctcatcgtggtgtatttactggttcgccctctcacacacaagcaggctaggggagagcctgcctgggcagagagaggacacaccctcgcaggaggtcagggcagatgccctctcgtgcctgatgcttcttggattttgttgggccagaggtcgggccatggctttaacgtgaaagctgatttcccccggcctctcactgcaggcaaggcctctcctgaaaaagatgctttgggaattatcagaccacgaaacactcagaaacatctccatttgtgcagcaatgttggggttttgcgtgtattggagccccacaggttgcaaggaacccggttttgttcctgtcctgcctccctccacagggcaggagtggggtacactgcagcaggagggtggccagagcgaggagctacggtttgggtagtgtccgttgtggcatgtgcattcttacaggtgtgcggcttcctatgtcggccacgcttgcctgcagctgtgaggggagtgcttggcagtgcagcagctggcaggagcgatggccctggggttggaggtttgtctccaccctttccccatcgtctctgtcctgtggctttgcagtgagcggtgcctttgccgtcatttccctgtgtgtccccacagtgtcctgctcagggattggcacgtggtagggttctaaggagtgccaggaaatggaatctgtcgccccaccccagcacacagaccttgatcatcagccagttaagtccaggcctttctgggtcccccctccccccaccacacccacagctctcctgagaggcttctgacaggccgcagtcacacagaattgagttcctctaactagacagtgggccaggatgagagaagactttccattctcaattcccagggtcatgggtttatatcagaatgagtccactgccctgcttgtgccctcgaggccgtctatgaaacgtaaaccagcgatctcagtgtttgctgcttgaagcaccctgagggatggggctgtggcttgagtttgagcggctgcagtcaggaacttccatgggctccgtgaggagctgctctcccagttctgcacactcccctccacaggcagaggctgggccagacccacaggcagccttcggtggtcccctccctaccccatccacctgaggagaagtgcgtgaggtctgtgagcaggaggcattcttccctttgtccccttagtcgggcttgggtaggtggcttctcatgcccaggtaccctgtcctgctgatgccgctctctcctccctcctgtctctctccgcctgctcagcagctgctttgcctgacatgcattgtttctgatggtggcccttccccttccccttctcagtttttcttcattccctcactctggctatgtggttatttcctcacagtagttccgagtctgagatggaggaggagggagaggaggaggaggaggagcctcgcctgcccccatctgacctgggtggtgttccgtggaaggaggccgtgcggatccatgcccttctgaaagggaaaagtgaagaggagctagaggcctcaaagagctttgggcctgggaatgaagaggaggaggaggaggaggaagaatatgaagaggaggaggaggaggactatgacgaggaggaggaagagtccagtgaaggtcagaacaaaatctctgctccgaactctgccctgccccccaaagtgatctgtttcatgcgtgagtgtaagaggtttctggggctgacgtcacacggacgtgcctcctgcacagcccagggaccacccctcctgacataagacatggggggcagaggggaggacaccgtagcgttgagcaggcg

SEQ ID NO: 27753 - DNA, 2300 bp, Homo sapien
actgcgtttctgtttaaggactgtcaacctatcttgatatgttttccttgtcctgtttctcagagattttgattctttggatgagcaaaatgtggagaagaataaccaactggcctttgacattgctgagaaggaattgggcatttctcccatcatgacaggcaaagaaatggcctccgtgggggagcctgataagctgtccatggtgatgtacctgactcagttctacgagatgtttaaggactccctcccctctagcggtaaggcctggaaggagctgctttgcggccccctgctgctgtgctgtggcccggctgttcttccttccttccgactgtcccgcagcagtgccaccaaacacaaagttactctgtgtttttaccagttagctgtcagggaaatctctggagctttgcttcattgtttctcccttctctagtagtgtgttctcaacccctcctttctttctcactgcatttataaaaatgcagaaatcgttcctgtgccgtctttttccgtgaccaccaccttctagtgctcgtgctctcagagccagcctttttgaagaagtggcttgtgcttgtggcctctgcttctgcacggcccaaactttgtaacgggttataatccggcttctcttcataccgcgctactgcagctgttccccagtgaggaggattcccacctcctactcttttctcagttcccatctctcatgcacttgcttttctgcattgttgagcaccggagaacgatgtcccttttcgtggaattatcttgtctcctctgtgtctgtgatcctgaaccactcttgttgcccttctttctcctgtcactgtgcattctcttggcttctttctactcctacttgttagcacttcccaaaaatctttgcttgtctctcagcttgctgtctcaggctctcatagtgctacaaaaaatattcctgttgtcattaattgtcccttagagtaagtgtaggttgaggctagagtgttggctgtggggtctgacctggatttacagtatcccaggcttccacttggccttaggcaagttactcaattttcctgtgtctcactttccgtcaacctatcttgtaaaatggggtaacgggtgtaaaatggggataatatgtataattacattgtgatgtgccaagaaggatgtttggccagtggaagtacttaataaatgttagtgatttactatgaattaatgactattttaaaaattgctgttgttactaatgaaacattgaaatccaaaaagcttgtgttaccaccctccagtgctttccagcccatatattcttgtaaggatctgtggcttttcctggttagccatgacgttcttacaacagaaagccacagctctaacatcgacgtacccattcagtgccacccccatctgtgtgcagctcagagtgtggcatctgcatacactaaaaccaggaaccctgagttcatcgcctctctgcttttctctctccctccctctctctctgtcctgaaatttttgtcacaaaaacgagccttcagcactctgctgtaactaacaatcacagccagcttccaacttttgaaaagcaaaagtgcgggttttggtaactgtagtagattgggaagaagagtcatttttgtttatgtggatgaacaaaagaaggttcaatgtccatacccaagtatgcatttcctccgtggcgtttcctactgagaccacatgcttgtcctggagctggtgaacctttagagccttctgaggctctgcgaaccatccacgagggagagtagttttggtcaggattttgcggcgccctcaagggctgtgcttgaacatcactggtttctattcccagacaccttggacctaaatgccgaggagaaagcagtcctgatagccagcaccagatcccctatctccttcctaagcaaacttggccagaccatctctcggaagcgttctcccaaggtatgtggaggagtctcttgatgggctgcaaagctaatggcaaggtatgtatggctagaataatgcagtttccctcctcccttggtacaggataaaaaggaaaaggacttggatggtgctgggaagaggagaaagaccagtcaatcagaggaggtgagattcacttggggaattgctagaatggtcatgtggaatagccccttttggttaaaattcttcatttccacattggtattgctaggtcttttcatattcatcctttatgagaatttctgttgggctttttcttttcttttttttattttcttttttttttttttttttttttt

SEQ ID NO: 27754 - DNA, 2300 bp, Homo sapien
agagaagaaattaaaagtagctttgaattcataggaaaacaccaaactgcttataagtgtttctcaaacccctaaatgggatattttgaagcagatttttgcaaatgcaataaaaatcctgtgatttgctttctgataaagaactaatgccttaaccagaagaattagagagacaagatttcccagatgaaattgggagttgatatcatcttattttgtctcttatttaaggtattctgactaaatatagtgataattcttttttgtgttgattttctttaaaattgaagtaaatattgggatgcttgaaaaaataaaagagtaaatgtgtgaccttttgagttggaggcagcatctgtgggcgctcacggttttgtgcctgctctctctcctcggctcttacccggtcggttcctgtgggatcactgcaggtgggtgtggggagcaggggctgacgtaggactcaagaagactggtcaaggatgaggatttgtcaggcatgtcaggtgacttgctgcgctgtcagaacaatcatgaaacgagagggagatgttcatggtgctggtcccgattctgagtatattgttgtgttattgcagggaaagtatttacaggttgctgcctcagaccacccctgagaatgtgagtaagaacttcagccagtacagtatcgaccctgtcactcggtatcccaatatcaacgtcaacttcctccggccaagccaggtaagaccttcttgtcagtatttacatctgggcccatctgcaggaccaatgagaattctgatctgttgagatgcgtgcacctattaataccacacatacaaggatacttttttagtcatccaggtagatgtctctctgaattggtagaagtagatagcattttccatcaacagattgagagctaaggcatagagttgttaaatgacttagagaaaatcaaacatgataggaatccaggcctttatgccacgtcttctaattcaaattcttactttacggaagagcacttgccccttagtgaggagaggtaacttccacctgtgttgttgctgccggtcacgtgtgacttacattgtctgaacctcaatttctttacctgaaaaatgggaataataatccctgactactcacaggattattgtgaggacaaaagagattgttcacttgaaagaatttgttctagtgtaatttttttttttttttttttgagatggaatctcgctctgtcacccaggctggagtgtggtggcacgatcttggctcactgcagcctccacttcctgggttcaagtgattctcctgcctcagcctcccgagtagctgggattacaggcacccacctccacgcctggctaatttttgtatttttagtagagatggggtttcactgtgttggtcaggctggtcttgaactcctgaccttgtgatctgcccaccgtgcctggcccctagtgtaattttctgttcaccttctacttgaagtttatacctttaggccttctgttaagaggcagcattattagtagtccaaccgagactcttagagggacctccatgaccgagtaactaattttttctctcttttcttttttctttttttttttttttgagacagagtcttgctttgttgcccaggctctctggggtgtggtggcactatctcagctcactgaagctttgacttcctggtctcaagggatcctcccacttcagcctcccaagtagctgggactacagctaatttttaaattttttgtagagacgaggcctccctgtgtttcccagactggtctcaaactcctagccttaagccatctgctggcctcggcctccccaactatagggattataggtgtgagccaccgcacccggccctgtgtagctgatttctagcacaaagtcccacagttaaaatgtgtttgtttttctcaaaccccaccttatttcataaaagatttaaaggtcatcatcctaacttctgtctgaactttacccagccttctatcccagactttcctttcagccattctgctcttaggtaggaatttgttacttgatatttgattttctttctgtttgactttgtaaatttctgccaggtgcgccatttatatgatactggcgaaacaaaagatattcacctggaaatggagagcctggtgaattcccgaaccacccccaaattgactcgcaatggtgagttctggtggtggctttttaaaatgcaggcagccccttcagagaagtctatactcattccctgagccacaaggtgcggtccgaggcagtggccg

SEQ ID NO: 27755 - DNA, 2300 bp, Homo sapien
aaggagtggttagaaagtctgaaatttggcttgtagtgtggatgaaagcacaattggccatgtgtggttgaatggttgtcacagattgagttagggacgagcactttcgcagctctagggaggggtgagcagtggggtttgttgctgaaggcaggaattgtggacagctcattgggtgaatgaattattaatcgaagttttgtctgattatgagaaggaagggagaaggaagagaaaggggtgcttcctggagaagtagaaattatgaactacttggaggtggagggccccacacataagaagaatattcttctctaagagatgagggacccagaaagaagacaggattcatctttaccaaaggtggggttgatactgtcgctgaaagtaggtgtcagaaagtctatcgactttcaactaaagttcttttttttttttttttgagatggagtcttgctctgttgcccaggctggagtgcagtggtgcaatcttggctcactgaaagctccgcctcccgagttcacaccattatcctgcctcagcctcctgagtagctgggactacaggcgcccaccaccacgcccagctaattttgtttttgtatctttagtagagatggggtttcaccgtgttatccaggatggtctggatctcctgacctcgtgatctgcctgccttggcctcccaaagtgctgggattataggcgtgagccaccgcgcccagcctaaagttctttaagatagtggataatgctcaaagttgaagaatatttgcaggtattgctattcctgtgcaaaggatgataggatcacacatgaagtgtgtgaaggccatcagacaccaagtgcattccagtatcctcattggaccagatgatgaaactgaggccgagggttgtacttacctgctcaaggtcatacaagatatatttggttcaattcgctctatattttcgttttcttttttttagacagaggctcactctgttgtccaggctggagtgcaatggcacgatctgggctcagttcaacctccgcctcctgggttcaagcgattctcctgcctcagcctcctaagtagctgagattacagacgcgcgccaccatgcctggctattttttgtatttttagtagagacggggtttcaccatgttggtaaggccggcctcgagctcctgaccttgtgatctgctcgcctcggcctccctcccaaagtgctgggattacaggcgtgtgccaccgcgcccgccctctgctctatattttctcttagcgccctcctccaaaaatttgaaattccccctaacctctttgcttcccaactagaatgaaaatcctagtttcattttgcggcaactaagagcaacaaacaagtctcctttattattattttttctttctttagatggagtctcgctctgttgcccaggctgtagtgcagtggcaccatctcggctcactgcaacttccgcctcccgggttcaagtgattctcctgcctcagcctccagagtagctgggactacaggcccgtgcaaccacgcccggctaatttttgtattttcagtagagtcagggtttcatcatgttggcccggctggtcttgaactcttgacctcaagtgatccgcatgcctcggctccccaaagtgttgggattacaggcgttagccaccgcgcccggccaacaagtcccctttaaatacatcctctcttctctccgggggcaggctttgatatgcccaccgggtttctccattggccacttcatgtggcttctcgccccttccaagattcccaaccaatcagttctttcccgtctcccgttgggctttgaggaatgtaccatatggatcctgcagggggacggagaggacgaagggcgtggcgacagcttatttctttgccttttgcacatatcccgtgagattctggcaagactgagcgtgcaagtagcaatggagtccctgaggacgggggccgcttgccagttttcgaggtgtactgagatatctcgcccccgaggctggggtcccgtggtccggcccgagggccacaacccccgcccttccatgtgcccgcccatcccccggctgcgccgcttctccggctgctacctaccgcgccggacgctcgggctgcggaacagggcggcactggcccgccacagcgacgccggcgccgagggacaccgcagtatgaggcagaggtaagaacggggcttcgggactccgacccgcgccaaccgtccccggggagccgcatcctgctcgcgcccgagctcggggtctcgggcaccg

SEQ ID NO: 27756 - DNA, 2300 bp, Homo sapien
gttcaaagaatcaagtcctacagaatgtgtgtgtgtgtgtattttaatatatctttatatataatatatattttataaatttttcttagatgtagtgaatatgagaatataagtccagaaaaaccctgtttataaaatttgccgtgtttcccagagactttcaagaatccaggccaaattggcttagggaaggagtcttctgcgagttacagaaggactctagaaatctctgttttggtgatgattgtgatgtgcaattgtagactttattttgcagtgccttggtaactagagatttcttctgcatagtcccatcttggttttgtctgtttccactgcatagaatttctggctactgctgaacatacacatgccaatcagttaggggaaaaatcacccaattttgaaccattatattgtgagaaactaatgcagaagtagatttgcaactttgtcaagttgcgttttaatttcccttttttgaagagacagcctctcgctgtgtcgcccaggctggagtgtagtggtgctcagcctcaaactcctcagctcaagtgatcctcccaccttggcctcccaaagtgccgggactacgggtggagccaccacacccaatcttaatttccttcttcctggcagggtgaaaacatgcaaatcagtctggaattagttaaaaagtaaaagatatgtaattttcttaaacctcactatgagatattagcctagaaataaaccccagaacctagaatgatgtcttcgagctctaagacatcccaatccatggatcttcttagcttttctacagaagattaagttggttccaaaccagtcccttcgtgtagaagaggggcaagaacatggagcctttcatgtcttcagtaggtccacaggactatgaatgcagcccaggaatcaatttgttctaaaccactctgttcttccttcttgactctctcatccaatggataggatgggatgggcttttgagccagtccaggcatcctgggggccattagactacacatggcttgggatttccctggagattgcttaaagctgaatgcccttggggttcatgataaactgaactggtggcagtcacgggtgtgctatttggaatgcttggaagggatggactgagctcctattgcaccatgctttttttttctgaggtggagtttcgctctttttacccaggctggagtgcaatggcacgatctctgctactgcaatctccacctcctgggttcaagcgattctcctgcctcagcctcctgagtagctgggatcacaggcaggctgccaccatgccaggctaattttgtatttttagtattttagtatttcaccatgttggccaggctggtctcgaactcctgacctcaagtgatccacctgcttcagcctcccgaagtgctgagattacaggcgggaaccaccgtacccagcccatcatgcatttttttttttttttttttttttttttgagatggagtctcgctctgtcgtccaggctggagtgcagtggtgcgatctcggctcactgcaagctccaccccccgggttcacgccattctcctgcctcagcctcccgagtagctgtgactacaggcacccgccaccatgcccggctaattttttgttagccaggatggtcccgatcacctgacctcatgatccacccgcctcggcctcccaaagtgctgggattacaggcgtgagccacagcacccggccccatcatgcattttttactttgctagccagtggtagatagctgatcaaaactggtttaagtcaaaaacaaaaacaaaactgagcatagtggctcaggcctggaatcctagcactttgggaggctgatgtgggaggatcacttgagcccaggagtgcaaggctgcagtgaactatgactgtgccactgcactccagcctggaaaatagaacaagaccctgactctaaaaaagaaaaaaaaaaccatcatgttttaagtaatgtagaatagcataggaaaattcctagcctattaagtagaaaagtagattgcaaagcagtttgatcaaattttgttaaaaagataatacagaaaaagaagatatatgacacatgtacacagaaaaatacaagaaaacacatacatcaaaatggtaacaatgatatgctggtgaacgtaatgggtatttttattttttgtactttatttaaaaaattcttttacaatgaacatgtattacttttgaaatcagaaaattggccgggcgcggtggctcacgcctgtaatcctagcactttgggaggc

SEQ ID NO: 27757 - DNA, 2300 bp, Homo sapien
aatcaataaaagttggaaatattcaataaaagggaaattatgagatattcatatgataaaaatattgtatgacatttaaattaatgttttttaaaaatcctcaaaggaggaagaatttcccacaaagttatttttaacaaaaagcaggatgcacttgtgtgtctgtgtgtgtgtgtgtgtggttttatctcaacttagtttaaagctagaaagctagaaaaaagactggaaagaaatatgaatattactaatggctttctctaggtgatgagattatgaatgcttttcttcctttatgtttctatatttttcagtttttctaaaataaacgttttcgcctagtgcagtggctcatgcctgttatcccagcactttgggaggctgatgagggcagatcgcttgagctcaggagtttgagaccagcctgggccatgtggcaaaaccccatctccacaaaaattagctgggtatggtggtgcatgcctgtagtcccagctatgcaggaggctgaggcaggagaatcgcttgaacttgggaggcagaggttgcagtgagctgaaattgcaccactgccctccagcctgggcaatagagcaagatcctgactcaaaaaaaaaaaaaaaactccagcgtcaaaaataaaataaaatgagaagtaggagaaattattagagattctggaccttttagggcatttttccctaatatccactcaggccgtgcccagatggccttgcaccttcagctgtggcatcaaacaaaactgggaattgcagctttaccacttatctcgctgcataagcttccacaagcaagttacttactgtttgtgcttttaggttcttaatatgtaaaacaatgttttacattaaaaattaaatgaaatagctcctgaaaagcccagtcacattgtcagagctcagtaaaaatgtgttcccttattctagtactggggcagaacacctgcaggtttgtaggtggggagacagtggacagagtggctgggtgatgaagtggggctctagaggatgagcagagattgcctctgagccgacaccctggccctgtcagttcccgtcctcacatgatggacatgaagggaacacgaatgaagcagatgatgatacggttaagtaaataccacctgggaccagagagagcccttctcaaggagtcgccagcccagagtcggccctcttctgagctggccggctggagtcaatctgctttggacaacacagcttcagatggagataatactgaggccaatgatccttgaagacaaaataatctctgggcttctttctgctctgattataatgttgcaattatactgagcagatgctgataggaatttggtcaaatccatcccgtcttccatctaacttattttagtgcctggtggatttctgtccagctccacgggctgtggcaatgccggggctggctggaagtgtggaaggggctggctggaagtgtggaagaggctgcccgggctccggcatcaagaggttttctccggtggggaggagtgcgcgatctgatccttggagcgcttgcaactgtagccctcccccagggctctgcgctgatctccagggtcatcatcatagtaacagtaagaacttcattttatagcatttttcaatctgtaagacaacgtcgtgtcctttataccgttgaaatttcaatttcacgactactcagatgttacgcgacttgctcagtatccaacacttggttccttcactggctcccggagacctgggtgctgaagccactgcaaggaggtgtgtgctcgaacacacagcgaacaccgactgcgtggttagcaggattcgctggggaagaggcctcaggagagtgctggaatttccaaccttcgaggtgctagtaacgtgtgtcgaggaaggggttggagaaggggagaaaatgaaaagaaggggagaaaatgaaaagatggggaggaggagaaatggtttgggtttggttttggcttgagcctcacccaagcgtcccacgccgcagctccgcggcctcctgggggcgcccgctcgcgttgccacggcgctcgcgcggagccgcagcccgcccagccagcagcgcgcgctcctgcagccccggcggagtcccggcggggagcgcccgcgtaggcaggcacccggggcagccctccgtcctcgccgcgcggcctgagaacccctgggccctgggcgagggggctgggctgtgcagcccccgaggctaactgggcgggatcgcagctgcaggggttgtgcgagcagccacggcggcacctg

SEQ ID NO: 27758 - DNA, 2300 bp, Homo sapien
gaaaagcaactagagtaatagaactgtcaaaggttggcaataaggctgtgtgatctcgctgatggttctccaagatgaaatgaaacctaatgctgctttcttcttccttgagagaagatagcaaagagggcagaaggtgagggctgggggctcaatgtcaactctagaatctctttaaaccttttcagcgtttgtttttttccccactgagaaagttaagtgtgatgggagggaatctagtccttttgactattttaaaatgtaccttctaaaatcagatcaggccaaaaggttttttactcttgaataaatttagggctaaaggctgttggaaaattaataggagtggattcaacgtggcaatagatcttttataaattctcttattgagtgaatttctgaatactgaaaacagtgtttagcacctattgcattaaagtgagtataagactaatactttgtattagtgactttggctgggtgcggtggctcatgcctgtaatcctagcactttgggaggccgaggcgggtggatcacgaggtcaagagatcaagaccatcctggccaacatggtgaaaccccatctctactaaaaatacaaaaattagccaggtgcggtggcgtgtgcctgtagttccagctacccgggaggctgagacaggagaattgcttgaacctgggaggaggaggctgcagtgagctgagatcacaccactgcatcccagcctaggcgacacagtgagactctgtctcagaaaaaaaaaaaagactaatatttcatcaagcagttttagataacgtactgaatttaggaacaaatttactgcaattaaattgacaaaatacctgtaaattttgcagcttttctcccccacagactagcactatgcaaaaattgaatgtttaattatgaatgaaggtatctaccatgttgttcacagagtttaattacctgaagacaatgcctgaggtttaaagttaaaatacatatatttgaacatagaacatttacttgaccactttataccatgagtgaaaggggtcagtctatgcttttttccccttccctgtcttttaccagctggccattttatttgcataaggtacactgaaattcctagagacctacgaggtcattctctgctcccttgctttcctcagatgaggaaacagagctctacagaggttaactgtctagttcaaggtcactctgcatctcattagtaatcttgaagtctgaaggcaggctgcctacatttgtaaatgacagaaagctaccatagctagctaatcaaaaatagatgaaaatttagttataatctatagttgacaggataaacattaagaatgagcttgtaatcccagctactccggaggctgaggcagaaggatcccttaagattagcagtttgatcagcctgggtgacatagcgagaacctgttattttattttacttttttaaagagtcagggtctcattctgtcatccaggctggagtggagtgcagtggtgcaatcatagctctgcagccttgaactcctggctcaagggatcctctcacctcagcctcccgagtagctaggattacaggtgtgcactaggactcccagctcaagaccctgtctctaggaaaaaaaaatagaaattagccaggtgtggtggtgcacaagagtggaccccttaagcctaggagtttgaggctacattgagctatgattgcatcactgcactccagcctgggcaatggagtgggagcctgtctctaaaagagaaagaaaggtcttcctagagtttttgatagactaaaaccactaagttcagatttagcatgaataaatataatggcctgcacttttggttgaaaatatatattgcacagtagaggcctgacttgtgcatgtgaaacagaagatagggagttaagtcaaccaacaggttcagtaagagccccacgtgggaagcagctggtgaaacagctaatgaaacctcagagctatattagtagacagagagtaacctgatgtttcacggagtaactggcccaggaatcttggtgctggccaggtcatatttataccactctgtagcacaaggttccaggagggaccttgataaactagagttcatccaccagaggaggaggctgcaggccttgggcactgctcagcaggatgaggggccactgcagttgagcatgtctagcctggagtcttctgaagaacatgattattgactttatgtataggaatggctgccaatgaagaagaggtacgtggcttgttctatgtcactccgcag

SEQ ID NO: 27759 - DNA, 2300 bp, Homo sapien
ccatgagctccaacttagagacagaagtttggctaagtaaagacaatacgcatttatgttcccccagagggaatgaattcgcttctgtttaggatttctgtgtcttcgcttgagaaagtctaagtacttgtagacatagaggagatgatgtgtcccactggatgtgtgttgaggaatccatttgtgggcataatagtgctaaacagtggttacatacggactgatatgaagcccgggaatagttgaaaattgggtgaatcagaaatggaatacaatcatatttttatatggtttctagctctcctctctcctgccttaaatatcttgacctcattctggctgtctcactactaaataggcaaatttacttttagcaaggctgcttctgttaagactgtgcctccatctcctggacaaatttggaatagcaagaaatttgttaggaaagggacttttccaggcagcagccgcttagagctggccgcttctgagcatgttcgtcttcccaggcctggctcacattttcagtgcttaatgcgcatggcgctttatgcgcaatattacttaattcttccctcagccattgggagctaaggacaaactgttatcccaattttacaggtgaggaaatcagagcttatttaaataaattgccgaggtcacacaactagtaagcgacaaaatctcagtcaaaccgaggctcttttggttcaaagatgtgtattgagctctactctgctctgcagggacagaactaagtatgtttgctattcaggggatacacagtcattccatgagcaagttacacaatgtaaaataaggacattgtgaaaaacaaaaccataccgtacataatgcactttatagtaaagtactgggaacagagtatttggtaaattgtaactataataataattttaaacagatccacaaatcacacttattattatattctgtttcacccgggctttgccaagcttcccacatttgtactagatcctcttggctttagtttctccccagttctctaccctttgaattcactccaaagcttccctagaatctttgctctcctagaaattagattaaacaggcacctgctcacatcatacatcccctgcccttgtcaccagacatgcacacatccatcttctgggatttccgttctcttgcagaaaagtctgcatgggaagctgaggcagaaccaagtccaccagactccgaggaaagagaagtctggaccctgtaaccagataaaagtgaaaccaggacttcatttattccacaaatactttttgactacctatagatgacaggcactgttcaaggcattgaggttcccacagtgaacaaaagagacaaaaacgtctgcctttgtgagtttatatcatagtggaaggaaatagacaataaaaataagtaaaatatagacattggtatgtagatggtgataaatgataaggagaaatataaagacagatcggaagtgacaacagtggggaagtggaattggtatctgcatttaacgttgttttttaacagcaaattcaggatggggcagagagcagtgagaaaaatgaggcccttatgctcagcgcccccaaccccgcctcggtggggtcactattcattttggaacattgcccttgggaccaacatattctcagtggtccttgtgaaggtttccaccctaagtccctcatcctcaccaggcaatattcattaccctacagcaaactccggaggcaacgcggagaaagtgtgaatcaattcaagactaaggttgccaaaatgtttgatcagctctgcgtcagccttgacattacattacattacagatcccctgatcgccaccgtcgcagaagctctgaattaaaagcgtgcatgtagctgcacatccattgctggcacttcttccgttagcctccgctggaactggttagtgaggacccctccatttcacaagacagcttcggttttgcttcgttttgacttccgcaccccgaagctgtagcaccagtttgttttctcacggcacaggggcggcttccggggcgcggcgtgctgggggttgtagtccgcgctctgcctcctacttccattacagaaggcgatgggccgagagctgaggaactacaactcctagagtactccgcgccgccgggacgccgcgcggctgcggggctgggcgagcgcaaagatgtccgcgcccgctgccgggaggcgaggtgagtctttgatcgtaaccaggagcccggagctgaggcagttcctgcacgtgtcgcggggccggagaagct

SEQ ID NO: 27760 - DNA, 2300 bp, Homo sapien
gaagcagacggtagaacggtggttaccagagactgggaaaggaaggaagaaaaggaagacgggaagaggttcgtcaatgggtacaaagttacggtgggataggaggaataagttgtggtgttctattgcacggtagggtggttatggttaacagtaaggtattgtatatataaaatagccggaagagaggcttttgaatgttcctgtcacaaacaaatgataaatgcatgaggtgatggatatgctaactaccctgatttgatcattatacaacatatacacagcatatattgaaatgtctaatttaccccataaatatgtacaagtgtcaattttaaaaactttgttattttttggccaggggcgatggctcacatctgtaatcccagcactttgggatgccgaggcaggtggatcacgaggtcaggagattgagaccatcctggctaacacggtaaaaccctgtctctacttaaaacacaaaaaaattagccgggcgtggtggcaggcgcctgtagtcccagctactcgggaggctgaggcaggagaatggtgtgaacccgggaggtggagcttgcagtgagcagagactgtgccactgcactccaacctgggcgacagggcgagactccgtctcaaaaaacaaaacaaaacaaaacaaaacaaaatttttttttaagaattaggaattcctaggacgtagcaagctgctctttcagctctgtccactctgtcatcccacgtcgctcctattccctgtttcctcccttctttatatctattctactcctaaattcctcccccttattctttattgctatgtatggaagtctggggaaaaaaaagtgaagggaaagaatccgatctggagggcaatagtagggaaggggaaaagagtaggtatttaggagaggagatgaaaatcctctcgtttctgaaccgatctgatgagtcagcaaagaagacttaccacagctccaggactttggggggtagcttttcagggacctggtaatactgaaggacccaggagaggacttcttgccaccgatccatttctgccagggcctggatccccacaacacacagggagcacttcacctccaatgagctgtcagcagaaaaaccaatttcagttagaagtggttcccctccatttccattcccacctccaccttgggactgttcctctccagctcccaactcagcagccatcatctctctcatccctgttagtatttagatgggcttcacaattggtctcatgggctgccctttcccccaggaactaaaagttcctgtaaccctctttcaagaggcaagtcagctgttgctcaacgttcatctttgtatccaggtgaaatcagatttaaatgaagaggaagggtaatcctgagggggaaataacacacagcaccggtgtgtggctgaaaagagagctggaactaagagtttgctctgtgaacaaatgggcttggagcaaggtttctggctgagtggaggtatagactccatagctggctaaaaggcaccacctagtaaggttcctccagacacccagaagcaaagccttctgcattcactgaaatgagctcccacccagtcccctaaaacacagccagggctctccagatcatccttctttgtggtcaactttagctattctacctaccacctccctagcgtggcctaacccaagtttacaatgcaaagaaatgactccctcacctgccagacgaggctggtggcattagaaagagcaatgcaagcccaaggtttttttctccggattcttttctttttcttctttttggtagagaagagggctcattatgttacccaggctggtctcgaactcctgggctcaagcaatcctcctgcctcggcctcccaaagtgctgggattacaggcgtaagccccagctcccggccctgaattaattctttaatccagtcctctaattggaccagaacgctgctcctgccatgacccccattccccatcatcagccaaggtcaggaataaacaaccttgggcggggcggggagggcggaggtacctgggagaggacttttaccacctgcttactgacagaacttagcacttaatacacattcagccttcccatcatgtcattgtaccttggaacaaggagcaaataattggctgtgggatccccactaagtttttgttacacgacttcccttctctgtagaatgggcacacgatgagcgaccaccctctcggagacaaaccactgatgaaagcgaggtgtaaagctccttgtgggcaatctggg

SEQ ID NO: 27761 - DNA, 2300 bp, Homo sapien
atgaaaggcaattcagggccaccgtcattactagtatcatcatcatcaccatcatcatcatctttatcccaacaccttaagaacccgttcatgatttatgtggtggttcacaaagagaactcgaaaagtgaatttattcagctatgtttactgagctcacctgatgcactcaactagctatttttggtagggagggcactaagatgaataacacaaccccttcctttaaggtgttgctgttttgtagagtgtttagacacacacacacacacacacacacacacacacacacacccctatactccaaactagaaagtgataaatacggctgggcacggtgactcacgcctgtaattccagcactttgggaggccgaggcaggtggatcacgaggtcaggagttcgagaccagcctgaacaacatggtgaaaccctgtctctactaaagatacatattagccgggcatggtggcgcctgcctgtaatcccagctactcaggaggctgaggcaggagaatcgcttgaacccaggaggcgaggttgcagtgagctcagatcgcaccactgcactccagcctgggcaacagagcgagactttgtctcaaaaaaaaaaaaaaaagaaaaagaaagtgataaatactatggggctgggcgcgatggctcacgcctgtaatcccagcactttgggaggccaagatgggtggatcacaaggtcaggagattgagaccatcctgggtaacacggtgaaaccccgtctctactaaaaatacaaaaaattagccgagcgtggtggcacgcgcctgtagtcccagctactcgggaggctgaggcaggagaatcacttgaacccgggaggcggaggttgcagtgagcctagatcacaccaccgcactccagcctgggcgacagagcaagactccatcaaaaaaaataaaaaataaaagaaatgctatggaagaagtaatagaatatgctatgggagagtttggaagagaaatacacatagagttatactaataaccaaaatcctttattgaccatttatcatgtgcttggcacaattagcttaatcctgagtcttaattgtcaggatcttacattataagatagacaaaaattcaacgcatgctttactaagtaccgtttgtatcagtgggtaaagcactgtgtttggtactctctcaaatgcaaagatgattacgacacatgtactatcgtttatgaatgggtggccaacagaacagattgccgcataggtaagcagaaatctgctctcattctctattggccacaagcaggcatgtcttaggagcagaagggtaggaagatctctaactgtgcttggaaacttggggagttaccacgtctggctaaagtggtattgtcttaaggaaaacctatgaatttgcctgcgttggcttggtgctgaggaaagtggaagagagaggctggggtacacctttcaacatgaatggaactgaccactggagggaaagaacaagaaacagcagtgagaacaaggaacaaagaccatccagcccctcacccacctggggggaagtgaggggagatgggcagggtgacaacgtggccaacatctaaagtgtgaagaggggcttttaccaagtgcccaccccttcccgagcagggggcaaccaacagcatctggcgggtcttactactgggcagaggcaggggaaccctggtatgagttctggattacataggagatgtgacttggacacgtttggggcttaaaagtaggaagggatcaaggggggagatttgaaaatcccggtggaggtgcgaggtatccggggagagggtaaaaacgggaacagtcttcagcacctgcctgtaccaggagctctgtgtatgccatctcatttccgtctccagcaaccaggcgggccttggcggcaggaggcacaggctttgggagcagaggccctgcagcttgccaagcacacacggccctagggcgcccagctgagacggcaccttggcacccgggcccgctgcagcccgctccggtcagctgcaccccagtcaggagcctttccagcgggtcggaggagaacggaagtttggggagacccgcgcgattcgcctggctgcattttacatttctttctccggcagctggggtcacgaaggctgctctcgccggcggtgttggaacgtggacacgtgcgctttggtaatagggcagcctcccccgcgggcgcagtccccgctgcgagcgcccccggctgctgaggcgggaccgaggacccggagatttgagccgcgggtgggc

SEQ ID NO: 27762 - DNA, 2300 bp, Homo sapien
tcatctccaccagcaccctgccctccctggacaccacacactgggccactccaataccgggatgtgccacatcttcaaattgcttgggctgtgaccctgggccgggctgcaccagcacccatttgtgtctgacattgtgctgggcagccccactgtgctgccaccctcctcaacctgctccagtccagcaccctgcttgggccactgtggaacatactacacaaacgcccactttgcttgacacacctgatggccttagcacggaattgttcaggagggtaccatgaaggacggaaggaagagccccatagaagtgtaatggatccttacattatatagtccagcctccaacccaaggttcacccttgtccattctgcactggggcagcaacaccaattactttgctccaccgacctaccaagattcagatagaatcattggattgactattaatagttttctgctgatagttgctgcaagcaactgcagcttgctccttagccttctactgacttgctgtatttagcatattttatcaaattttgcaacctcctctcctcattgccctcacttgagtttttgaggttcctgtttgtggacaagacttaccagatgtatgaagctggttatataactgattggtcagcaaatataatgaggacggaccctgcgcccaccaccgtgtacctgtgtaaacaccatactgcgcaaagtccaccagccttccagggagaacatgctgcactgtgggcgacactgcctccgttccagcagcaatgtaagcggagtctgggctgacgatggacgtgtggatagcctgtatgtgtatatctgtgctcatgcttctaacacacatccaccctattatggacacgtttatacatcttcatgccatggtattttgtaccttactgcagaccctaccaacgcttcagtgaggttctggcagctttgggtttttggaggctatttgtctgttgctgcggggacggctttcagaaagaatgatcgctttgggggaattgtaccctgctttcctgcgcaaattccagcggctggagtttgaggcccctagcagataacccttctgcccctacccccatgagtctacatacaagaaatacatctctaaagaggtaataagcctttccggtgtgcatgttacagatctcttaaccttatatatacacagatggtccatcacttaccgtggtttcacttacgatgtttcgacttcatgatgggttcactgggacttgaccccattttttttttttttttttagacggagtcttgctcttgtcgatctctgctcactgcaacctccgcttcttgggttcaagttattctcctgcctcagcctcttaagtagctgggattaagcgccaccacgccgagctaatttttgtacttttagtagagatggggtttcactatgttggtcaggctggtctcgaactcctgacctcaggtgatccgcctgcctcagcatcccaaagtgctgggattacaggtgtgagccaccgcgccccctgaccccttcttaagtggagaaatatctgtatctgcatgcccacaggggagctcctaattacaccatgtgccgcatccaagccacaggccggtgatgtgaagacacccgatccaagaaatacaatagcattaagaaagaaaaaatgctgccatggatactaccaaacgccaaatgactctaacacgtaggctaattgcaaggaccttaaaatcgcaaataaaaaggcgcctgtaggtcgggcgcggtggcccacacctgtaatcccagcactttaggaggcgggcggatcacctgagaccagcctggccagcatggcggaaccccatcgctactaaaatacaaaaattagccaggagtggtggcgcatgcctgtaatcccagctactccggagcctgaggcaggagaatcgcttgaacccaggaggcggagtttgcagtgaaccgagacagcgcaaccgcactccagcctggacgacagaatgagactccgtctcaaaaaaaaaaaaaaaaaaaaaaagcgagggctggaagtctggagcaggtgcgcggctgcaacggcagccgcgggaagctcgggccggcagggtttccccgcacgctggcgcccagctcccggcgcggaggccgctgtaagtttcgctttccattcagtggaaaacgaaagctgggcggggtgccacgagcgcggggccagaccaaggcgggcccggagcggaacttcggtcccagctcggtccccggctcagtcccgacgtggaactcagc

SEQ ID NO: 27763 - DNA, 2300 bp, Homo sapien
attatatattatattattataaaatacataagcctatataatgttatatataatataatgttatataatattatagaatataatattatataatatagaatattatattatataataatatatgatattattttatataataatatatgatattattttatataataatatatgatattatattatataataatatatgatattatattatacaataatatatgacattgtattatataataatatataacattgtattatataataatatataatattgtattatttaataatatataatatattatataataatatatattatattatatattaatatataatattatataatataatattatataatgttatataataatatataatataatattatataatattatataataatatatgatatattatataataatatatgatatattatataataatatataatattatatttaataatatataatattatataataatatataatattatataataatatataatattatactatataataatatataatattatactatataataatatataatattatactatataatattatataatattatattatataatattatataatattatattatgtaataatatgtaatattatattatgtaataatatgtaatattatattatgtaataatatataatattataccatgtaataatatataatattataccatgtaataatatataatattatatcatgtaataatatataatattacatcatgtaataatatataatattacatcatgtaataatatataatattatatcatgtaataatatataatattatattatgtaataatatataatattatattatgtaataatatataatatattagattataatatacattatcttataatatattattgtataatatattatatattatattatatataatattatattatatataaaatatatattattttatacaatatattacatataatatattatataagatattatatatatcttatataatatattatatgtaatatataatttatattatatattatcttgtatatataattatacatattatattatatgtaataattatatataattatatattatattatacgtaataattatatataagtatatattatattatatgtaataattatgtataatatatattatattatatgtaataattatatataatttatgtattatattatatgtaataaatacacataaatatatatattttattatatataatatatataattgtatattttattatatataataattattgattatattatatattaattatattttatattatttttaatattaattgatattaattaataataaatttaaaatattaattattattttatatattatattatattatatattatattatatattatattacattatatataatatatgttatattatattcttatatattataatatataatatattataatatatattatattatattcctatatattataatatatgatatattataatatatattattatctaatataatatattatattatattatattatatatattatattatgtataatatataattatgtattatattatatataattatatataattatatatatattatattatattttattattatatatattcatatatattatattatatataatacatattatagtatacgtaatattatatataatataaggatgcaggatgtaaaaggaaattatatatatgttatatatataatatatattatattatatataattatatgtatatatatttgtgggtgccctatttcccatctcataacttattttaagaagccagcataataatgtgtgggcttgggattcagtttttgaaacaaaacactgagcctttgatgaccttcctgtacttgtaaaagcccacctgtctgcatggcagcagttggacctcacagtgtggattgtgccttcaccctggaatgtttatgccctatcgccatggtgatgggattagggatctcctgcccttggtcctaagtgccactatctgtgctgagtttttcaaaggtcagagcagattgaaccattgtggtttcattttccctgattttgatttttcttatggggaacctgtgtggctgcattcaaggtatgttcatactggcctgtcaaatgcgatcttttcaaattactagttaatgctttcaa

SEQ ID NO: 27764 - DNA, 2300 bp, Homo sapien
tttgtttttagttttattgatgtgatgtatcacatttattgacttgcgtatgttaaaccatccctgcatccctagtatgaaacccacttgaatcatggtggattatctttttgatatgctgttggattcagttagcttggttgtagcatttcttattattccatctgtggaatgtattggttgaaataatgaaaacatgttctatcctcactgcttagcactttgtgtttctttaatagccttcccaacagggcaacataaaagcaggagccctgctagtctccccttaacccggaatccccccttctccacagctcgctcattggacaggatagactgggcgcccaggcttcaaggtaaggacatgctctgtcacctagaggtgcagtgcttgggaaggccaaccttggagggttgcctgccagctttacagtgacagaggtgttgagagggactgaccaccagtgcagaaggctgtgctttgttggtgacataaaggattgtttcacagattgttggggagggacaatcccaaggcctcccctggccctggtgctggctctgcacaaaggcaataagagagggatgctggtaagggctgacctgttgctgtgctggggaggaaggtgctgggctgaaattcaggaggctgaggatgcagcagtcccataggaggtacatgaccttcaggatacattttcttcattgatgatcaatggaaatgagaaatcactgactattttttctatcattggaatctactctccactgctcatgctgttcctgtcttttggggaagatggaggatcaatcagtgtgcgctgccctgagtggaaggaaggagaactgtgacaaaaattaaggaaggatgagagacgggagggcccttcatccagctgcttgcagagtcctcctgaggaggaaagccccgtggctccctggcgaaggagcagtgagggctgcgtgactcccacagtgaagtgtgtggtatgtctgaggacacccaggctggtggtccatgaggagccagtggcagagtgagaagcagaaaggccaggagggtggctggaggccaggctctgagtcattctccatgtgatggaaacagccggagcccagtgggcttggaggtacaggatgcggtggctgatgacagaacaatgtggagagaggtgtcatttgtcaaatccttactttgttctgggcattgtgctaaaaattctgatggctcatcccatttaggggctgaaagttgcagaggtttaggaagctcacccacgatactggagcccccatctcctgccctagtgctgtccaccttctcacccagccaccacctgtttcgggggaacacacagaagtggtaacctcttatggagaggcaagtaaattctgctgtttttgttattcacagaaaaacactggctcgtgtgggttgggaaggtgaaataccagaagtatttcatctggttatttctacccatgcgactcctatagtattgaaatgcataggttagcatttttggccaatttactcagcattctgggttaaaggcttttatttattttatttatttatttatttacttttgagatggagtttcactcttgttgcccaagctggagggcaatggtgcgatcctggttcattgcaacctccgcctcccaggttcaaactattctcctgtctcagcctcccaagtagctgagattataggcacatgccaccacactgggctaatttttttgtatttttagtagaaatgagatttcaccatgttggtcaggctggtttcgaactcctgacctcaggtgatctgccctcctcggcctcttaaagtgctgggattacaggcgtgagccaccacgcctgccctaaagtcttttaaaattcacttgtataagttgacttagttttctttaaccttgtagaaaaatacaaaaatggcaatctcttttatcacacaaataatgtctttttaatggagtgattttttttctaattgaggtattatgtacttttcatttactaattattgtttacatttgaagtgttttatgaattaatatttaattgcatagatgaagattactagttataggcattttactaaccaatactcattaagcatagcgtggattcatatgacatcaaggagctattttatttggtaaaacgaaaaagcacaagaatgaacgaacgcaagaactgaaacagtggagacacctagaatgacttgtctaagatctaaatcattttgttgtcttcccagcgtacttattatcctgatcattgtcat

SEQ ID NO: 27765 - DNA, 2300 bp, Homo sapien
aaacctctcggaaggataggcctttgggtagctctgagacccacggggcactgctgaagcaggaagcacatgtggctgcgggtccttgctcagaccttgtacattgaaggtcctttggctccatgcgtaaggaactatgaactggctgtctcccttgttgctccttaatgctgaaggaaacatgaggaagagggatgcaggagcttccagtgtgggcagcactggtcacagtgtttgccagtgtcaaagggttaaccatatcaaggctgttctgtttttctgcctatattaatgtccagtttttattatcacaactaagcagtgggtgttgctagttcttttattaatacacatactatcatttgtttatttttcctttctctaactagtctgtgtcccagcaggagaccttttttttcttgtgtgtgtgtgtgtgtgtgtgtgacggagtttcactcttgtggcccaggctggagtgcagtggtgcaatcttgcctcactgcaacctccacctcccgggttcaagcaattctcctgcctcagctcctgagtagctgggattacaggcacctgccaccatgcctggctaattttttgtatttttagtggagatgggggtttcaccatgttggccagactggtctcgaactcttcacctcaggtgatccacctgcctctgccttccaaagtgctgggattataggcgtgagccactgcacccggccatgtgatgggaatgttctgtgtccataatagatgctgcatattgctggcccagctcctgaggctctttggacctccaggaatcggtgtctctatcaggaacccttaaccctgacccggactcccagctgggacccagggtgttggagtggcaagagcgctgtcaggcctggtgaagggtgtgagctgtccaacggggcagggaggaggcagggcctgttctgcagttggacagacagagccctctagctgctttctggaagactgaagggcaggtgatgttggagggagggagtgcaggcgggggctgtgagggagttcaggtcagaaacaggtggcgcctggattcaggctgtggtggtcacggtggggatgaggggctgctttggattgtgctgaggatgtggggtggtgcgctgctgcatgactactgccaggtctctctgctcttggtgtctgcatccagggctgggagggggtcaaatgtatcacactatcggccccaggcccaccaagcctggggaggtggccacccttccatgatggcatttggatgttccctgtgtgtggggagggcacggggactccattcatagaccacctctgggacagtgtgtctgcctctgaggtcagacgctctgcactgggacagcgtggagtggagggaaaccaagcttggggctcattggaggggcttgctggcagacaccgccctttgtgggaaactgactgtgggagaggggaaccccaacctctgtcaccacatccctcttccctgttgtcacacctgtcacctgctgccgtagccatgagacttcccaagggtcactgctgccactcactgcacagcctggaagggagtccacaggggacatacagtgagcaagagacctgtgccactcaggcctcctgggggtgtccccagtgcagccatgatgataatcacagctaccattcaccaagccctgcccacagtctaacctactctattcacaacactcccagcagcaaggcaagtgaggtgctgccgtcatccaggctggacagttcagtgatttgcctgaggccccacagcaggtgagtggcaagtccagcgtcagagcagggcaggctggcggtgccccctgagccccctttgccatgcttaccgcatgcacatcctgggcttgtgcaggaatgccctgtcccctacctgccctgctccgtgcaaaaccctgtgcctgggagacatgctgagagaattcatggaaacaaatgtgttactgacagcctctttgcctccagagttcaactggagacagagaaaccagctagaggcagagggaggtaacacggagtcccccagaaaggtctgggctgtgcgtgcttcaggtaacctcccttgaccttcaggagaacgagaaggctgcctgatcagagagtctctgaagaagattctgtggctacaggcttcagcagagtgtgagggagaccccggttatttcctcagctgtttccaccaaatcctcctgtctttcgtggccaacaccccaggcaaggcttggggcccccgtctgctgctggacggtaagtcctgg

SEQ ID NO: 27766 - DNA, 2300 bp, Homo sapien
agaagaacaaggtgtggcacttctgctcctgcagctgccgcagcagcccctcccccctccacattgaaccccacgttggggtcactactggagtggatggaggcccttcacatttctgggcctcagccacagctgcagcaggtgcccagaggtcagaaccagagatcccagacctcccggaccagctcgtgccccaaacgaaatgccatctcgagcccctaccgctctacgggaggcctcccggaacgaaagcggagaagggggccagcctcatcccactgccagctgaacctcagttcctgaaacacagtgagtgaggacggacctcaggctgtctcttcgggtcacacccagtgtgaaaagatggcagatacagcaccagggcagacactcgcccccaggggtggctcccccagatcccaggcctctaggccctgtagatgcaagtttcccctgctgccacgcaggcgaggggagcctttgatgctgccacctcccttagagctggggtaccgggtcactgctgaagacctggaccaggagaaggaggcggctttccagcgcatcaagagtgcactgcaggttgaggacaaggccatttagtactgcagaccctcacggccttcccacactttgtcctcacttgcaacagaggcttctggtctgcctgccatttctaaagcacccagtatggatgcacagcaggagagacacaagtcccaagactgcctgggcctagtggccccccagcatctgctgcacaggcctgtagtcccagctactcaggaggctgaggcaggagaagggcataaacccgggaggcagagcttgcagtgagctgagatcgcgccactgcactccagcctgggtgacagagcgagactccgtctcaaaaaaaaagaaaaagaaaaaaaagttattgtgacatttctgtatgaaatcagccttcactacatggataggaccagcacgcttctgcggcacaactctgcaatcatactacatttttttttttgtattttttttattccttttgagacagagtctcactctgtcacccaggctgaagtgcagccgagatctcggctcactgcaacctccacctcctgggttcaagcaattctcctgtctcagcctcccaagtagctgggactacaggcacacgtcaaaaggcctggctaatttttgtatttttagtagagatggagttttgccatattggtcaggctggtctcgaactcctgacctcaggtgatctacctgtcttagcctcccgaagtgctaggattacaggtgtatgtttatttatttatttaagatggaatcttgctctgtatttattaatttatttagttgagatggagtcttgctccatcacccaggctagggtgcagtggtgcaatctcggctcactgcaacctctgacttccagtttcaagcgattctcctgcctcagtgtcccaagtagctgggattacaggtgcctgccaccacagctggctaatttttgtatttttagtagagacagtgtttcaccatcttggccaggctggtctcgggctcctgacctcatgaaccacctgcctcagcctcccaaagtgttgggattacaggcctaaggcaccatgctcggccatatttatttaattatttagagacaaagtcttgctctgtcacccaggctggagtgcagtggcgccatctcagcttactgcagcctccgtctctgaggtttaagcgattctcatgcctcagcctcctgagtaactgggactacaggtactcaccaccatgcagggatatttttttctattgttttatagagacacggtttcaccatattggccaggctggtctcgaactcctgaccttaggtgatctgacagcctcgtcctctcaaagcactgggattacaggcatgagccgccaagcccggcctctcactacatttaagtgacaccatggctcatgcctgtaatcctagcactttgggaggccaaggcaggtggatcacctgatgtcaggagttcgaaacgagcctggccaacatggggaaaccccgtctctagtaaaaatacaaaaattagtcaggtgtggtggtacaagcctgtaggcccagctacttggaagactgaggcaggagaatcactttaagcgggaggcagaggttgcagtgagccaatctcaaaaaagaaagaaaaaaaaaaagaaaaacatatgatgctggggcatctcggcctcaatacctgcatgagcacagtcacgtccaggccagggctgctggtcgaggtccggcccca

SEQ ID NO: 27767 - DNA, 2300 bp, Homo sapien
aataataaaacacacagctatagtccaagctacttggcaggctgaggcaggaaggtcccttgagtccgggaattggaggctgcattgagctataatcgcaccactgcactccagcttgggtgacaaagtgagaccctgtctctaaaagaaaaaaaaattggcctgtgagcatgggtttgattttcaaacaggacctggagggtagggacagacagtgctgtcacccttaggtgctgaacactcagaaacgggccagcggcagcccttccctcacctgcagacaccagattgggcagaacagcacatggcacttgcagctcttgcagtgagggcagaacccagtgtcaacccttctgcctgtgggaggggctgctgaggcctgcggagaggccagggtggaggctcgtccccttgtccagcccttggcgtggtctccaccaggtccccagcccaccagtgcagggcgcccctgagcctgctgctgccatgggccctgtctctacccaggacgtccccacaccctcgcagtgtcagggaaatgatcatggtggcggtgacactccgcaggcagggctgctgagagaagctgagaagggtcacactgcaggcaggggcccgtgtgacaagcccctctcaccccgagagagctgaccaggcagctcacgagcagagccacatcccgggagtccgagaaaggtcctggctgggctcagccacctcattggccacgggcagcctttgtcatgtgagccttgctctcctggggaggctcaggctgacagctgatgtgggcattgccgaaggtaacccgtggcccagtgtatatggccgggtctcctcaagctgcattcattcaagtaggacccagggtgcgtgcccatctccagcccagggcagctcccctgtaagctgggtgagctactgaagccaaggcgggaggcagctgacaacacccacagcccatgcggaggtggtggaaaggctgaactcagcagcaacaccaaatcctggaccaggcaaaaaccacccaagactgaggggctcgtgccagagcggtggccacaggtaagaacccgggcccaggctgtgtggcaggaatcctccatgtcccagggcttagcatagcaaaggaagaccagccgggtcaccctggtggccatctgtccctgtcccacctgcagagtcagaacagcctctccccagtggggatcatctctctctgccaaagcaacagcggtccctgccccaaccagactaccccactcagtggagttacggatgctgctccagcatcctaacactgcccagctggtgcctgcctgtgctcacccacaccccccaggccggccttccctgcagcctgggcttggccaccttggcctgattgagcactgaggcctcctgggcacccagccccatcactgcacctgctgcttccagccccaccccaccggctcaggggttcttcccagcggcgctgatcatgaagtcaacatgcacgcaagtcgtctcaggaaacttcttaatgaaagtgtcggccacggtggtgtgtaggtggctgagctcagattgcagctgctaagacaccagccacttaccaagagaaagccaggctgcttcaaacccagggcccacggcaaaaaagcatcacttccggccggggagtctggaagccacgccttgtgggaggtcacactggcatctaggccttcgcctgcattgcagaaggagagccgggtccccctcctggagaacgctgcgttccccagccccacaccggctttgccaccacacaggctgttgaggcaggaggcgggtaagacgtagctgtagacccaaagcaaccaccagccctgggaccctgcgggagaggagcacttttagaacatggaaaagtgtggtcatcccatcattagacagcacacatcctacataaataaaaagtcgtatggggaaggaggttggggagggaataaaaaattggcacagacattgatagactggtttccagtttcaaggtaacagatgcacatcatgagaccagaggaggcagagacaaggctggatttggcttttctaagcaacatgtgttcctgcgcagggctgaatggtcgctgagacagagatggaagccaggacaagggagcccaccgggcccagataggtacagagagcagaggctcctgttctgtcctcgccacccacgagggtgacactgcttgtaaatggtggctgtgctctcccagcaagaaaaaagcacaactaaatccacactgcacacagacgcagacagaaagcct

SEQ ID NO: 27768 - DNA, 2300 bp, Homo sapien
gggccactgagacccagaagtaccaaggctggagtcagcttgcagcacagccagggtcgaggtcactccctccctgaggactctagcacggcacagcccctctgcctctctcctggtggtggcgttgaaacagcaccctctgcttcggtcctctacaggatggcagagaaggaggcagtcaataagatgtccctgcacaaccttggcacggtgtttggccccacgctgctccggccctccgagaaggagagcaagctccctgccaaccccagccagcccatcaccatgactgacagctggtccttggaggtcatgtcccaggtatgggaagacagcctccagcccatgcaaccccagcctgacagaggtggcctctgcctgccccacccccagtcctgcccatcttcccacttgcattgtatgtggtggtggctgagattcagagacagggacttgcctaggtttgcatggatgggagtgatagggggtgcccaggccacctcctggtcctgctggtgcaccttgctgggggcttaaaaccaccccaagtgttcgagtgtggtggctcatgcctgtaatcccagcactttgggaggccgaggcaggacaactgaacccaggtgtttgagaccagtctgggcaatgtagcaaaccccatctccagaaaaaatacaaagaaaaattaggcaggcattggggcacacatctgtaatcctaggtatctgggaggctgacacaggaggattgcttgagcccaggagttagaggctgcagtgatccatgatggagccactgtactccagcctgggggacagagcaaggccctgtgcatctctaaaataaataaccacccctcacccaacaagtcatgccttgtcaggaccccaccccacccccgtcccactgtaaggggttcatgacaccagcaggggtttctagcacctgaggtggacttgggagcttgggccccaaagacctccccaccagcagctgtgagccccgctctgagccactctcctcttccccactccgcgagggcaggtcgaggtgctgctgtacttcttgcggctggaggccatccctgccctggacagcaagggacagagcatcctgttctccaccgatgtctaaaggtcccagtccatctcctggaggcggacagacggcctggaaacctctggctaatcaggccatctgtagagtgggaatcaagattttctgaggcatccttgggccacccccaggtgtcaggccatctgccaagagacagcggcccaaagcagaaggacaggtggcctgggcagatcccgcccaggtctgaaagccccaggctggcctcagactgtgggttttttatgtggccacccgagggcgccccaaaccagttcatctcggagtccaggcctggccctgggagacagggtgaaagcagtggtttttatgaacttaacttatagagtctaaaagatttctactgaatcacttgtcaagaagcgccctctctggggagaagggaacgtgaccggattccctcactgttgtatcttgaataaacgctgctgcttcatcctgtgggggccatggccctgtccctgtgtgggtggggcctcttccatttccctgacttagaaaccacagtccacctagaacagggtttgagaggcttagtcagcactgggtagcgttttgactccattcttggctttcttctttttcttcccagaaggatttttgtgcagaaatggttcttttgttgccgtgttagtcctccttggaaggcagctcagaaggcccgtgaaatgtcgggggacaggacctccagggagggaatcccaggctatgcaccttagggttcgttctccagggagagcgacctcgtcccccgatcctgaccgcccttccggcccacgctctcctgtttggcttccacaggcctggacttctctggcttctctgcccacacactccctgcccccagtgtccctgcccctgccccagcacaggtgacttcatttctgtcctctcagctcagtggactcgctcaacttttgtataagtctccacttggtggtagcagcttgctgatgacttgttttaaaactttcatcctaaataaccttttgatgcttgaatatttttaagttttatacatagtttctaattttttccccaacagatccagatacctaataagatgctggaatgtaatcctggacaatccgtgtcctggcagcatttggtcttcctctaagcgcctggctccgctgttctcaggagtgggttctgaagtctctggagaa

SEQ ID NO: 27769 - DNA, 2300 bp, Homo sapien
acctcgacctgccctcgcggagtggggaagaggagagtggctcagagcggggctcacagctgctggtggggaggtctttggggcccaagctcccaagtccacctcaggtgctagaaacccctgctggtgtcatgaaccccttacagtgggacgggggtggggtggggtcctgacaaggcatgacttgttgggtgaggggtggttatttattttagagatgcacagggccttgctctgtcccccaggctggagtacagtggctccatcatggatcactgcagcctctaactcctgggctcaagcaatcctcctgtgtcagcctcccagatacctaggattacagatgtgtgccccaatgcctgcctaatttttctttgtattttttctggagatggggtttgctacattgcccagactggtctcaaacacctgggttcagttgtcctgcctcggcctcccaaagtgctgggattacaggcatgagccaccacactcgaacacttggggtggttttaagcccccagcaaggtgcaccagcaggaccaggaggtggcctgggcaccccctatcactcccatccatgcaaacctaggcaagtccctgtctctgaatctcagccaccaccacatacaatgcaagtgggaagatgggcaggactgggggtggggcaggcagaggccacctctgtcaggctggggttgcatgggctggaggctgtcttcccatacctgggacatgacctccaaggaccagctgtcagtcatggtgatgggctggctggggttggcagggagcttgctctccttctcggagggccggagcagcgtggggccaaacaccgtgccaaggttgtgcagggacatcttattgactgcctccttctctgccatcctgtagaggaccgaagcagagggtgctgtttcaacgccaccaccaggagagaggcagaggggctgtgccgtgctagagtcctcagggagggagtgacctcgaccctggctgtgctgcaagctgactccagccttggtacttctgggtctcagtggcccaggacaaggggccagctctgggctgatggggaggtcttcatgatgtgcttgggagggaagggggggcggtccaaatgcactgctggccacggccaaagctctgagctctttgttaaggccacagtgcagagggaggagggtggcaaagaggagaggcaggggcgggggtggcagtggtgctagtccttagaagcagtgagttactgcagacaggggtcaggggataggtccgtggtgctgggggtctggtgggagcagaggggcaccccacggcctggagacctggtgtcctgggcagccacaagagagctgggctacctttccaggcggtctagaaggaaaaggaaggtgagcaggttggcctccggcagggacgacaacaggttgagcatgcagctcttctttgcaactgggtctgaaagagctgcaggaggcagtgggtcactcccctgggttacgacaagccggagacctctcccgaggtggtcacatggagcgcccgggacacgagtccttgcgcagtttaggcttgtcatcatcgtcacacccacagcgctggccgccagtgaggaccctgtgaggggcacctgtgtggggtgtgaaccacctgaacgccttttctctgcctcgcaggggtcagcagcacccggcaaacagcagcaggaggagccgctagagcagctgctcatgggcagagctgccctcgggcaactcctgccaccaccccctccccagggagcccaaggcaggggaggctcagcatggaatgaaacaggggagtgagggacacaaggaggtgggaagtgggagggtcccagccccaccaagtacgcagagaacccctcgttgtcctggacaccacaggggcacctgcaggctgggagaccaggtcctctgtgcatgggcccgggaggcagacctgccctaagggtgatgcacaggctacaggtgctgcacgctccagcgcccactctagacatcagcctccaggttgactaagggtcaggtcatgtttgaaaccatgcttggctggaccaggacccatggcaagagcacctgggcaccagtgtttagccctggtctgcaggaaggaggacagcagactttaggaccccacagcacggcagtgctgaccatttcacccacttggcctccttgagaaatatggatggggacccctctggggatgggcaaggccttccaggataggctcagttttggtcccctgctttttgaggttgggttaaaatt

SEQ ID NO: 27770 - DNA, 2300 bp, Homo sapien
ccggacctgcctcaaatgccaggggagggcactgagaccccagagggtccttcccagcatcttcaaagcaacaggattttgtgcctgcagacccttctttgcagcacagaccacccaccctgaccaggacccctagaatgcccagcatccctgggagggccctgtggtagtttcagctccctctgagggcccagaatgaacctggcctgtggtgaggatgtaagcaccaatggccaattgggtccaaaggaagacaccggttcaaacactgaaaccaatcagattctcccacggccttcctgctatcagatgacactggtgcaggggtggttgctatgtacagggcagagccacccaatccccacgcaggcgctgtgtcctgccatgctggcctcctcctggccatcacatcaggccaagcaggggagaggaatgggaatgcccacgcacccctatcaactctgcagacacagaaccatgcacagctcttgggaggagtcagatgagctgctcaaagcccaggagggacccacacagtggtcaggatggcagggacggtgctttagccaaggcagggatggtgggtgactcactcaggatcttcaaggaggccgctgcatttccgtgctctttccagataacaaggacgtgtcggtgatgatgagcgagatggacgtgaacgccatcgcaggcacgctgaagctgtatttccgtgagctgcccgagcccctcttcactgacgagttctaccccaacttcgcagagggcatcggtgagcactggaggccttggcctcatgggagacgtctcctccacgtgcactgctgccctcagaggctgtgaaaagtgaggtgtgggaacctgagctgtgcttcctctgccatggtcggaattttaacccaacctcaaaaagcaggggaccaaaactgagcctatcctggaaggccttgcccatccccagaggggtccccatccatatttctcaaggaggccaagtgggtgaaatggtcagcactgccgtgctgtggggtcctaaagtctgctgtcctccttcctgcagaccagggctaaacactggtgcccaggtgctcttgccatgggtcctggtccagccaagcatggtttcaaacatgacctgacccttagtcaacctggaggctgatgtctagagtgggcgctggagcgtgcagcacctgtagcctgtgcatcacccttagggcaggtctgcctcccgggcccatgcacagaggacctggtctcccagcctgcaggtgcccctgtggtgtccaggacaacgaggggttctctgcgtacttggtggggctgggaccctcccacttcccacctccttgtgtccctcactcccctgtttcattccatgctgagcctcccctgccttgggctccctggggagggggtggtggcaggagttgcccgagggcagctctgcccatgagcagctgctctagcggctcctcctgctgctgtttgccgggtgctgctgacccctgcgaggcagagaaaaggcgttcaggtggttcacaccccacacaggtgcccctcacagggtcctcactggcggccagcgctgtgggtgtgacgatgatgacaagcctaaactgcgcaaggactcgtgtcccgggcgctccatgtgaccacctcgggagaggtctccggcttgtcgtaacccaggggagtgacccactgcctcctgcagctctttcagacccagttgcaaagaagagctgcatgctcaacctgttgtcgtccctgccggaggccaacctgctcaccttccttttccttctagaccgcctggaaaggtagcccagctctcttgtggctgcccaggacaccaggtctccaggccgtggggtgcccctctgctcccaccagacccccagcaccacggacctatcccctgacccctgtctgcagtaactcactgcttctaaggactagcaccactgccacccccgcccctgcctctcctctttgccaccctcctccctctgcactgtggccttaacaaagagctcagagctttggccgtggccagcagtgcatttggaccgcccccccttccctcccaagcacatcatgaagacctccccatcagcccagagctggccccttgtcctgggccactgagacccagaagtaccaaggctggagtcagcttgcagcacagccagggtcgaggtcactccctccctgaggactctagcacggcacagcccctctgcctctctcctggtggtggcgttgaaacagcaccctctgcttcggtcctctacagg

SEQ ID NO: 27771 - DNA, 2300 bp, Homo sapien
ccactgtgtgggtccctcctgggctttgagcagctcatctgactcctcccaagagctgtgcatggttctgtgtctgcagagttgataggggtgcgtgggcattcccattcctctcccctgcttggcctgatgtgatggccaggaggaggccagcatggcaggacacagcgcctgcgtggggattgggtggctctgccctgtacatagcaaccacccctgcaccagtgtcatctgatagcaggaaggccgtgggagaatctgattggtttcagtgtttgaaccggtgtcttcctttggacccaattggccattggtgcttacatcctcaccacaggccaggttcattctgggccctcagagggagctgaaactaccacagggccctcccagggatgctgggcattctaggggtcctggtcagggtgggtggtctgtgctgcaaagaagggtctgcaggcacaaaatcctgttgctttgaagatgctgggaaggaccctctggggtctcagtgccctcccctggcatttgaggcaggtccgggtccttcaaagcctgtgagggttggtgagatggaggcggagaggctgcagccccggcctgcgctgaatttcatcagtgccctctgcccaccacatcctcatacagggcagtggacagaccgcactgagtcctgggcttccacctcctgtccaaccccaaggcaggaaggccaaggccccgcagaagcccctggtccactgcaccaagtggcacgagtgggtacgatggtgtaaaaactggcttctatagaagctgtttgtacaactcttgttttctcttttttaaaaataataaaacagtaaatgaagaaaagacacagagaaggatgtgacatgcctgggccgtggagcactctgagatctcatcgcggacaccactgcccacacctccatcccgtcctgcgcaggccgacactcactgacgttgaaggctgccttcagtgcctggatgtctgcggccaccccagacatgcggtagatgcccacctcctccatgcctcggcgctcgatctcctccacgcactggcgcacgatgtagggcaccttggacctctctctcctgcgggaggagggaatgttctcagtgtcctaacagccctgcttgggccataacacaggagacctgctccctatgtgcacacccggaggtggggtgaggacggtgatgaaggtacccaggtctggggctgcacacagagccttctgcatgcctgtcctccctctgcaagctctgtcctcattgcatgtgctttctcaggaacctttcaagcggccagaacccctgcaaatcacacatgacctttgtgggaaggtcaggaggcctgtctaagtcaagtcagcacgggaagggcatctgacagattccaggcctggggtgagcagcctgtgcccccggctgggaggtcagacccggtgttggtcctgccacccacgtgctgtgtgagaggagaatccgtgacccctgccctgggccttaacacacatccgacgaatgaatgaagggttgcctcagcaccggtgctccaagtcctgcgatgctaagtgcttttctcctctgagtcttagcaatggacaattccaatacctccacacaggacactagagtaagaatccttcacagttagaacgcagtgctgtgcggaggccttaacttgagttctgttttgcacctggatttaccagcacatcaaagctgcttcgcaagccccctcatcagcagggctcatgtgggggagctgctgatggagtcctcgctgctcatgcccacagccctcccagagtgctatgcgagtggctgccgtgcagttgggggtggggcgtggtgtttagacacagataggagtccagggtatgactgatggaggccccggcccacgtgaccagcaaggtcagaggcccagccagattccatcctgaggaagcaaatgaattctcagaggaagtggtctgtgtctgcatgaactgctctcaaaccaacaaataggcttctcttggcaactgactcgtgacaaagggttcaagattgtttgaaaaaaaaaaaggggggggggggacagggaggcagtaggtcctggaaaagtaaattctttattttacaataagaaagtgattacatattttatttttttttacaatggtggaaaattagaagtgattgtgaaaatgatgtctacccgccttgctgatgagtaggatgtgatttggctctttaggaaactgaatttgcagaacttaagaatattgatttataaagggcatggc

SEQ ID NO: 27772 - DNA, 2300 bp, Homo sapien
gtttttagttttattgatgtgatgtatcacatttattgacttgcgtatgttaaaccatccctgcatccctagtatgaaacccacttgaatcatggtggattatctttttgatatgctgttggattcagttagcttggttgtagcatttcttattattccatctgtggaatgtattggttgaaataatgaaaacatgttctatcctcactgcttagcactttatgtttctttaatagccttcccaacagggcaacataaaagcaggagccctgctagtctccccttaacccggaatccccccttctccacagctcgctcattggacaggatagactgggcgcccaggcttcaaggtaaggacgtgctctgtcacctagaggtgcagtgcttgggaaggccaaccttggagggttgcctgccagctttacagtgacagaggtgttgagagggactgaccaccagtgcagaaggctgtgctttgttggtgacataaaggattgtttcacagattgttggggagggacaatcccaaggcctcccctggccctggtgctggctctgcacaaaggcaataagagagggatgctggtaagggctgacctgttgctgtgctggggaggaaggtgctgggctgaaattcaggaggctgaggatgcagcagtcccataggaggtacatgaccttcaggatacattttcttcattgatgatcaatggaaatgagaaatcactgactattttttctatcattggaatctactctccactgctcatgctgttcctgtcttttggggaagatggaggatcaatcagtgtgcactgcactgagtggaaggaaggagaactgtgacaaaaattaaggaaggatgagagacgggagggcccttcatccagctgcttgcagagtcctcctgaggaggaaagccccgtggctccctggagaaggagcattgagggctgcgtgactcccacagtgaagtgtgtggtatgtctgaggacacccaggctggtggtccatgaggagccagtggcagagtgagaagaagaaaggccaggagggtggctggaggccaggctctgagtcattctccatgtgatggaaacagccggagcccagtgggcttggaggtacaggatgcggtggctgatgacagaacaatgtggagagaggcgtcatttgtcaaatccttactttgttctgggcattgtgctaaaaattctgatggctcatcccatttaggggctgaaagttgcagaggtttaggaagctcacccacgatactggagcccccatctcctgccctagtgctgtccaccttctcacccagccaccacctgtttcgggggaacacacagaagtggtaacctcttatggagaggcaagtaaattctgctgtttttgttattcacagaaaaacactggctcgtgtgggttgggaaggtgaaataccagaagtatttcatctggttatttctacccatgcgactcctatagtattgaaatgcataggttagcatttttggccaatttactcagcattctgggttaaaggcttttatttattttatttatttatttatttatttatttttgagatggagtttcactcttgttgcccaagctggagtgcaatggtgcgatcctggttcattgcaacctccgcctcccaggttcaaactattctcctgtctcagcctcccaagtagctgagattataggcacatgccaccacactgggctaatttttttgtatttttagtagaaatgagatttcaccatgttggtcaggctggtttcgaactcctgacctcaggtgatctgccctcctcggcctcttaaagtgctgggattacaggtgtgagccaccacgcctgccctaaagtcttttaaaattcacttgtataagttgacttagttttctttaaccttgtagaaaaatacaaaaatggcaatctcttttatcacacaaataatgtctttttaatggagtgatttttttctaattgaggtattatgtacttttcatttactaattattgtttacatttgaagtgttttatgaattaatatttaattgcatagatgaagattactagttataggcattttactaaccaatactcattaagcatagcgtggattcatatgacatcaaggagctattttatttggtaaaacgaaaaagcacaagaatgaacgaacgcaagaactgaaacagtggagacacctagaatgacttgtctaagatctaaatcattttgttgtcttcccagcgtacttattatcctgatcattgtcat

SEQ ID NO: 27773 - DNA, 2300 bp, Homo sapien
tatactatatatcattatattatattatgtataatatagcataatatattatatattagatataattatatataattatatatttagatataattatatataattatatatttagatataattatatataattatatatttagatataattatatataattatatatttagatataattatatataattatatatttagatataattatatataattatatatttagatataattatatataattatatatttagatataattatatatattatattatgtacaaaataatatattatatatcttctatataatatgttatatataatataaggattcaggatgtaaaaggaaattatatatgtgttatatatattatatattatattatatataattataaatatatatatatatatttgggggtgccctatttcccatctcataacttattttgagaagcacagcataataatgtgtgggcttgggatccagtttttgaaataaaaccctgaaccttcaatgaccttcctgtacatgtaaaagcacacctgtcttcatggcagcagttggacctcacagtgtggattgtgccttcaccctggaatgtttatgccctatcgccatggtgatgggattagggatctcctgccgttggtcctaaatgccactgtctgtgctgagtttttgaaaggtcagagcagattgaacctttgtggtttcattttccctgattttgatttttcttatggggaacctgtcttgctgcattcaaggtatgttcatactggcctgtcaaatgcgatcttttcaaattgctagttaatgcttttgaaatatgttatttaaaaaattatcctctatattttccatatgcagttataaatatgtttcatggttatgttttattcctcaatttatatatttgattattgtaccaagcagagtacatttgaaatttttctacctttaacaaatatgtatcttggctcaggcctgtaatcccagcactttgggaggccaaggcaagaggatcacaaggtgaggagatgaagaccatcctggcaaatacagtgaaaccctgtctttactaaaaatacaaaaaattagccaggcatggtggcacctggtgtagtccccgtgtggtgtagtcccagctacctgggaggccgaggcaggacaatcgcttgaaccaatgaggcagaggttgcagtgagccaagatggcgcaattgcactctggcctgtgcaacagaaagtctctgtctcaaaaaaattatatatatataatatcataaatattatatgttatatattatattatatataattatattatattttattacatattatatatcataatatataatatattttattgtattatattatatataatgtatcataatatataatatattttattgtattatattatatataatgtatcataatatataatatattatattgtattatattatatataatatatcataatatattatatatgatatattatatattatataatattagatattatataatacatattatatatactatattatatatattataatatgatatattatacataatatatattattatatatcataggtaatattatatatgttatacattatatatagtattatatataacatatattatatgttattgtattgtttaatatataatatatattatatattatatataatatagtaatatatattttatattattatattatattatatataattatatattattatattttatataatgtaatatatataaggatgcaggatgtaaaaggaaattatatctattatatatattatattatatataattatatatatatatatttgggggtgccatatttcccatctcataaattattttaagaagcacagcataataatgtgtgggcttgggattcagtttttgaaacaaaacactgtgacttcaatgatcctcctgcacatgtaaaagcacacctgtctgcatggcagcagttggacctcccaatgtgcattgtgccttcaccctggaatgtttatgccctatcgccatggtgatgggattagggatctcctgccgttggtcctaagtgccactgtgtgtgctgagtttttcaaaggtcagagcagattgaacctttgtggtttcattttccctgattttgatttttcttatggggaacctgtcttgctgcattcaaggtatgttcatactggcctgtcaaatgcgatcttttcaaattcctagttaatgttttcaa

SEQ ID NO: 27774 - DNA, 2300 bp, Homo sapien
gtgacagtgaccaagcccagccccagctggctcctggtcactcactacagactcagctcccacaatctcgaatcccacctccagctcctgccattccgagggacctggaggccagggtgcccggcgcatgaccagctctgggttgtggaccgccctccacggcagtggcctgagcgcttgttgtcattattcactttattcactcctggtttctgtctggaagggatcacaaagacatggcttgcaggggagccaatcctgccagggactgaggaaacagatcctggagaaaaccagagactttgctggcacttcagggggaccccagttggctcaatgcccccctctcccccatagccaactgctaaccaatgttctctctggaaaccagtcataattcctaacctggtcaaagcagggtcatctcacacagcccagccacccattctttagcaccgcaggcagctaaagaatgcctggtgaaatgcaagtctgatcgtgtctgcgtccccaagcccttccgtgccccctgctgctctttggacaagcccccagcagcctctgtaatgcacagcacccgcccttgtctcctgtgctggcttccgcagcctggccacactggtcctctcgcccatccacctgacctgactctggcagggcctttgcaggagccattcctccacccgaacccctcctattaaaacgtgttcctagccggttcagccccagcctgtagggaccagccccacatggtcggtgggtctctccccgtgtgccgcaacgagagagtgtagaaataaagacacaagacaaagagataaaagacagctgggcccgggggaccactaccaccaaagcgcggagaccggtagtggccccgaatgtctggctgcgctgttatttattggatacaaagcaaaaggggcagggtaaagagtgtgagtcatctccaatgataggcaaggtcacgtgggtcacgtgtccactggacagggggcccttccctgcctggcagccgaggcagagagggagaggagacagagagaaagatagcttatgccattatttctgcatatcagagacttttagtactttcactaattgactactgctagctagaaggcagagccaggtgtacaggatgactaggcataataaaggcagactaggagcgggaccactgaagcacagcatcacagggagatggttaggcctccggataactgcaggcaagcctgactcatgtcaggccctccacaagaggtggaggagcggagtcttctctaaactcccccggggaaaaggagcctccctttcccggtctgctaagtagcaggtgttgttccttgacacttttcactaccgctagaccacggcccacctggcaacgggcatcttcccagacgctggcgtcaccgctagaccaaggagcccttctggtggccctgtctgggcataacagaaggctcgcactcttgtcttctggtcacccctcactgtgtccccttagctcctatctctgtatggcctggtttttcctaggttatgattatagagtgaggattattataatactggaataaagagtaattgctaccaactaatgattattgatattcatatataatcatatctaagatctatatctggtataactattcttgttttatattttattatactggaacagctcgtgtcctcggtctcttgcctcagcgcctgggtggcttgccgcccacaccagccaccagaagctccccagccccggcccagcagctggtctggggagcggggagagggcagtctgggctcgcggttccggctgggggctgggcaccccggggcgaccacggcaggcccagatggggactccggttccaactctcctggcccagaggctctagggtggtcttgtctgtctcactccgggggcagagaggacgcagacagaccccaacaccactgctcggccgcgatggtgccttagacccaggtcctgtgggctctggcccgagacccctccctctgggaaggccggtgaccgggacagtccacctcgcaggcgcgccggcgcggagcccggacctcagcccgcaatgactcagcaagggccggtgggattctacatggtcctgcgatatccaggcgacggagtctcgcctctaaagtggcccggggagcaggaaggtatgagcctcagctgagcgaaaccctccttgcagccaccacggagggacggggcgcgtctccttctgaatgacgcaaggggcggggcgcgtggtggggcggggaaggcgcga

SEQ ID NO: 27775 - DNA, 2300 bp, Homo sapien
gccaatcctgccagggactgaggaaacagatcctggagaaaaccagagactttgctggcacttcagggggaccccagttggctcaatgcccccctctcccccatagccaactgctaaccaatgttctctctggaaaccagtcataattcctaacctggtcaaagcagggtcatctcacacagcccagccacccattctttagcaccgcaggcagctaaagaatgcctggtgaaatgcaagtctgatcgtgtctgcgtccccaagcccttccgtgccccctgctgctctttggacaagcccccagcagcctctgtaatgcacagcacccgcccttgtctcctgtgctggcttccgcagcctggccacactggtcctctcgcccatccacctgacctgactctggcagggcctttgcaggagccattcctccacccgaacccctcctattaaaacgtgttcctagccggttcagccccagcctgtagggaccagccccacatggtcggtgggtctctccccgtgtgccgcaacgagagagtgtagaaataaagacacaagacaaagagataaaagacagctgggcccgggggaccactaccaccaaagcgcggagaccggtagtggccccgaatgtctggctgcgctgttatttattggatacaaagcaaaaggggcagggtaaagagtgtgagtcatctccaatgataggcaaggtcacgtgggtcacgtgtccactggacagggggcccttccctgcctggcagccgaggcagagagggagaggagacagagagaaagatagcttatgccattatttctgcatatcagagacttttagtactttcactaattgactactgctagctagaaggcagagccaggtgtacaggatgactaggcataataaaggcagactaggagcgggaccactgaagcacagcatcacagggagatggttaggcctccggataactgcaggcaagcctgactcatgtcaggccctccacaagaggtggaggagcggagtcttctctaaactcccccggggaaaaggagcctccctttcccggtctgctaagtagcaggtgttgttccttgacacttttcactaccgctagaccacggcccacctggcaacgggcatcttcccagacgctggcgtcaccgctagaccaaggagcccttctggtggccctgtctgggcataacagaaggctcgcactcttgtcttctggtcacccctcactgtgtccccttagctcctatctctgtatggcctggtttttcctaggttatgattatagagtgaggattattataatactggaataaagagtaattgctaccaactaatgattattgatattcatatataatcatatctaagatctatatctggtataactattcttgttttatattttattatactggaacagctcgtgtcctcggtctcttgcctcagcgcctgggtggcttgccgcccacaccagccaccagaagctccccagccccggcccagcagctggtctggggagcggggagagggcagtctgggctcgcggttccggctgggggctgggcaccccggggcgaccacggcaggcccagatggggactccggttccaactctcctggcccagaggctctagggtggtcttgtctgtctcactccgggggcagagaggacgcagacagaccccaacaccactgctcggccgcgatggtgccttagacccaggtcctgtgggctctggcccgagacccctccctctgggaaggccggtgaccgggacagtccacctcgcaggcgcgccggcgcggagcccggacctcagcccgcaatgactcagcaagggccggtgggattctacatggtcctgcgatatccaggcgacggagtctcgcctctaaagtggcccggggagcaggaaggtatgagcctcagctgagcgaaaccctccttgcagccaccacggagggacggggcgcgtctccttctgaatgacgcaaggggcggggcgcgtggtggggcggggaaggcgcgaggcgcgccgcgatcggggactgtcctaagacgggcggggcgcgctgcgctagggactgtcataaaaggggcgggacgcgccgcggtcgggatgacgtgagctgggggcgctcgtcgctgcagccggcggctagcgggcgtccgcgccatggagcgctacgcgggcgccttggaggaggtggcggacggtgcccggcagcaggagcgacactaccagctgctgtcggcgttacagagcctggtgaaggagtt

SEQ ID NO: 27776 - DNA, 2300 bp, Homo sapien
agggctggcctggaggacagggtgggactgcgggctggctgcacgggggcaggagcctgcgcttgcgtcagaggttcctgagagactcggtctctggggcagaggcctgagcaaggggacctcgctggggtgtctctgtcttagccacgctcggtgtttctgggtcctgtgacccacgtgtgagcagcctgtggtgctggtggcacagggaaggaaaccgaggcagggagcctgtgggggctgcttggcaggggacaggcagctcctgtgcccactgctgtcccacacctgcatggaaacagaaaccccgccacggagccccctcccatctccacagggcctctagagcgccatgtgcaaggacttcatgggcggggtggggtggggtcaggagcctgctgtgggctggccaggccctggccctccctgtcgcaccctgcgctgcctccatgcacctctcagggctgtcatggcttttcctgtggcttctgacaggtagagtcagcgatgacggcttcatagccattaagctcacagcactggggagaccccagtttctggtaagtgctagaaccttccacctgcagagtctggtgctgtgcgagatctcagggcagctgtgggcatccaccaaaaacacaggtgcccatgccttagaggcctgagctggccacaggggctgtgtgggggactggggtgggcaggggcgtgtgcagatggcattcaggcctgcgtttgcagctgcagttctcagaggtgctggccaagtggaggtgcttctttcaccaaatggctgtggagcaagggcaggcgggcctggctgccatggacaccaagctggaggtggcggtgctgcaggtggggcagccttccccttccccactcctgtggcttgtgagggggtgggcaccgtggggtcacacggggcatggtgggcagtggtcggaggtggttttgggaactcacccagggcatgtggctcactctgcagctgctggggttggcctggtggggaggaggaggtcagagggactctgaacagagaggggagatgctggcaggagggctggagacccagccctgcagggcgtgggcgtgcatcagcagcggggtgggaatagacctgtctatgcagtagaaacaaaccagacatggatcctgttcttactaacgatgtaataaagccagaaacagcaccagaggccaatgggtggggggaaggataaaatatgagtgaatggggctgatccaggccttctcacttctcaaggaaagtgtcgcaaagttgggcatcgcatccagggctgagattgaggactggttcacggcagagaccctgggagtgtctgggtgagagcagcccccaggctgagaggacacgagcatcagccatggttccagccaagccccagtgacgtctcccagtcctggctgccctgcctgagagggtgggccctgggatgacagtgctgaaggaactgcttttcacacagcaggacttgatggcttcaggagtccctgaggctggggctgggctgggcaggggagacacagggccagcacagaccccatagagggctctttatagaattatctgggtccagagcaaaggtggcactctcagccctccctggagtccacgccggcaggtgaaggatcagagccccatgccccatccttggagccaggggctgggacccagatcaccaggagcctccagttgaagtggggaggtgactggggtggtgcagtagtgagccatcccctcacacactgccagccttgcccactgtgtcctccctggccgcccggagctgtgtccgcctcctgcctggctgcctgtgctcggcccctccacaagcccaaaacagcctagggtactcagtgttttcagagccgcctagatgcaggactgtttgtgttttggttttaaatttatttaattaatttattttttatagagaccaggtctcaccatgttgcccaggctggtttcaaacccctgggctcaagtgacctgcccgccgcagcccccaaagtgctgggattataagtttgagcccccgcatgccactggttttaaatttttaaacagaaaacaatatttatatttcctctgtcttttaaaactgaacaccgaggtgggttttgtggtgggtggtgaacggacaggtttgggcctcgatcccccacccgaccctagcacccacaggtgggggtgccccctctgctgatgcgcctcctccctcagcaccatggacctgctggactggagcagcctcatcgacagcaggaccaag

SEQ ID NO: 27777 - DNA, 2300 bp, Homo sapien
ctgtgtgctggtgccttcccgcctccgttcctctcagccctgactggctctgtcttggaaccaggtaactacctttatttgagaacctgctgcaagccctgggctgttctgagagctcaggaatatcgttctgatttctccacccacaaggagccccgggcttcctgagcccttgggacacagcagccccataaactgctgcccctcccaggcccaagtgttccaccccaggctaggggtggggctggggctgcaccttggaatctaccctccaccggggttgtggtggggccctccgtgcagcctcagtgggaacgtgcctgtcacctgaggctcaggtggcgtgaccctgacctttgctctccccctccttcccacaggtcctgcacctcagctgcggagagggatggcagtggtgagtgagaggctgccgcgcaggaacagactccctcccgactccgcacaccccttggtggctcaggagagtctaggctggggcacaagtgggccttggggtgacgtcggagcccgggctcctccctatgtccagggcacctgccctgtcgctctgggctctgacatactcgcaagtgtctggggagacgccctgctcctttttcatggcctcctggtggacctaggcctttgttaaggagactgccgtcctggcctcatgaggaggcttagccagggggatgcagcactccaggtggaagagccgcggtgtagacaggagggtgggcttggggatgggaaccatggggcagtgcagtgccagggccaggctggcaaggccactatgcttggagccctcctgagggcaggggccctgggctattggtgtgtgggtgctgggggtgggtgtttggagctgtgctcaggccgtgcattcgctattccaggcacgaataagcgggacaagcaataccaggcccactgggccttcggggaccgcaggaatggtgtcatcagtgcccgcacctacttctacgccaatgaggccaagtgcgacagccacatggagacattcttgcgctgcatcgaagcctcaggtggggccccctctttgctggctatacccctgccatgtcccagcctgagcggacccctgggctcatggaggtgccggtgggtgaacactaagctggggcaggagccagagggctgggttctgaccacacttgggtccctcactgttcagccccttcctgaggggccccactgcctcccagaaggcatctcctctcctgccccagctccctgttccctgatcccgcctcatgccccccacccttctccctggctcagggccaggatcgggagctgcaggaagttggtccatgtcagctgccgagccacacttagcccagggtggaggttccattcagggagctggtgccgcatcttctgtccttccctgacacagcctctgggggccagcggtgggggcagcaggtgtttccagggatagagaagccagaggtcagcaaggcccaatgtccttcagtgttagaaacatccgacctgcacagccccatgctggccccagcagccctccgtcaggggcagcgggtcccaggcctgtttatgtttttgtttgtttgcttcaaatgagactggatcttgctctgtcacccaggctggagtgctcacgcctctaatcccagcaatttgggaggccaaggcgggtggattgcctgagctcagttcaagaccagcctgggcaacatggtgaaactccgtctccactaaaatacaaaaaattagccgggcgtggcagcaggcgcttgtaatcccagctacttgggaggctgagacaggagaatcacttgaatccaggaggcggaggttgcagtgagccaagattgcgccactgcactccagcctgggcgacagagtgagactccatctcaaaaaaaaaaaaaaaaaatgaggtctcactatgttgccctggttggcctggaactcctgggctcaagtgatccctccaccttggcctcccaaagtgctgggattacaggcacacactaccacacccagctaattttcatattttttgtagagatggtgtttcaccatgttgcccaggctggtctcaaactcctggcctcaagcgaaccttacactttggcctcccaaagtgctgggattataggtgcatgccgctgcacctggcacttctgagcagtgcttggaagccgcctcctgatgggggctgagggtcagagtggccagctgaatgctgggccatcagggtgaggggcgtcttctcctcgtccattgcctgttctcccagggca

SEQ ID NO: 27778 - DNA, 2300 bp, Homo sapien
ctgtctccacaaaaaaatattttttaaaaattagctaggtgcagtccagcctgtagtcccagctacttgggaggttgaggcagggggatcacttgagcccaggtgtcaggcctctgagcccaagctaagccatcatatcccttgtgacctgcacggatacatccagatgggctgaagcaactgaagatccacagaagaagtgaaaatagccttaactgatgacattccaccattgtgatttgtttctgccccaccctaactgatcaatgtacttcataatctcccccacccttaagaaggttcttggtaattctccccacccttgagaaggtactttgtgagatccacccctgcccccagaacattgctcttaactccactgcctatcccaaaacctgtaagaactaatgataatcccaccaccctttgctgactccttttttggactcagcctgcctgcacccaggtgaaataaacagccttgttgctcatacaaagctggttggtggtcccttcacagggacacatgagacaccaggagttcaaggccacagtgagctgtgatcacatggctgcactccagcttgggcaacagagagagaccctgtctcttaaaaaaaaaaaaaaaaaaagccatcagctggctcagggtagccacctgccaagggtccccagctgagcctaagacctgcttcctaggatttacagagctcctgtgaaactcggttgtttcattgattgtcacatggagccagtgactttcaggccagccttgttcccacaggtgccctcacaggtgggctctcccgtgggcctgggcacccagcgctaggcctgctctgctatggtctggacgtgagtggtgatctctgtgatccctgcacccctcgcttctccccctgccctctctgcagccctgcccctggcagcccctgcccacctttgcctctgtgcagggccacaggcttccttgaagcaaatgctagaactttgcttttttaaaaaaatataacagctttattgagatattgaatggttttttagtctatacacaaggttgagcaaacatcaccactctctagccccagagtatttccggaccccaaagaaactccgtgggccttggcagcccctcccactcctcccgtcctccacctccaggcaccactgccagtgccatactcaccaggctccactatgggcttgtcttcgtgtgacttctgtctctatcgatttgtctattctgaactcttcatataaaacgaaccatacaacttgtggccgtttgtgtccggaatctttctttaaaaaaaaaaattcaccgggcgtggtggctcacgcctgtaatcccagcactctgggaggcggaggcgggcggatcacaaggtcaggagatcaagaccatcctggctaacacggtgaaaccccgtctctactaaaaacataaaaaattagccaggcttggcaggcgcctgtagtcccagctactctggaggctgaggtgggagaatggcgtgaacccgggaggcagaggttgcagtgagctgagatcatgccactgcactccagcctgggagacagagcaagactccatctcaaaaaaaaaaaattcacttttatttttgagacagggtctccctccattgcccaggctggagttcagtggcacaatcagctcactgcagcttcaacctcctgggctcaagcaatcccctcacctcagcctcctgagtagctgggattacagacatgcaacactatgcctggttaattttctattttttgtagagacgaggtcttactatgttgcccagactgctctggcactcctgggctcaaaagatcctcctgcctcggcctcccaaagtgctgagattacaggcgtgagccaccacacccggctatttttattttttagttgacacataataattgtacatatttgtggggtacgtagtgatgtttctgtacgtgtatagtgatcagataagggtaattagcatacctatcatctcaaacatttattatttctttgcattacgaacactcaatattctccttcaagctatctgaaaatacataatttttgttttgagacagggtctcactctgttgctgtcttcacggagagcaggagcagaggctttgagaagccagtgggccttggcctcagccctgccggcagagggtccccaccatgcagctgaagtgccagggtgcttgtgaagtctaagcccttgtctggcatttgtcaggaatatagggtgaggcctctgggaccgagcggggcggggcggggc

SEQ ID NO: 27779 - DNA, 2300 bp, Homo sapien
caggaggctgaggtgaggggattgcttgagcccaggaggttgaagctgcagtgagctgattgtgccactgaactccagcctgggcaatggagggagaccctgtctcaaaaataaaagtgaattttttttttttgagatggagtcttgctctgtctcccaggctggagtgcagtggcatgatctcagctcactgcaacctctgcctcccgggttcacgccattctcccacctcagcctccagagtagctgggactacaggcgcctgccaagcctggctaattttttatgtttttagtagagacggggtttcaccgtgttagccaggatggtcttgatctcctgaccttgtgatccgcccgcctccgcctcccagagtgctgggattacaggcgtgagccaccacgcccggtgaatttttttttttaaagaaagattccggacacaaacggccacaagttgtatggttcgttttatatgaagagttcagaatagacaaatcgatagagacagaagtcacacgaagacaagcccatagtggagcctggtgagtatggcactggcagtggtgcctggaggtggaggacgggaggagtgggaggggctgccaaggcccacggagtttctttggggtccggaaatactctggggctagagagtggtgatgtttgctcaaccttgtgtatagactaaaaaaccattcaatatctcaataaagctgttatatttttttaaaaaagcaaagttctagcatttgcttcaaggaagcctgtggccctgcacagaggcaaaggtgggcaggggctgccaggggcagggctgcagagagggcagggggagaagcgaggggtgcagggatcacagagatcaccactcacgtccagaccatagcagagcaggcctagcgctgggtgcccaggcccacgggagagcccacctgtgagggcacctgtgggaacaaggctggcctgaaagtcactggctccatgtgacaatcaatgaaacaaccgagtttcacaggagctctgtaaatcctaggaagcaggtcttaggctcagctggggacccttggcaggtggctaccctgagccagctgatggctttttttttttttttttttaagagacagggtctctctctgttgcccaagctggagtgcagccatgtgatcacagctcactgtggccttgaactcctggtgtctcatgtgtccctgtgaagggaccaccaaccagctttgtatgagcaacaaggctgtttatttcacctgggtgcaggcaggctgagtccaaaaaaggagtcagcaaagggtggtgggattatcattagttcttacaggttttgggataggcagtggagttaagagcaatgttctgggggcaggggtggatctcacaaagtaccttctcaagggtggggagaattaccaagaaccttcttaagggtgggggagattatgaagtacattgatcagttagggtggggcagaaacaaatcacaatggtggaatgtcatcagttaaggctattttcacttcttctgtggatcttcagttgcttcagcccatctggatgtatccgtgcaggtcacaagggatatgatggcttagcttgggctcagaggcctgacacctgggctcaagtgatccccctgcctcaacctcccaagtagctgggactacaggctggactgcacctagctaatttttaaaaaatatttttttgtggagacagggtctggctgtgttacccagtgtggggaaaagcaagagagatcagattgttactgtgtctgtgtagaaagaagtagacataggagactccattttgttatgtgctaagaaaaattcttctgccttgagattctgttaatctataaccttacccccaaccccgtgctctctgaaacgtgtgctgtgtcaactcagagttaaatggattaagggcggtgcaggatgtgctttgttaagcagatgcttgaaggcagcctgctccttaagagtcatcaccactccctaatctcaagtacccagggacacaaaaactgcggaaggccgcagggacctctgcctaggaaagccaggtattgtccaaggtttctccccatgtgatagtctgaaatatggcctcgtgggaagggaaagacctgaccgtcccccagcccgacacccgtaaagggtctgtgctgaggagaattagtaaaagaggaaggaatgcctcttgcagttgagacaagaggaaggcatctgtctcctgcctgtccctgggcaatggaatgtctcggtataaaacccgattgtatgc

SEQ ID NO: 27780 - DNA, 2300 bp, Homo sapien
atatgaagagttcagaatagacaaatcgatagagacagaagtcacacgaagacaagcccatagtggagcctggtgagtatggcactggcagtggtgcctggaggtggaggacgggaggagtgggaggggctgccaaggcccacggagtttctttggggtccggaaatactctggggctagagagtggtgatgtttgctcaaccttgtgtatagactaaaaaaccattcaatatctcaataaagctgttatatttttttaaaaaagcaaagttctagcatttgcttcaaggaagcctgtggccctgcacagaggcaaaggtgggcaggggctgccaggggcagggctgcagagagggcagggggagaagcgaggggtgcagggatcacagagatcaccactcacgtccagaccatagcagagcaggcctagcgctgggtgcccaggcccacgggagagcccacctgtgagggcacctgtgggaacaaggctggcctgaaagtcactggctccatgtgacaatcaatgaaacaaccgagtttcacaggagctctgtaaatcctaggaagcaggtcttaggctcagctggggacccttggcaggtggctaccctgagccagctgatggctttttttttttttttttttaagagacagggtctctctctgttgcccaagctggagtgcagccatgtgatcacagctcactgtggccttgaactcctggtgtctcatgtgtccctgtgaagggaccaccaaccagctttgtatgagcaacaaggctgtttatttcacctgggtgcaggcaggctgagtccaaaaaaggagtcagcaaagggtggtgggattatcattagttcttacaggttttgggataggcagtggagttaagagcaatgttctgggggcaggggtggatctcacaaagtaccttctcaagggtggggagaattaccaagaaccttcttaagggtgggggagattatgaagtacattgatcagttagggtggggcagaaacaaatcacaatggtggaatgtcatcagttaaggctattttcacttcttctgtggatcttcagttgcttcagcccatctggatgtatccgtgcaggtcacaagggatatgatggcttagcttgggctcagaggcctgacacctgggctcaagtgatccccctgcctcaacctcccaagtagctgggactacaggctggactgcacctagctaatttttaaaaaatatttttttgtggagacagggtctggctgtgttacccagtgtggggaaaagcaagagagatcagattgttactgtgtctgtgtagaaagaagtagacataggagactccattttgttatgtgctaagaaaaattcttctgccttgagattctgttaatctataaccttacccccaaccccgtgctctctgaaacgtgtgctgtgtcaactcagagttaaatggattaagggcggtgcaggatgtgctttgttaagcagatgcttgaaggcagcctgctccttaagagtcatcaccactccctaatctcaagtacccagggacacaaaaactgcggaaggccgcagggacctctgcctaggaaagccaggtattgtccaaggtttctccccatgtgatagtctgaaatatggcctcgtgggaagggaaagacctgaccgtcccccagcccgacacccgtaaagggtctgtgctgaggagaattagtaaaagaggaaggaatgcctcttgcagttgagacaagaggaaggcatctgtctcctgcctgtccctgggcaatggaatgtctcggtataaaacccgattgtatgctccatctactgagatagggaaaaaccgccttagggctggaggtgggacctgcgggcagcaatactgctttgtaaagcattgagatgtttatgtgtatgcatatctaaaagcacagcacttaatcctttacattgtctatgatgcaaagacctttgttcacgtgtttgtctgctgaccctctccccacaattgtcttgtgaccctgacacatccccctcttcgagaaacacccacaaatgatgaataaatactaagggaactcagaggctggcgggatcctccatatgctgaacgctggttccccggttccccttatttctttctctatactttgtctctgtgtctttttcttttccaaatctctcgtcccaccttacgagaaacacccacaggtgtgtaggggcaacccacccctacatctggtgcccaacatggaggcttttctctagggtgaaggtacgctcgagcgtgg

SEQ ID NO: 27781 - DNA, 2300 bp, Homo sapien
ggcctgctcccactgcacagacaggtggggaggtggaggcccaggtcccagcccagagcagctgggaacagccggacttgatggctggagagggctgtggtgccagaagcctccaggttagccctggctccccatttccccccatgcccatcccatgccccagaatggtcactttggctgctgcaggaggggtgggaggggctttaaacctatgagatagggtgtggggtcacaatcttcaattgtagtgggccgctctgggtcactggtaattgaagagacgcctgcatagtaagcacgcaagtgtcctctcaagccctctctgcaagcacagagcagcccgagactggagcctggtccaccccagcgctgtcctcagactgatggtcagtgcctcatgactcatctagggtctgatacatccctgtggtgagagctcagttcctagtctaggggctgctgcgtgcagggaccctggaggaagaatgcttgtttaggggtcaggcctcagcctcccactggctctgtcagcttcgcctgaggttccccatctgtgcaatgggtgatgacatcttggtgtggctctgggaggacctgttgagccacctcaggggctgagctggtggcactcggcagccagcaccctctggggaggtggcagtgtgtgcacagcccaccccttcaggaggccaggggacagagtggctgggggtgtctgggccccacctcaccttctgtgtggctgggaatggcatgcactccacaatgccctcataagcctaggctgggacaagggtgatagggataaagcaggccaaggtgatgagggccacagagcggcagccagaggcatgtgggcagtgcagcctccacaccaggcagagggcccggccagcatggctccaccctgggaagctgcctgccactgggatcagatgggagcaccagggctctgggaggtcctcacttcctctggacaaggcaggcaggtcaccagccctgtgccctgctcatctccctcagggccacctccatggccaggggcaggcagagagcacagggctgcccagtcaccaggtctctctgcttcatatcagtggacctgggctctgaggggagccatcaagacctcaggctggcccactccgtccttgagtcagggtcctacagactgacaccaggttggcctgcaagaccctggtcctgtcatgcagggtgggcctggggaggacccagcccagctgagctgactcccagcactcctccaggtgcagggacagcctggcagttgtctgaagaccccgggatgggcttaggagctcatcatcatcggatgccccccgagcagaagacggagaaggaacacccccaccctgtgtggtgtgtgtaggggtgtcactgggttctctggctccatgacgcccccccggccccgctgggggctggcttagtagagtgggggatgatactaagcaggcggcctcggagagcgtcttctgggtttggaggccacattccgcaggaaggaagaggtgggggacccctgcagggttatgggtaacatcaggcctgggtcccctccctggggtggtgcagagagggccacaaaggcccaagagggcccccagaacgctcttaagccttgagcctgtttcttactgaaaaatgggggcgatcgtgctccagcaaggggcttctgtgcagggggcgggggggggcggggggttcatgggtttcgtgaggccaggaagcgagtgggtcgcgcagaggccatccccaggcctcaatggccccagccgccatcccctccgccgcctgcagggccgccgcctcttcaggaatgcgcggctttgtctagggccgggtgggctgagcacctcctgctgcccggcctacgctccccggccagccgcgccgctcacgccccaacttgggcccgcgccccccagcccccgcccaggcccgcgccccccagcccccgcccaggcaggcgcctgcgcccaggtgagggccccgcccgccgccgcctcccgcgccctgcgcgcccgcggcccgagccccgcccgagccgggcggagcggagcgcgcggagcctagacccgctgccgggccggggctgggccggagcggcggcgcctggatgccggcccggggctgggccggagactggcgcccgccccgaagcgactttcggtccccgacccgctccgcctgacccctatgatgaagagggcgtccactggaggtgagtgtccacgcggcgccagagcccagcaggcggcggggcgcagagcggggtg

SEQ ID NO: 27782 - DNA, 2300 bp, Homo sapien
ccactgtgcccagcctgttttttaaagacatgttcactgcctgtaagaaatgcataataaggtggggtgtggtggctcacacttgtaatcccggcactttgggaggccgaggtgggcagatcatttgagctcacaagttcgagaccagcctgggcaacatggcgaaaccctgtctctaccaaaaatacaaaacttagccaggcatggtggtgcatgcctgtagtgccagctacttggcaggctgaggtaggaggatgacttgagcctaggaggcagaggctgcagtgagccaagattgtgcctctgcaacagagccagaccctgtctcaaaaaaaaaaaaagcataataagggatctggaatttaaaaaataggtccatataacaagctataatagagacgtgcagctggcacaggacatccatccactggtgataatgatagaacacgtcatattgcacgatagtaggaaaaacaggacagatgggaagggtgcggatgaccagcgccgtagcaatctgaagcatcgagcctgccagtccacataactgaaacctgaagctctgcccctgcccagctctgtgacttccagcaagttgtttagcttctttaagcattgattttctcacctggaagatgagggttgcattcacactctcttcatagctgtgacctaaggatgatatgaaacgacgcccttggcagatctatcagaacccctaccacataataagtgctcagtaaaaggttttgctgaacaaaggaaattacattcatgttgtattaccacaattacccactttctttataaagcggtagtaagtctttcagccaaaagaataagtccatgatgggattaagtgaaagtccaagaggtactgcatgcacctaaggtggagatgtgtttatcttttgcataagctggggatgtatttggaaggtttctgctagcccagaatttgggtggacaggctgagcccctcccaacagcaggattcacctatggggttggttttgggtagacaggctgagcctgccccatggaactgtaggggcttacgaaggcatttcgtttggggaaggagctcatccaggaggactgggatctctggttatatgtgacttctgacctctgggcatggaggtctctctccagaggcccaggcctggacacgaagggagagaggcctccattgtcccacaggggccgaaatgcagacggtgcatccccggtgccctggggaacccttctctgatcatcaggattctcttggactccggggtccttgtcctgctcaggcatccctgccctgctgtccttcagggccctcaacacgatcttctctggacacgagtctggggatagccgggtgttgtgggctccaaagggttgactccttgctcctgggccccacagagagtccttgtgctcagtgcactggctgtgctgcaagatatcctggaattcgaagcacacagtgctggcttgctgtggtacctgtgcaatcaaattgaaggcaagatcaccaggaaggaacacagggcttgcaagatcacggaaaaccttcttggagttgttttgacacaccactcatgtcaagtgtctgggtacttgtaggatggcccgccactccacccaggggcaggagcaacagggagatcccacaagcaaagtgaactgggggatggggtgagtgggctccaggcaacagagccctactggcaggtcctcaccccctgggccggaactggagtgaggggcacagagtgcccaggtaaccgctcctgggaacagtggggaactgtcagatgctcgaactttcgagagctgggctctgagcgtcctcgtggagctgccaactcggccaaaggagaagcgagcagtttcttctgttgccgggcaacacgccttttaaacctgagcgagtgggtgcgcatgcaaagaacgggcgcgagtgacagagcgaccttaacggattagcaccttaacggattagcaccttaacggattagcgtggcaaggtatgcaagcaagtcacctgctggcaatttgggggtggggagggggaggtgcgcaatacatactggaaggagaggcacccacacaaaggacgcaggaagaacaggtgcgcacaaaggcacaatggcggcagatctgcccgtggatcactgaagattcctgctctcctgctgaggtggagattgcagtgaactaagatcacaccattgcgctagagcccgggcgacagagcaagacttggtctcaaaaaataaataaaataaaataagtacaataaaata

SEQ ID NO: 27783 - DNA, 2300 bp, Homo sapien
gtgaaaccccgtctctactaaaaatacaaaaattagctgggcattatggcatgtgtctgtagtcccagctactcaggaggctgagacaggagaatcgcttgaacccaggacgtggagggtgcagtgagccgagattgagccactgcacttcagcctgggtgacagagtgagactccatctcaaaaaaaattaaataaaataaaaaataaaaataacagctccctaacagctccggaaagataaacagaaaacagaaaatgacatgctcagcccttgaggccaaaatgcccttccccagagcagctgccagaagacagggagcaggatcgggttggaggtcacttctgggtgagggggagaatggtcagacccgtggcaggggtgttggagcctggtcggcctcactggaacagaagagagctgcttcatgatgctcaactgacaggcagagcctcgcataacccaagttctcatggttcagagaggccagccagtgcggggacaaagacaggcacgcactgaaatggtttcctggaagacggcccggttgcatctctcaaacgggaccagattggaagggagaccagctgctttgggcaaccgaggctgcttctgggtgaactcccaaactagatggtgccgagagccctggacctggcagctgggctggacatcacatggctctgtattccaggaaacggcatctcagtgcttgtctggccagttctccaaaagaaccatccacaggccatttttccattcccttcctatgcacagactgggctgggcctgatcagaaaactctcccttagggttttcagtcactggcgaaacttgagcccggcactgaggataggatgttaaaatgtgactctgggccaggcggcggctcatgcttgtcaacccagtgcttttgggaggctgagctgggagggtcacttgaggtcagcagttcaagaccaacctgaggaaaatagatctctacaaaaaaataaaaataaaaattagccagctctggtgacatgcacctgtagtcccagctacttgaaaggctgaggtggcttgagcccatgagttcaaagctacagctatgatggtgtcactgcactccagcatgaaaaacagagtgagaccatgtcttgaaaaaaggaacaaactaggcatagaagaaacatacctgaaaatggccaggcccagtggctcatgcgtgtaatcccagcactttgggaggctgaggtgagtggatcacctgaggtcaggagttcgagaccggcctggccaacatggtgaaaccccatctctaccaaaagtacaaaaattagccgggcgtggtggcgggcgcctcccagctactccggaggctgaggcaggagaatcacttgaacctgggaggcagagtttgctgtgagctgagattgcaccattgcactacagcctgggtgacaagagccagaatccatctcaaaaaaaaaaacctagaaataataaaagctgtatacgacaaagccatagctaacctactacagaatggggaaaagtgaaaagcgtttcctctgtaaacaggaacaagacgaggatgcccgttctcaccacttttattagacatcacacaaatatgcaagagaaaaaaataaaagccacccacactggaaaagaggacatcaaattatccttgtctgatgaagatgtgatcttggatttacaaacatgtaaagcctccaccagaaaactctagacttgataaataaattaatacagtcatttgcaggatacaaaatcaacatacaaaaatcagcagcattttatacaccaataatggtctaggaaagaaattaaggaggcaatcccatttacaatagcaacaaaatgaaaaatgatatgccacagaggaaattttaccaaggaggtgaacgatttctacaaggaaaactacaaaacactgatgacaaagtttaagaggacggaaagaaatggacagtcatttcatgctcatggaaggaattcatagcattaaaatgaccacactgcccagagcagtctagagattcaatacaacccctaccaaaataccagtgtcatctctcacagaactggaaaatcgtaaaactcatatgaaaccaaaaaagagctcaaagagccaaagtcatcctcagcaaaaacaacaaaactagaagcaccccatttcactgcaaattagaatgacaaaatttttgacaagtgcatggtaaccaaaacagcatggtcctagcataaaactagacacatagatcaatgggacggatgacagagcccagaaagac

SEQ ID NO: 27784 - DNA, 2300 bp, Homo sapien
cagggtggggggcagcgcatggaaagtgactaagaggaagcatcagcagccagggattctggcttaactcccctaacagaattcttgctgaaggccggccaggatggccagaccgcacctgggggacagagggggaacccgatcagatgtcaaggacggggggcttctcgctaaactgactttgcaggattcttgctaaaactagagtttataaggaagtgctcagatgtgcctaggagaaggctcaggagcctaaataaagcttgaccaagcagagaatctttgtcaccagctgtggtgagagtgaggcccagagtgggtcagggcttacctgctcaggttgtgcaattgggaggggtccatcaggagcccggagtcttcccactgggggctgagtctgggccctcagggcacatataggtagatgctgtcagacccgacaccccatgcagtgcagactgggatgctggtgcctgtggcacagactggtcagacccaccccaggctagacattccttgcagggagagctgaggctgctgacaccaggaacagacaaacaaggtcatcaccaggtaatgagcttgttacccacatcaggcaaggccattgctgggtaatgagttggcctcctgcagagccacctgcgctgggatggttcccagagatctggctagccagtgccacaggaggccggggcacagttccagggcctagtgggcaaggcaggggtattcagggacaaggtgcacctgagtccccacaggaagccccagaccctgcagtaagacctggaacaagtcattctcctctctaagctctcaaagaagaggtcagctcaggggtctgggaggcaaggtctcctagagtagactaagctggccgctgccatgctaacacacaccctcccagccagccgctggtcctgacagatgaggaaactgaggctaggtgttttcatgaggcctctgaacccagaacccagtacccagtgtcctgagcaaagcccaagccagacctgccagcttatgtgtacagaggccccactatgcagcctgcactcctggggcctaaaaggaccatcacctccccttctaagaggctgggcacaggggctgggtcccagccaggccacccttcctcctcctccaaaggcccagcagcagctgctcccagagcaagcagcacagtcgcagcaaaggctggacaagtgtcctgtgctctgtggtctgagcagagggccaggggccgtgacccacatggcccctccaggagcagctccaagatgagccttcctgtccccaccagtgtgtccgggacctcagggtggatcagccgcacctgccggctgctcctgttccttgctcttcctggggctccccaccacctttgggaggcagctccaagaccctgctgcctcccttgcttaccctcaggcccctgctgggtgtgccccctccccacacagacccctgagccagcttcgaggactctgcctgcatctccacgtccactctgatgactgtgaagctacagtcacactctccgcctccacccccgccctgccgggtccctgcagcagctctcagaggcccccacagcccctcccacacacagagctcgcctggccctgccgtctgagcgctcccctggctcccaaccgcccttgggctctgggacataaaacctccagccaaggtggctgccaagttttatttaatagccatagagcacaaaagggatgacaattaagtcacacggagagactgccccatcgggacccctggccaagctaagcagaggagccctggggtttcctctgaccccccactgtgaatgcattactgacgggcaaggtggccagttgcccacccagcctgcacgtctgcatgcacagagctacagcctgggcccagggacagccccgggagccggtggcttcccacaggcacagccagcctccccacccccaccatgcctggcccccggcccagggcacactgaggggaacaggaggggaaggagcaggccctgcactggagcctcagtcagctcctctgtgccaggggcagctggagctggctgaatttgaggaacttcccggaggaactggagagcagacctgtgtgcgcgccccgctctgccacgttccctgagggacacactgctttgaccagcccccaccccatctcctctccgccagtccccggtgtccaccccagccccgctaccgatgaagctcaagccagggtccccatcacctgcttcacggccatccctgcacttgagctcaggggctcag

SEQ ID NO: 27785 - DNA, 2300 bp, Homo sapien
cctgaaaaacttcctttagtgtttcttataaggtggatctgcaaacaacttctctcacttgttgtttgtctgggaaagtttattttactttcatttttcagaagatatctttgctggatatggatcttggttgatggttttctgtgagcagttatcccactgccccagcctctgttgtttctgctgagaagtcagttgtttgtcttattggggttcccttagaagtaacaagtcacgtcccatttgctgcttttcgtattttcgccttgtctttcactttcagcattttcactctgatgtgtcagtttgtggctcctttgcatttatcctaggaatgtggaatttgttgagcttcctggatgtataggttattgtttttcaatgaatttgagtagtttgcagctgttagttcttcgactaatttttttttgcctctttctctctctcctctccatttgttactcctgtttcacatatgttggtgtacttaatggtgtttcacatttctctgggagctctgttcatttctgttcattcttttttctctattttagccagggaataattgtatgtgagtatcttgccctgggagttcctgaccacatgggtgacctagatttgatcccaatctttttttttttttttttttgagacagagtctcatgctgtcgcccaggctggagtgcagtggcacaatctctgctcactgcaacctacacctctggggttcaagagattctcatgcctcagcctcctgagtagctgggattacaggcacatgccaccacgcttggctaatttttgtatttttagtggagacagggttttgccatgttggccaggctggtcttgaactcctgacctcaggcaatctgcctgcctcggcctcccaaagtgctgggattacaggtgtgagccaccgcgcccagctgactacaatcttaagtgaggcatagacctgtgattgtgaaatttcggaagagtcttttttctagacatccttaccccatttggagactgtaagaagctaccttctcatgtctctttgcctttcactgagggtggctctcttggaggctccttcattccttgtctctcctccaggcatttgcaacgtctgcctaccagttgaagactctgggtttttagccatggccattcctcttactctcatcctaggtcagctctgtgcagagtgtgcctcaggtccagtggactgccttcccaagcagaactggcagcttccttacacacattctgattttgaaatggttaatactcatagcagctgcatcttagaattgagaaaatctcataagtaatctacttcagcaacttccaggcaaacacttctgcagtgaccctggagtctggcattgtgctccatcctggctctccggcctccatttgccctggctagatgtactttgttctaacagtgttgtagtgactgctcttggacagccactccctgtgccatgggccagagatccatggcattccagccctgggaagactctcagcacaatctggccaagtcttcagttgccttgttcgttccccaggcccaggtggggaaggtcagctcatgtcaagtggtgcagcagtgatggcagtgtttgctcacagagctgtcttagaggctttgatgccattactctagtgggcatgtctcacatgccccctccagctgcctccttcccattctaaggtaacaggtagcattcacaggcccacacggggaggctaccttttttggcagtgtggcccacacggggaggctaccttttttggcattgtatacatctgtacacaatgtatgctcattgcaggtcaaacatgtgttgacatcaaggacaacgtggtggatgaagggttctacttcacccctaagggggacgacccatgcctgagctgcacctgccatggaggggagcctgagatgtgtgtggctgctctctgtgagaggccccagggctgccaacagtaccgcaaggaccccaaagagtgctgcaagttcatgtgtctggacccaggtgagactcttgataggacgtcccaagtcagcctccctatttggggctggaggctgggcgtccctttgcttcctcagtggtgaggactcaggagagtttatggagcatcgcgcagcagcaatggcagcgtttgtcacagagatgtctcagagactttgatgccactactctagtgggcgtgtctgacacgacccctccagctgcctccttcccattctggggtgacaggcagcattcacaaatgaacttgaactcaagtgtggc

SEQ ID NO: 27786 - DNA, 2300 bp, Homo sapien
aggctgctcccacttaaccccaccccatcgttctcactaacacctgctatgtgccaagccctgtgtcacgtgggaaggtctcatgggtgcaggaagccctgtagttaaagcccaggttggcccaggtggaggcaagctggcatcactgcatgtcagggttattgttttagttggcggttctgggtttaggaatgaagactgctgttgtggaagatttgtgctgtgttaggctgcgccttcgctgctccacttcccaagctagcttgtgggcactttccccaccccttccttcccacttcccagagtactgagtgattatatcctcttagcagcggtggccggtgatttgtttgtgcaggtgtccttctagcagtgacggcaggtaatcttgttacgcacagatcctcttagcagtaatgggaggtgagtgatctgtgtgtgtcctcttagcagtaagggcaggtgatctagctgtgcacgtgtcctcttagccatggtgggaggtgatctggttgtgcaggtgtcctcttagcagtgatgggaggtgatgggaggtgatctcattatgcatgtttcctcttagcagtagtggcaggtgatccggttgtgtgcatgtcctctcagcagtgatgacaggtgatctagtagtgcatgcatcctctcaacactgatggcaggtgatctagttattgactctctcctgctggacctgagcctttgacaggcagggagttcctctgcctctcttggttgttggcataaggacgacccgattggcatttagtagtttcttgactctaagtggaatgcatcagtgacaacatttaaggaccccgtagatagctcttgactgattagatgtcttttccttggtatgctattagattttctcttatgtgctgttatgtttgggtgctgaggttttgatgaccgtcctctttcctttctttcactgccagtctgcagagtgggctcggtaatcccgagagaccagttttgggccaacagttcattgagcagagtgatgcatgggcttgggtatggttattatgtgatagctgtgtaacacctgtatttgtgtttctgacatgatttaccagttgtcctgggaagtttagtcaaagccagtccatctcatcctgccattccaagctgtgtgtcctgtcagtgtggacatggcgggcttggcagggcaagtctaggttggagggtgaatagcctgtggacccagatgccctggaccttctgggcatcctcctgggagatggggaagctcaggtctggttttgcctcaaatgagctgtctgtaaaagtagcagctgggattagatcaagccttctcatcctggcccatggcaggcagttgggtatggtggcttaagagcatgggctctagagccacactgcctaggctcaatctgttctactgctcactcttcagtttcctcatttggaacatggacatcgtaacagagctttatagagatgttgtgaggattaaaatgggtaagtataaaattctaaaaagtgtctgacataaagcaaactcttcatcaggcaaaatgttagtgttaatcacagatagagttcaggaaccctgaactgaaatgtgaaatgtgaggtggtttgtgcacagggcttattggtcgggagagagctccctcaggaggtggcagagtacagtggctctgaggagtgtctgccacacagagagtgctctttgctgttatgatgggatcagagggactgcgtatgacttgctgagagcccccgaaacagccatggtgctttggacagggctgggattgttcatacacgttttgctctttgtcacattcatgctctgtcacctgggcctggtcaggcacagactgggcactcagaaatcagttattgaacaaatgcacaaatgcctatttatattttgacataaagagcaacagctactttagccagcaggccttgcagctgcctctggtgggggtggcgaggaggatgagagccttgtggcagtcctgcaaaaatgccttgggaggatgggatccgggggtaggggacatggctgtggagccagctggcctgggccccaccctggtaggagcttgcttctgtgatgggagctgagctgagaggtgagagcaagtgtggcttctcattaatgtggatcctcactgaagctcaccagctgcccagcctggggtggagggttgaggggctcccagagggagggaccccagcaagccggtgctgagggagctgcctctctgatggacttgctggcacctggctttgagaactgg

SEQ ID NO: 27787 - DNA, 2300 bp, Homo sapien
ccctcaggatgacttggtagggcgggctggttgtcactcatgttgggttgggtccccacctgccgtggcccttcccccttttctctgctccttcaccttcttccctaacgctgactgcccactgccaggcctttgtgcattcttggttctcctccttccagacagcctccttctccttcccgctggggacaccccaactactgtctcctggaaaccaaaaataaaactctaaccccccagccatctgaatggacccctcctctccaccaagggcattccaaacttaacctgaaaaactatttcaggccgtgataggaagtgggagtcaggcctcattatccctcctcccttcaggtttcaggcacagctaagcagtgtaacatcgacacagagacttgaagactgacaacagactctgtggcagtaagataccagcatgacagcaggcccggaaggaaacacatattttactgcaaaacaggtttctttcacatattttgaagtcgctctgcaaagctgttttttgtggggaaaatctacattctgtagagaatccctatccctttcaaggtcttttctcctgagagaattaactagagtctggcaccttttatttatttttccttttttttttccttttttttttttttttttttgagacagagtcttactctgttgcccaggctggagtgcagtggcatgatcttggctcactgcaacctctgcctccccggttcaagcgattctcctgccatcagcctcctgagtagctgggattacaggcgtgtgccaccacgcctgggtaacttttgtatttttagtagagatgtggtttcaccatgttggccaggctgatcttgaactcctgacctcaggtgatccgcccgccttggcctcccaaagtgctgggatgacaggcgtgagccaccacacccggcagagtctggcactttttaataagaaacattaacagtcttttctctgtgaagcctgatacctggaggcttcatttgcctaagaaacttggtctccacaaccccttaatgtagacagtcccttttattgattccaggtctttagataaactctttgaaccaactgccaatccgcatgacctagaagcccccctccaccccccactttcaagttgtcccgccttttccgactgaaccaatgtatatcttacatgtgctgattgatgtcttgtctccctaaaatgtataaaaccaagctgtggccctacccccttgggcacttgtcaggatctcctggggctgtgtcccaggctattggtcacatattggctcagaagaaatgtcttcaaatattttacagagttggactcttcgccgacactgccctccaaggttcaccctgttggtgatgacgggagaagtggcacttggagcactgttcgcaggggcgctgagcctcctctctgcctagctttctttcctgcacatgtggccttcccctagccattgtgtaggcaggtcctccagggagccggcttcgctgcagtctccaggacctggccttcccggtctctctttgcctgacactctcttaggccattcctgttcctctttccccaccctcagaaccggcaggccctccctcctccacagcggttcggccttaaaaagacccctttggggcgcacttttgggctgctcacgggacctgagcttgcaggtgtgaagacccttggagtcccagccaggttcccacttcgttctctccgctccccacccgcgcgacccctcggcgccccgccccatgccccgcgcctttcgatgtccatccttgccgtcccgcgcccgccgtccctaaccggcgtccagagaccctactcccttcggtggccccgccgctcaggccccggccccggccctgcctctctgcttaaccaatggcacgcctcactccgtatggtcccgcccttcccttagagcccgcccctcagtccccgcccttaggtccccgccctccgccgtcgcgaccttaggcctcaccctcttcggagggctttggctctggccccgccccccatcttgacggtcattggcccgcgcctgcgtcgcgggcgggaggcggggcggggcggcgcggcgcggagccgagcaggacggccgccatcttgcgcgcagctggagtcggtgcctgaggttgcagccgagagtgtgcgccagcccgcggcccagccgaagctctttcccgccgcctctccgcgcctcgcccaggttcagctccgcctgaccctccgcttggcacggtcccctgaccctcagtccggcctg

SEQ ID NO: 27788 - DNA, 2300 bp, Homo sapien
tttgggggagcaaaggaaagggtcagggggtggtaagtgggaggtctcatgctcctgggtcctggcctgcaaattttcatagccagccccttctaggacaaaaaggagtgaagtgttggtcatttcagccgtagaggctcccaggaaaaaggaaagcatcaaactaaagctattaaccaccgatgctataaagagcttcgggtgggactctgggaggctgtcactgctggaaggcagtcactgtaggcacgtcggcccaccctgcccatctgagcctctcagcttagcatcctgactttggctgccctgtttctgcaatcctccctagtgacctccaaacacagggtgctccctgtgtactccagatggagtgggtccacacagccatgccagggccaagatgtcacatctgtctgacatgtcctgcccctcttgtcaaccctgtggagtctgctgatccccagcaccccagctccaacatcacttcctctttgaaaccttccaggactaaaccccacctgggaacaggccttcctccctctcccctaaacactgaacacacagctcatctgtcccagctgctccctgtgaatccaggatgcctgtgatggatgacaaatgaacatcagtccaacgcacctgaggagacatgtacaggatgccacatttcccaaagcacaaatccacacaccagcactgaaacaggatgttcacactgcaggtgcaaaaggcagcccgagacgtaaatgctacccaatgtcagggttccaacaggcgactgctgctcactccacacaaaggcccaaactgatgtgattcagaaccccctcctcacccaggtgcctggtctttgcagtgcatggcctgggcgctctcagccccaggattccccagcaccaaggcccatccactcacagtctagcaaacaagactaagacctgaccttctctgtctcctgctgatcctgaggcccaccctggcccagcctcttctcatttggtcaaaggcactggcccccactctcacctcaaagccaattctactctttctgtctctctctctctgccactgaccatcttaaaacacaactgggacggccctcctcctgtcttgcacctgcaggggcaggctgccgcttagagaaaaagccgagactccttcacttccctcctacttccagtcactttcagaaaaagccctctcttctcccaggctctctgctgcctgggtgccttcctgccgcctctacccaagggaggccctgccccacccctcagacatgcagccacctgccctggaccctgggcacccagctggcatgcactgcagccccgacccacccatacacaggcccttgctcgctggagcagcagcgactcacctgcccggctctctaccctgaggggcctgccgcctctgctcccaaacacagagctgctttcgtctaccaggcttggcaccactgccagcctgactggtccagggcagtccctcccaggtaccactgttcccagaaccaagccaggtccagctgcattttcttgaggcccaataacgagaagcagacaaactaggaaagaagggagtttatcactgtaactggatacagggagaaggctggagataattccagcagaccaactcaaagtgctacaattttcttactgtttatataggttggggttatgtgcctacatgcagtacagcaatcacctaagtctactggtaactaattttgttccaaggagaaggtcagaggcaaaaaaaatgcttgctaagtccgattaaaaggggcccagtgccttcaaggcctgtctactgtggtaccggagtgattatttcgattgtatctcctttacagcttggtccagagagctgccttagactatccaattgatctattcaaacagctgcctgttcccttaacttgtcttcagattttgtcgacccgagatgggtcctggcactaggaatgtaaaaccgttcctattattttggcttgctccagcaaaagagaagcccatgcaaggctcctgctgaccatgtttcatttctagctttgatgtctgggcactgatttccctagatttaactatgtgctcaatggtaaggcagtgctgtggaaatctgtctgtgtaactggggtgctatgcaggcctgtctgggtgactgtcagggacaactgtcctaccacaccaaggacacagccctgggggtgcttttcttcatagccaaagaagctgcaggaaacccaccctagtgggacaaagaccaatgcagggtcagtccccacagccagg

SEQ ID NO: 27789 - DNA, 2300 bp, Homo sapien
caggggcctggcgtcagcatcctctggagttgctgggataggcgcagctcgagtggaggccctggcacctccctggatgggaggagggggctttccttgcttgggtacccactttgacaggccctcaaggtcttttggggggttggggcaggggccctccctctctttctccaagaaggctgccaaccccagagccccagccttgccctgaggagaggaagtgtttccagcatgttcccacgtgtttgcccaccggccagctgtcgagcgtgggctgcggtccccctgatgccagcctctctgcttgttccagcacaaacagggcaaggtgggccccgatggcaaggagctgatcccccaggagtcccctcgagtgggtggatttggatttgttgccactccttcccctgcccctggtgagaaaagtgcccactggcaagtgggtctactgctgggactccctgggggaggtgggcttctcagtcggccctggccactcctggcctctacctggcctgccccacaccttgtgtaactcagggacctggtctcctgtctgtacaaggccctagaggccaggtgtccaggctgcttggggccgtgggtgggctggactctcaggcagacctggcctgagacatcctgggatgacgtgtcctgtcctggtccttactgtgatgtcagtgggtgggggtgtgtgcacagtgcttatgagtctaagtctacctagcactgcagggagggaggcccagcacctcagtggaggtgaaactcaggtggtcttgtggcatgcgtgggtgtccctctgcactctggcctctgtgctcttgggtgctggtgctgtgtcacacgccagggcatgtgaaggcaccacaggtttgcctggggttctaggaggtttgggagccctggaaggcctgagtgtctcctcctgcgtggctgggggagacctcccagaggcttgtaggctaagcacatggctgtagggccttgagcctgcctcgggcctgctgggagcttggcatttccctttcggaggatggaggtgccagggttccagagtcctggggaaggagagagggctagctgcctgccttcgtattagctgggatgcacattgggtgaacaagctgtgactggaggggagggtggtggggagtcctctggcctgaggtggttttgggctctttgtctgcaggtgtgaacgagtccccgatgatgacctggggggaggttgagaacacacccttgagagttgaagggtcggaaacgccctacgtggacaggacacccggcccagcttttaaggtgggttgtggtgatgggggaactgtgtgcgaccggggtggacacctctggagccctgagtgcctgtggctcaggactgagcactgggatcggcccccagctgctgacgggcagagtgctggcttttctgaatgccagggtgctgaaggcaggtgtgggtgggtggacctgtcacagagggatttgggggtgtaagggctgagacaccaaggcagggagtggcttgggccctctggatcctggaggccgggtgctgttcatgaatgaggcaggatggtcacagacacgtgaggagctctgcaggcctgagggccataggacgaggctgtgtgcttgtagagaaggcccctggttacagaacacgattgggacacgctggattacacggctcaagcctggtgttgtaggagtggtcagggtggagtgtgtgaggcccggcacagaccaggggaggctcttcgtgggctgggtcagatacaacaggcctccccataccactgcgggcctttccccagaatacttagtacaggtaacccatgtccagacaaaacatggggagaggttctggttaccttggttctaaattgtctgggacacaaggataaccaaggcaaacgtgcgagagggataatgaagaggatgccgtgctgtccaatgtgagagcgcaaggcaagggctgaggtgcttctgaggtatgcctgccactgcttcccgagtctccaggccaacagtaaacagataaattctgaaacaaaccatgatccaagtcagaatttggggcccgataaagatggcaactcagattgcactgaatagcagagtatttagaaatgaagggagctgggtcctcaggatgtgtagcagcatacattgtggaaaggtgaaaaggttacatgtaaaaacaataaccataaaacaaccagaagaaaatagtggcgaatatttagtttgatttttgggttcaagtgattctcctgcctcaacctcccaag

SEQ ID NO: 27790 - DNA, 2300 bp, Homo sapien
cctcccccatcagccttctgagtagctaggaccacaggtgggcaccaccacacccgactaacttgaaaagttttttgtagagatgaggtcttgccatgttggccaggctggtctcaaacttctgacctcaaactatccgccggcctaggccttccaaagtgctgggattataggcatgagccactgtgcctggcctgccccttcaattcagaatgaagacaaaccacctcaccataccctacaaggccctgtgcagcctggccctgcctctctggcatcatctcacacctcactgcactctgcatttccaaaggacttctttagaacttgccttgctccctcccaccactaggcctttgcacatgctctttccacctgactgttgccggtttgttcgtcttttgaatctgcaatcactttctgcctggggaagcttctctgacctcccgaactaggtcaagattccccaagtacaaactcttttcttgcacggacacagctgcaattttacacctgtttgtgtgatgatctaacaagtgtctctgtcttccccattgcactgtcacttctacaagggcagcagcagcacgctgcacttcagtgaatgaaggtatccctgtatgttgcaaaagcaaaattgtattaaattgttccagggcggaatttatttgtccaacacaattcacatctttcgtttgggaagaaattccttaaaaatgccgaggcaattttctggttcacttgaatattaatttttttttttcttgacagagtttcactctgtcacccaggctgtagtgcagtggcacaatctctgctcactgcagtttccacctcctgggtttgagtgattttcctgcctcagcctcccaagtagctgggactacaggcacctaccaccactttgtatttttttttttttttagtagagttggggtttcaccatgttggccaggctggtctcaatctcctgacttcaagtgatccacctgcctgggtctcccaaagtgctgaggttacaggcgtgagccaccgtgcctggtcttgaatgagaatgatccctcttctgggaagcccactctggcatttgggggcccaataatcttttttttttttttgacagagttttgctcttgttacccaggctggagtgcaatggtgcaatctcagctcactgcaacctccgcctcctgggttcaagcaattctccagcctcagccttccgagtagctgggattacaggcgtccaccaccatgcccagctaatttttttgtgtgtttttagtagagatggggtttcatcttgttggccaggctggtctagaactcctgacctcaggtgatccgcctgtcttggcctctcaaagttctgggattacagaataatctttagacatttcttaatcgaaccactgtcttgttctttcaccttttgttagataactataaaaaaaaaaaaaagattgttttggccgggtgcggtggctcacgcctgtaatccagagaccagcctgaccaacatagagaaaccctgtctctactaaaaatgcaaaattagccgggcgtggtggcccatgcctgtaatcccagctactcgggaggctgaggcaggagaatcccttgaacccgggaactccggtgagccgagatcatgccattgcactccagcctgggcaacaagaccgaaactccgtctcaaaaaaaaaattgttttaaggcccttttcttgcataaagcttgaaactcctatataagtaaatttcctggtttgtatttttgtagaataatctcgaagcatacatagttcttatttgtgggaaattagaattctaaggcctttggacgctgcaaagccagaatttctcgcgtgaagaacacgccctatagcatcctccccgccacctccacagcaccccctcgtgttcacagcattgacaagcatgaatagcgcggggcaggacaaggactacatttccaataaagtctagcatttatagtgacgtcagaacggagcgcgggctggctttctagagccacagcttttccattggccaactattggaggcgcctgcgcaaatggtgcagtcccgccccctccaccctgtgacgcgcctgctgggcccgagctttttcctgggatagcgatggagacgccgggcgcatcagcgtcgtccttgttgcttcccgccgcgtccaggcccccgaggaagcgcgaggcgggagaggctggggctgcgacgagcaagcagcgggtcctggacgaggaagagtatatcgaggtacgacctcggtgcggacgc

SEQ ID NO: 27791 - DNA, 2300 bp, Homo sapien
aggatcacttgagctcaggatgccaaggctgcagtgagccatgatcacaccactgcactccagcctgggtgacagagcaagaccctgtctcaaaaaataatgcaaaatagaaaataaactttttgaaaaagtgccacagtgggccatttaccaaggtggactggtaaagaggcagggcacacgcagaggcaaataggtagaagagaatgagcactagagatggacaggtgggcagtggcccatttgtaaaagtggagaacatagggtaagaaagggattttgagaagaccttgagttcctttctggcatggtgactgggagaactttattggtagtggagatggagatgtggagcaggctccagaaacaagagcgtggagcagagagagaggccaggctggaggtgcacttgtgagtcactgtcacaaagatggtgtctggagctccaaggctggaataggtattgagggtgagaatgggaaaggatgaaggaatggccagggctaggaggaagagggctcagcaaatgttgggctggctctcctgaccaatgaccctgcctcccccatcatagcagcactctgattttggaggatggtccagatgcagttctgtgagggaggtctgctgagggaggagggatccatggccatccaaagggccatgggaggagatgaaaagtgtggggctgtggcagccattctaccaccaagaggtgggtggaggaggggttgacagagccactcatggaggtggcagctcatcactgagcctccagactacccctgggaaacctatgtgggagctcttgtgacagaaattaaatcagcaggttcggtcacagtgatgtccacagcactttcactgatagcagagtggggatggcagagtcttgcagaggggctggcggcgggaggagcgcaggaatacgcattgccctggggaggcggccaggttctaaccgtctcacacctagtcactacactttacagattgggaaagccaagcccagaggctgaagacgcctatggaggtcacacggccagaaattgacaacggagtatgagccaggccgtctgtttctctgtgctatgagtcccatactgtattttcaaaggtcaagaggaaagggtcttaagctgaagtgacggtcccgctgccaggagccgcttcactgagggtgaaacaatgtagccaagtgcgggtcacctgcgctgtggcagaagggaccgaggacggtgtggccagaggactggcctgggcggagagcgaggagggggagcccacagcttctggggggcagtgacagtgcggggaagggcgaggtgcagtgttggatgttttcgcggggattctgggaccagtgggaaagctggaggacaggcggctctgaagcaccgaggaggggcctcggaaggggcggggaggtctccttgacacaggtgaggagacggagaactgggggcacccggcagcccaggcttcctgccgcgctctcacgccctccagggccatgagaccctggctccgaggtggcgggcaggttcgggacccgagcgcggcgggatcgtgcggttgccggtggtgctgggccccatggaggctgcggtccaggagtttcgggtgggcggctaggccgagcttctgcaggcgtgctgagccgccgcagtagggccccagaggggacgaggaattaggcccagccgaacgagggggagccaccagaggctgggccgggaggcaccgccgcgctctggggagctgccagggtcggggcgccctccgagcggctgccaggccccgcgggcggcggcgaggcggccctccgccccttccccgcaggtcgccctgccagcttgagcggcgggcgcgggtggggcaggaggacgcggggcggggtggggggcacagggggccctctctgcagcgcccccggcccccgcgcgcggaggcagggccgccgcagtcgaggattagcgcgttcgcggccggcgctgcgggattaacccgcgtggactggacgcccggcccggggattactgcgcgctccctccccgacgtatatattcccgcggcggcggcgccccggccgggccgggcatggcggcagcggctgggggcgcggcgagccgccggggtgccgggcggccctgccccttctccatcgagcacatcctctccagcctgcccgagcggagcctcccggcccgggccgcctgcccaccgcagcccgccggtcgccagagccccgcgaagccagaggagcccggggcgcccgaggctgcgccctgcgcctgctg

SEQ ID NO: 27792 - DNA, 2300 bp, Homo sapien
ctcagatcccgcacatgcaaaagtgaggctgaggtaggggggtggtccctcggcatgtgagcccagggggttcccgagccaagtggcagccggaacagtggggagggacagccaaggaggtggggaggggtcgctggccccgctcagggctggttggggtggaggaagcccgggcccaggccgccccccgctgggtcgaggccaccccgcctcgagggcgcggccgtccggatctcctgattgctttctttcatctctgttcctttctcagccacaaacgcccgctaatgcctcttttatcacggaattaggggatttagggccggtcgcacaaaggggccctcgatagcggccataatcaaaccccaatcggccgaccttggacgggccggggaagaaaggagcgccggggattagcgcggtaccgcggccgggcaggcagagatagcatcggcgccgctgcggggctgaagccgcggagggctcggccgcgctcggagaaaggacggcttagctcctggagccggggattctgaagccattaggtggggattaacacccaagttaatctgctttggtcgctcaattgtcagcagcgaacgcgcgggactgaggaagcctggctcccagcgaccacagggccttgccacccagcagtccagagctacgagctggtatcagtttccccagctgtcacccggccaaggcgggccttggagccaaaagggagatgcacaccttggtgggctggccaacgggtctggatgagtggaccccctgccccgccagccttcctgggtaatcagggaactcagagaaggatgttcctgccccatcctgacccagaccacttgtggaccctgacagccagtgcagccctgggtgccacccacacactgagcttgggttgcacggcaacatgcatgacacacctgtccccatcaagcagggtcagggggcagcctgcagactgggtggacgctgacagcagctagcagcccccttgcagaccctccatcttccctttggggtccctgtccaggtatagccccctaaagacctctgttgaccaactcactgacagggcagatgtgacaccacctgctctcaattcatcctcactcttcatcttcagtcctctctcactaggcggcagagggagggactggacctatacaggtcccaggtaggtcctttgtctctgtctgggttttcctatctgaggaatggagccggctaaggaaaggcccaaccagaatgtgccagtgtcgtgtgtggcctgtgctcactgctatcttctgtggggacgcaaccccaaccctgactccttctcctgttcctgccagcaggcccccagagtaggtggctcagaggggtgtgcttacacctgcctcctcctccatggagatgtggcaaggtcactgtgccttacatgagcctacaggcagcaacaagtggctggactggagctgaccaggcaggcaggatggggtgggcagtagcagaggagaggccagtggagcgctctgggtccccatcttctttcccatggctgagactagggacattggaacaaaaagtcccaagtggaggaaaagacgcagtcataagtacatttgtctttccttccctctcatctcccttcctccctttcttccttcagcagtgaccaacgattctcccatccaggccctgtggaggggacacaggcgtgagccacagacccaggctctgccctctgggagcttgggtccgaggacacagttagacaaccggatgggagggcgcccttcgggaaggggaaacaggcaccccacatgcacagggccaggcagggcctgaagggcagtgtgaattacagggaaaatgcggagggagaggaagagtgctccagggcgaggaagccgcgcccgcagcgatctggagtgcggtggggagcaggtgaggcgggagaagcccagttctgggacacgcaggccagctctaggcaggggaaaggaggggcgggaggccagggaatgttccctcaggctggtgcgtcagaatggcccaggcagcctccagcgtgggcccccgctggtcccgggaggcgccgccagaggctcggggagggtggacgatgtggctgggccggcgagaatccaggggctgcaggcaaggacggggactcgcgatgaaacccgaagatcaggggctggtggcagtgaccgcgaggggcctccaagcagcccaatcaatctcggacgaggggtcgagtcagtggcggtgcaggcggcaaaggcagccagggtctgagcagc

SEQ ID NO: 27793 - DNA, 2300 bp, Homo sapien
gggggctggaaggatcccagtggctactgggtgtggagaagtgtacgcccaggaatgttggcacggccgctgtcctccctgctgtaaggatgcctgccttctgataggggtgcctgcctagctgtgaactactgctgtgtcctgctgggcctggcccctggacagcaaggctgctgctggtgtgtgctgggaggggctttgcacctgagaacctgcccagggcagcctggctgtcgagcagactggagaggctgtggggtgcttggacactgtggggcaaacacaggcctgagggtgtggtgtgagtgtgcagcacgccggcgggtctccagcgtccggctgagtgtgtccttccaccattaatgtcattctggtttttttagattttgatgggcatgaatgagacccagctgattgcactaagtaagtgtcccatttggagactagcttatcctctagccaggccaggttctctggctgaccccacgctccttgcctctggatgcctgctctcttggggcctcagcgtctgggtggtaagggctggtcctatagaccctgctccctgggccccgggctactcaggggcagccaggagaggacccccatgggcaggaagagctctgctcattgtgggcttccccctctgcaggccctgccgtgggcccagcccctgccagcttcccctatggatatgcctctgctcccaacttcgccagcctccaatgtacaacttccgcgtgtagtgggcgttgtcaccacccaccctacctgcagagttactaacttctccaaggagcatgtcactccagcagcacaggggacgcaatgggaggcagggacacctggacaatatttatttttgctgaaacccaatgacggcaacctctgagccatcccagagcctggggaggccagggtagaggctgacggcgcaagaccagctttagccgacaacagagactggactgtgggccctcctgctggagccaggccttcctcctgggcgcctccgactggctggagctgccccctccaggccagtttgaagactacatgaacacgtcttgtttggaggtaccggacctcataaaaggactctcagcctcttggcaatcataaatattaaagtcggtttatccaggcaaaggtgctctgcttggtgctggtatgggtaggagggacgggccagtttcctaggccccgcagtccattaaagatttgctgggtcctctttggggtgtgggacctccgttgcccagacaagctgcctaggagaatacagccgcttgcatttgtggtctttcctgaccttgttcgctgagcgcagaaactacaaccgggaaaggtgtgggtgggaaccggcaggtgaggcccggcccgtggctgctgcgggaggggggcccggcggcgtagccccttctcaccggcctcccgcctcccgcctccaggtttgaaacgttagagttcctctgggactgggctagccccacgtgttttcggggagggtgtgcccctggcctccgggatccctggggatcccgccgctctcgacagtcgcgcagacccgaggcccgctatcccgcggcgcggcacacagtgcaccttgacccactgctcggagctgggccacggctccgcctcccgcagccccgcccccgtcccgccgctcgcggtcgcccagggactcggcctcggccattggctgcgctttggccccgcccctacgcctgcctcggcgcgccccgcccaggcctcagtttcccggcccgcacggggcgggctgggggcggggcctggctcggaccacgcggggcgggacctggagctgacgcggccgccccgcccctgggaccataaccggccgccgccgccaccgcggaccgagcgcggagttctggagtctcggacccgaagccgccacagggcgccccgcctcccgcccgccatgcccgcgccccgcgccccgcgcgctctggcggccgccgcgcccgcgtccgggaaggccaagctgacgcacccggggaaggcgatcctggcaggtgggcccctccgggacgcggacccctctcccgccgcgcttctgggtgggcccgggacgctgaggccccgccccacttccgggttgggccgtgggctggggagtcgtggaggcgcggtcctggtccccacccggcgcgctgggactcgcccgcctcccgtctgtcaccccctgcgcctcgccgggacaacggggtgagggcatgggggcgtggggccccagcctatgttccccgcggcactggcgcggcggccgcgcc

SEQ ID NO: 27794 - DNA, 2300 bp, Homo sapien
actttcacctagaggccggactgcactctgtcaagcgggtgctcacgtgcttttgcctccttgcaggtggacaaactggatgccttggagagtctgcgcaagcaagaggagcatgtgacagagcctgcccctctcgtgtttggtaggtggcacctgtagcccccaaccccctggggagggagcagggagggagtcaaagtcccactgcccttacctggctgggctttggatggggatgggaatagatgggtgggggctggaaggatcccagtggctactgggtgtggagaagtgtacgcccaggaatgttggcacggccgctgtcctccctgctgtaaggatgcctgccttctgataggggtgcctgcctagctgtgaactactgctgtgtcctgctgggcctggcccctggacagcaaggctgctgctggtgtgtgctgggaggggctttgcacctgagaacctgcccagggcagcctggctgtcgagcagactggagaggctgtggggtgcttggacactgtggggcaaacacaggcctgagggtgtggtgtgagtgtgcagcacgccggcgggtctccagcgtccggctgagtgtgtccttccaccattaatgtcattctggtttttttagattttgatgggcatgaatgagacccagctgattgcactaagtaagtgtcccatttggagactagcttatcctctagccaggccaggttctctggctgaccccacgctccttgcctctggatgcctgctctcttggggcctcagcgtctgggtggtaagggctggtcctatagaccctgctccctgggccccgggctactcaggggcagccaggagaggacccccatgggcaggaagagctctgctcattgtgggcttccccctctgcaggccctgccgtgggcccagcccctgccagcttcccctatggatatgcctctgctcccaacttcgccagcctccaatgtacaacttccgcgtgtagtgggcgttgtcaccacccaccctacctgcagagttactaacttctccaaggagcatgtcactccagcagcacaggggacgcaatgggaggcagggacacctggacaatatttatttttgctgaaacccaatgacggcaacctctgagccatcccagagcctggggaggccagggtagaggctgacggcgcaagaccagctttagccgacaacagagactggactgtgggccctcctgctggagccaggccttcctcctgggcgcctccgactggctggagctgccccctccaggccagtttgaagactacatgaacacgtcttgtttggaggtaccggacctcataaaaggactctcagcctcttggcaatcataaatattaaagtcggtttatccaggcaaaggtgctctgcttggtgctggtatgggtaggagggacgggccagtttcctaggccccgcagtccattaaagatttgctgggtcctctttggggtgtgggacctccgttgcccagacaagctgcctaggagaatacagccgcttgcatttgtggtctttcctgaccttgttcgctgagcgcagaaactacaaccgggaaaggtgtgggtgggaaccggcaggtgaggcccggcccgtggctgctgcgggaggggggcccggcggcgtagccccttctcaccggcctcccgcctcccgcctccaggtttgaaacgttagagttcctctgggactgggctagccccacgtgttttcggggagggtgtgcccctggcctccgggatccctggggatcccgccgctctcgacagtcgcgcagacccgaggcccgctatcccgcggcgcggcacacagtgcaccttgacccactgctcggagctgggccacggctccgcctcccgcagccccgcccccgtcccgccgctcgcggtcgcccagggactcggcctcggccattggctgcgctttggccccgcccctacgcctgcctcggcgcgccccgcccaggcctcagtttcccggcccgcacggggcgggctgggggcggggcctggctcggaccacgcggggcgggacctggagctgacgcggccgccccgcccctgggaccataaccggccgccgccgccaccgcggaccgagcgcggagttctggagtctcggacccgaagccgccacagggcgccccgcctcccgcccgccatgcccgcgccccgcgccccgcgcgctctggcggccgccgcgcccgcgtccgggaaggccaagctgacgcacccggggaaggcgatcctggcaggtgggcc

SEQ ID NO: 27795 - DNA, 2300 bp, Homo sapien
atttaaaaacctaaattaaaatcacattcaaaggctggacgtggtggctcacacctgtaatcccagcactttgggaggctgaggtgggcagatcatttgaggtcaggagttcaagaccagcctggccaatatggtgaaaccctatctctactgaaaatacaaaagttagccgggtgtagtggtgcactcctgcaatcccagctacttgggaggctgaggcaggagaatcgcttgaacccaggaggcggaggttgcagtgagcggagatcacgccactccattccatcccgggtgacagagtgagactctgtctcggaaaaaaaaaaaggaaaaaaataaataaatcacattcaaaacatttgtttcaaagctgggtacggttgtgtgcacctgtagtcccagctactttagaggctgaagtgggaggatcacttgagaggaaaaagaaactgtgttttttctgctggtgagaggtttcttagtatcattctcagaccgggatctgggcatcagctagacaggttgggctgcctggagggacccccaagaccctgaaggcattaacatcctctgcttggcctgaacatctccccgcgggggtgaggtggagttgtacaagagggcccttgtgggtgctgtgtgatgcagctgagccaattcccaagggctccttgtgcccaaagactctggacttgacctgagggtgttacttacggagttggccttaggcattcctgagtatcttcacaggacacatggatacttgccacttcctgtcccgcacaggggcctcattctcatggctcctggtctgcggctgttggctcagactccgtggaggcctctgatgcctgcatcagtgttgcattgagtttcaccctaagttgtcacctccagtgttctggactgttctgtgacatatcctagcccttggtgacagtgcttgtgatccttcctgaggtgcccacagggcccctgcagagggaatggagaggaaaagctgctgaggctctgagaccgcacctggaggtctctggacctggctgctgggaggagacagctgggctcagacgcacctgagggaaggctgccctcggctggctgatcacagccattctgtcctacccatgtggtccctgtcaggggcttaaacacacagcctcctcaacactcaggcagtgatgagtgagcagggccatcagtgctgccagaggcctactggccttgccagccacccactccgagccacgtgggcccagaagagagtccagaggacaaagccacagatagaaagtggccgagcacagggccgggcgcgttggctcatgcctgtaatcccagcactttgggaggccgaggcgggcggatcacaggatcaggagatcgagaccatcctggctaacatggtgaaaccccatctctactaaaaatacaaaaaagtagctgggcgtggtggcaggagcctgtagtcccagccactcaggaggctgaggcaggagaatggcgtgaacccaggaggcagagcttgcagtgagcagagatcacgccactgcactccagcctgggtgacagagcgagactccgtctcaagaaaaaaaaaaaaaaagaaagtggccgagcgcgcttcccccagaacagtggctgtcagccaggaatgactgtgaccccagggaatgtttggttgtcacagcttagggcgtggtgctgtgtataggccgtagaggcagggatggggcccacaagccccagtgcacaggcggctccccagacctcccaaggtcagcactgccactggaggagcctgccctgaggccagagctgaagcctcctggagtcttcctggaggagtggccaggtcacagcgtgtccagtcagggcaaagccagctagcaacagaaaactgtatttccagatgacagaagtagcatttaaatgaaagttcggtcagtggggccctcccacacccaccagtgaagagcaggggctgcggaagtacaggtgtagactggagagctggacacagggatggggaccaggatgaagcctccctgagagtggcatgggccggggaggtgatgagagaggagggtgtgggagagcctgactcgagctgggctccaggccgcaggagcgggacactgactgggagcttcctgggggctgcttctactggaagtcctctgggaaggcagtgagacagtccccaaggcccacagaggaggaacagagcagggcccactttaggcacatgtggaagacaagtcagcaagggtaggctgggccggtggagggcacggcag

SEQ ID NO: 27796 - DNA, 2300 bp, Homo sapien
gatcacctgaggtcaggagtttgagaacagcctgcccaacatggtaaaaccctgtatctattaaaaatacaaaaatgagccgggcgtggtggcaggcacctgtaatcccagctactctggaggctgaggcaggagaatcgctcgaggctgggaggcggaggttgcagtgagccaagatcgcgccactgcactccagcctgagtgacagagtgagactccgtttcaagaaaaataataataaaacaaaaaaagaagagaaaactgaagctgagattccgccacaagctccaggatagctggttggcgtgctgtgctgcacaacctgaaagaagcgcccaccggatgccaggcacctgccatggaccacttggtcgggaggaaacatgatgtccattgtatggatgggataacgaggttcacagcggtgacacccctagcccacatggagagagacagtgaatggctgagctggggtgccccccgtgtgagttagcaagctcccctgctcaggctgctgctggcccagccctatggctaagtggattcctgctatcgtgtgccccaaatacagattggatgtcgtccatctgattggacccctgcactggcgagtatcctcctacccccttcacacctgagctgacagtgtctgtctcccacacggcagggtgtagtagaagcatcatgaatcacacaaggaactggactcagccatcagccctgcaggcaccagatgagagatgctgctctcccacacagtgagtctcagctgtcctgctattattttatatgccagtaagaaacaaaagcatggccacttccaccacggctcagcaatttttaaaaacaccctaatatcagaggagttacaatgtgaataaaatacacacaggattgatcaagtatggattttccagcacacagacaaatctacaaggcagcagccacgtgtgccaggccacagtaaggtatgacctggccgcactccctccagcaacctgcagactctgctcagggtgggacgccccatcaaaggcccccactttcacgtaccaccatgcccagtaacatggatgtcctccaacaagaagctcgggcttgtggcctggtgctcaatactgggttccttcaaatagttcccaggaaaggcagaggctgaaggctcacctggcagcacacgtgccactcgcgcccaccctcagtagccgcatgtggaaaagaggtgcatgagcgaggccacagctcactgctgtgccactccagtcacaagccgactgtgacaagttagttacccaaagaccatggcacaaagcgcagatacccaatgcaaagggatgggggctgaggataaagaattccagccccttcaccaaactcacatacagagctggagaggggtgggtcctgaggttgaactctctaagagaccggaaacaaaataacaaaggctcacttgaccatggcacccaaacccgacaccacccaacagtgtggctgctgacagagaaactcgggtcccggtttagcccagttaggctacaggatggaggcccactcccagacaggtaaggccgctggtgctggggagagacatgaactaaaaaaaaaaaaggtccgatggtgaacaataaccacaggaagtgggggtgggagccctgagctgacagggcagaaggaagaacgaactgaggcctggccacaagggcgtggtatggtgggaggggcgggcaggcagggccacagggccacggctgcatgctggcctgaccctgcccgcagctcagctgtgcatcgctagacgggtcacctgcccttcttaagtgtcagttcccttcaaagatggaattactaccatctgcccagagggtggtggactcatacaagtgaacgcacacacagcatgggggcatgctggtactcattccactcccacctgcccattcccctgcacccagaatagggcctggcagaggctggcaggagccagcgctctgtatcccctcttaccttggtaatgatgtccttgaactgaccctccttccaggcctcagtggggtggctcatcatggtgagcacagcattgtcatactcctcgtacttgtcatagaggaacaccagctcagcccacaggtgtgcctgctctgcagccctcagcacctggacaaggaggtcagggtcggcttgtgctgcacgtggccacggctgccagactgcaaggagtacacggtacctttgggatgttgacacgggaccagaaaagctccagatgctccagcatcttctgtggcttgaatttggag

SEQ ID NO: 27797 - DNA, 2300 bp, Homo sapien
tgcgcctgtagtcccagctacttgggaggctgaggcaggagaatggctggaacctgagaggcagaggttgcagtgagcagagatcgtgccactgcacaccagcctgggcgacagagcgagactcttgtctcaaaaaaaaaaaaaaaaaaaaaagaattgaaaggtttttttagggttacttagcaagttacctacaagtggtgagaatattaaagtccctttcaagtcagaacatttaatttttttacaagtatattaacaactttatttcctgttaactacaactatcacttatattcacttctgtctattcaaataactgttgtgctttctgtctcttctatggtttgaagagacagaaagatttgtgtctcctctaaaattaatgttgaaacttaatccccacttgaggtcccgacgtattaacaatcctgtcactttgcttaactatgattttcttaaattctttcttttagggtataaaattttagttttaatccccaaaaagccctggggaaggtgatttagggagtgatggtattaattactaaaaaatttatataatgtttggggtaaagggtacttggagtcacaggcatcattgccaaaataaagagatttgggaaatgtagtactaaccacagcaaaacccagctctatatttagcggatgaggccacatggattttagaaagggcgggctgcagaggtcttggctaatactggaaaagagatttaatttgaaagtgaacagtctgttctattccttaacatatttttggctactagatggtcaagccattgcgcaaataattgcaccatccttgtcttattcaaggtgggccgttcatttcttaaaattaccagtgagcaacatgggaagcagcagagacggctatcgattaccccgtagggagtgcctgtgctgaatgccaagggcttccctttcctgacagacatcttttatgcagctgaatcatctgtatgcaaaacatcagccaacggtgcctcggaaaaacaactggctgctgggcaaaccaggtgtgggctccagcttccacctgctactactgtcgtgcagccacgggcactctgggtgatcctcactggcctggggctggtcatctgctgctagatgaccttcgctgactctctacattgatattccgacacagtgttctctagaaaccgcatgagccaggaaaggtgtttcctaaaggagcaggggccgagcctcacgccgaaacacgtctgtaacacgtacagtcacgcgtcccatgcatccatgcattctgagacatgcgtctcggttgtgggatcatcacaaggtaacttacacaaactcagatggcacagccactacacaactaggcagctgatgcggtccgctgctgctaggccgcaaacccgcaccgcgtgtgaggtgcgttattcccctggcacggtaatgacatacctgtacgtgtatctccaaatacaggagaggaaatgtccttagctaagccctcaccagaggacaggaagtttccagctccgttatcatgttatgggaccaccgtcatatacacggtcctcctcagaccaaaaggtcgttcgttatacggcacatgtggttcttccaagacccttttccatctttctgtcacatccgtgcctgagtaaaaagtggccctgaactcaaccgtccagagttggcggcagaactagcaccactggcccgctccacatgtggaaggcgctgggcaagggccgccgcagaccccatcaggattaatcccccgaaaacctttcactcgggtagctggcacacaccgcgtcagggcagagggcgcgcgggactactttccgcggaccctcggagcgggcggagggatccgcgcaggcgggacggggcagaggcgggggcaggggcgggggcaggggcgggggcaggggcggggcagaggcggggcaggggcggggcaggggcgggggaaggggcggggaaagggggtgcgggccggggcgcggtcagggaggagggcgggggccaggaccgggagctcggggcactgcgcctgcgccgtcgccaccggtcagcccgcgcgaggggtcggcgttcattcctgccgctgccgccgccgccgccgaggtcccgcaccagccatggcgcagatcctccctgttcgctttcaggagcacttccaggtgaggcccggcgggctggggggctgccctgtcagccgcgcctccgccgggccggactgccaggcttgaccccgcgcccccagccccgctgagccgctgcccagctggccgcgc

SEQ ID NO: 27798 - DNA, 2300 bp, Homo sapien
catcatgggctgaatctttagccctgccacttacccagctacaaagccttgagattttattttattttatttttattattttgagaaggcgtgcctggttcattggcaccaggtttcctttcctagtgctatgcagattagatgaaatatggtaggggacctacacagataccagcgcagtgctggctccccgcctccttacagcactaggcctttccatcccaaggaaagcagtcactcacattccattagtgggaatgaaactatttatttatttatttatttatttatttatttatagacagagtttcgctctgtcgcccaggctagagtgcagtggcgtgatctccactcactgcaagctccgtctcccaggttcacgccattctcctgcctcagcctcctgaatagctgggactacaggtgcctgctaccacgcccagctaattttggtatttttagtagaaacagggtttcaccatgttagccaggatggtctcgatctcctgacctcatgatccgaccacctcagcctcccaaagtgctgggattacaggggtaatcccggccaccgtgcccggccaggaatgaacctcttctaaagggctctctgaggtggagctaaggaaagggaccttctggctgagctagttagacaactcttcctgtggcacagcatgatgatgacaaagatgagttcccaactacctccagtgtctggcctttctttgtaatagagacagaaagaaaagacaaattaacacaccctagactctagagacaccaagcaatcacctatccttagatcaaccccagatcagaatgttgtccctgcacacccaatacacagccaatatagtcagccactgtctactgtctggggatttgctgatttgacaagagcagcacaaatgctttccacctggcagggaataaagaatacattaaggaagctgggattatgacagggcatgctcaggtagaatcgtaccctccttcacactaggggaaagattcctagaagaggactaaacatgggaacttaaactctgagcacagagaggtggccagaggcaaagcagagagggcacaatggagagctgctggcccttccctctcagcagtcccacagacctttggtttggctccaaaaagtctctgggcttttatgttctgatagttcattgggtagagctgactggaacacatgtgcatatgtccttttggaatgaagcttgggaaagttgaggcttttgcccagtgaatgttgctcctgggaacacttcctgcactgcccaatagaacttggttttaaccaatgttgacaaatttagaattaaaaataagaaaatgtttgaaacatttattaaatgaaacagttacagaacaatactaaaatataaggtggggccggtcatggtggctcacgccggtaatcccagcactttgggaagccaaggcaggtagatcacttgaggtcaggagtttgagaccagcctgaccaacaggcgcaccattgcactccagcctgggtgacagagtgagactgtctcaagaaacaaaacaaaacaaaaaatatataaggtgggtgcaaacaacacaaacttatttatttatttatttatttattttgagacgaaatctcactctgtcacccaggctggagtgcagtaacgcaatctcagctcactgcaacctctacctcctaagttcaagcgattctcctgcctcagcctcccgagtagctgggactataggtgtgtgccaccatgcctggctaaaaagtgctggaattacaggcttgagccaccccgcccagctacaaacaacataatcttaaatgtagaaaaccctaaaaattccacagaaaaactattagtgctaataatgaattcagcaaagttgcaggatacaaaatcaacaaacaaaagtcatctgcatttctatacaccaacaatgaacaatctgaaagggaaattaagaaaacaattcaatttacaacagaatcaaaatgaataaaatttgtaggaataaacttagcccaggaggcgaaagacttgtacactgaaactataaaatataaaacactgctgaaggaaatcaaagacacaaataaatgaaaaaacattatatatgtactcatggactagaagatttaataactttaagatgttaggctgggcacagtggctcatgcctgtaatcccagcactttgggaggctgaggtgggtggatcacatgaggttgggagtccaagaccagcctgatcaacatggagaaaccctgtctctactaaaaa

SEQ ID NO: 27799 - DNA, 2300 bp, Homo sapien
ggctattcacaaaaactgatttaggtaaagcattttaaaataaaaattctatcagaccttcacacagtaaactagttcataataacatttttcctttcctaatcacaagcatcataattcataattacaatatttgtccagttctccagggaaagatctgcacagtacacatcaggaaatgctcttggagatcaacaggagaaatgaaactaaaactcaaggcttcggctttcatgcacagtaaacctaacttcatcttgataaattatgaaaacctcagctttcttacctgttttagccaatatttatcacatacccatcatgtggaagaggttgttcaatgcagtagggcatacagaagggactgaggcagtccctaccctgggggcatatggaaagtaccctcacaccttccatgccaggcaaaacacacagacagtgatacagcacatctaccggggtaactcaggatgaacagtttcaaaagaaacacgtgaacctagtccctgaaaaatgggaaagatgtcacacaagatggaaggagagagaggtggcaggaggagaacacacacatgatcagttcagtttagttgtggtagtagagagcatcctgggaccaaattcaaaacgaaaaagccacatgttaaaatatctattctcgctcctaaagaaaacggtagcaccctgtagtcgcactgcaaagtagaaatgaggaacaagacagcatcagggtgaccctttgcctgtcaacagtcagacaggccagaatcaggccctgggctggaggagtctccctgggttgatttctgtgctacagtgctgtcagcagagtggggtgggggagggggaggcgcgcttttttcatctacccggggagcaaacaccaactcctgcagcagttctgccaacaaggcagaactatgacgaaactgattaccactagcctctctgtatcagagtcaagatatggggtggatgagtccgttccccaagggtgtgctttggagccactgccacagagctaagaagcccctctgctagaacacacctgtgccctatctgcccaaccctagttcaccctgatgtcccagctcagcattaatcgtggatccttcgcgggggcccggggcccccaaaccctcctatttagggaccacaattccccaactgggggcactgtccccagatccagaggggcagtaacagtccctcttgcagatttcggatcttcatcctgccactgaaaggccacaagggggatttcatcccggtttcaccttcaggaccgtctgagcacttctcgggcgatgcagaccagtggaaggcactggctggcaccaaggcccgctcctgggagccaggccgcggcccctccaaggaccacaggtgggcagcggaagactcagagcaagagccaggggcgaagatggccctcgctgcggtcaacccggagcacgtgctggggctcaccagcctctccgcgctgaggacaaagtccgctcccgccggcttcttggcttgggcaccgggtaccgggcgtcaggggcgagacaggcaggacttgcgcgcgccccgactcgactccagaccccgacccgactccgggctcggcctcccgcgacccctgcgcgcactcaccattgtggttgacccaggtcggcttcaggagcttcattgttcggccgccgccgccgccgggctgaggcgagcgccgggtccctcagcgcgcccgggccatggagccaccgccgccgcttcctcccgcgccacccgccctccggccgccgcccgccccgcgccctcagggccgccgcgccatcgccggcccgcgcccccctccgccgccacagccgccacccgcgctcggccgccgccgccgccaccacagccgcatcccctgcgccgctcctcctcaggcggctcccgggcaacgccggaagtcacggcgcgcacctgccaaatcgccccggcgggaaaccgctccccacgcggactgggccgccccggctcctccgctggcaggggcttcgggtcgggcccgggcgcgggcgccccagaaagggcggttcgcctggacggcggacagcgagcggggcctgcagttgcaacccgggccgcccgcagaggcaggcggggcccaggtggcgtggaccgcccgtcaccagctctgcctcgccagtctgagtccgacttattaactagcttccgtcattcatcaacacgcgctattgggcatcttgcgagcgccgggctccgcgccggcgccggaatgcgatccgggcttcggactcgaacgaatg

SEQ ID NO: 27800 - DNA, 2300 bp, Homo sapien
tgggaccaaattcaaaacgaaaaagccacatgttaaaatatctattctcgctcctaaagaaaacggtagcaccctgtagtcgcactgcaaagtagaaatgaggaacaagacagcatcagggtgaccctttgcctgtcaacagtcagacaggccagaatcaggccctgggctggaggagtctccctgggttgatttctgtgctacagtgctgtcagcagagtggggtgggggagggggaggcgcgcttttttcatctacccggggagcaaacaccaactcctgcagcagttctgccaacaaggcagaactatgacgaaactgattaccactagcctctctgtatcagagtcaagatatggggtggatgagtccgttccccaagggtgtgctttggagccactgccacagagctaagaagcccctctgctagaacacacctgtgccctatctgcccaaccctagttcaccctgatgtcccagctcagcattaatcgtggatccttcgcgggggcccggggcccccaaaccctcctatttagggaccacaattccccaactgggggcactgtccccagatccagaggggcagtaacagtccctcttgcagatttcggatcttcatcctgccactgaaaggccacaagggggatttcatcccggtttcaccttcaggaccgtctgagcacttctcgggcgatgcagaccagtggaaggcactggctggcaccaaggcccgctcctgggagccaggccgcggcccctccaaggaccacaggtgggcagcggaagactcagagcaagagccaggggcgaagatggccctcgctgcggtcaacccggagcacgtgctggggctcaccagcctctccgcgctgaggacaaagtccgctcccgccggcttcttggcttgggcaccgggtaccgggcgtcaggggcgagacaggcaggacttgcgcgcgccccgactcgactccagaccccgacccgactccgggctcggcctcccgcgacccctgcgcgcactcaccattgtggttgacccaggtcggcttcaggagcttcattgttcggccgccgccgccgccgggctgaggcgagcgccgggtccctcagcgcgcccgggccatggagccaccgccgccgcttcctcccgcgccacccgccctccggccgccgcccgccccgcgccctcagggccgccgcgccatcgccggcccgcgcccccctccgccgccacagccgccacccgcgctcggccgccgccgccgccaccacagccgcatcccctgcgccgctcctcctcaggcggctcccgggcaacgccggaagtcacggcgcgcacctgccaaatcgccccggcgggaaaccgctccccacgcggactgggccgccccggctcctccgctggcaggggcttcgggtcgggcccgggcgcgggcgccccagaaagggcggttcgcctggacggcggacagcgagcggggcctgcagttgcaacccgggccgcccgcagaggcaggcggggcccaggtggcgtggaccgcccgtcaccagctctgcctcgccagtctgagtccgacttattaactagcttccgtcattcatcaacacgcgctattgggcatcttgcgagcgccgggctccgcgccggcgccggaatgcgatccgggcttcggactcgaacgaatgcgggggacgagccaaccctggtgggggaggctggggcggacgcgtttattagaagatcggggccgtttgcctagacatgaacatttggactcggaggagcagagggacgccccctcggccgctccggctgcactgcggagccgaggcccgcgcgagggcgcagaccgaccaaccggctagggcctgactggctagactgtgcccgctgcagaggcgcgctcccagcacagggcggggacggaagggaggaccccgagccgcgtgaaacgcaaggccctcgtgtgtgcgcagctgacaccctaggcggggctgcgtcgggggcggggacaggcgcgtcccagcccacgcagccggaacgcctgagcgctgggcgcctggtctgccggacctcagcagggggcaccgcgggccggactgtggaggggcgcacgcccggaagcggcgagggtagccatgacggcctccgtgctgcgaagtatctcgctagccctgcgcccgactagcgggtgagtgcggacgctggccggatagcggagtgcccagggcgcgtgcggggtcttcgcgactgtccgccaggactcgcctgtgctccctgctcgcctcccagtcca

SEQ ID NO: 27801 - DNA, 2300 bp, Homo sapien
caccactgcactccagcctgggtgacacagtgagactccatctcaaaaaaaaaagaaaaatcaaatcctttactatcaagattgactgaatcaagtatctacaaagagtcgagagtgccagatggaaatacctttaatacttgcatcttccccacactctccagggcctccgaatgggcagggaagaggaagggtcatggagaaacagaaacttaagctgtgtcctttaaaacacacaagaatcccttcaaggagaatacttacttcttgagaaactgctcaaattttaaaaattacaaacaacaatctatggtttggaaaatgttggaaaaacagaaaagcatcggcctaaatttaactgagaaactttgtaggctgttaattttgcaaaccacacatccagcattcttgctttgttctctacacatagactgacacctttacccccagaggtcaggccctcgattgagttttacctcatgggaatgagttcccagaaagacaacaatgacgctcgctggtgagtctctctaagctgcgtctgccaagttcccagaagcctgaaagatacaagagtatgtataaatatctgcttctccaggctaggcgcggttgctcacgtctgtaatcccagcactttgggaggccgaggcgggtggatcgcgaggtcaggagttcaagaccagcctggccaacatggtgaaaccccgtctctactaaaaatacaaaaattagccgggcgtggtgttgggcgcctgtaatccgagctactcgggaggccggggcagaactgcttgaacccgggaggcagaggttgcagtgagccgaaatcgcgccactgcactccagcctgggcgacagagcgagactctgtctcaaataaataaataaatatctgattctctcccacttcacaggaaaataaaaaattgcaatgctcccaaacccggggcacttctaactacttgatatgacagcaaggtcaacgtggaaggtttttcaaaatctttcgttcagaccacagaggacttaagcaggaccgctgctcgccagggtgctcagattttcatgcataagagtcacgaccagatggctcatccctgagatattcgtggactgggaggcgagcagggagcacaggcgagtcctggcggacagtcgcgaagaccccgcacgcgccctgggcactccgctatccggccagcgtccgcactcacccgctagtcgggcgcagggctagcgagatacttcgcagcacggaggccgtcatggctaccctcgccgcttccgggcgtgcgcccctccacagtccggcccgcggtgccccctgctgaggtccggcagaccaggcgcccagcgctcaggcgttccggctgcgtgggctgggacgcgcctgtccccgcccccgacgcagccccgcctagggtgtcagctgcgcacacacgagggccttgcgtttcacgcggctcggggtcctcccttccgtccccgccctgtgctgggagcgcgcctctgcagcgggcacagtctagccagtcaggccctagccggttggtcggtctgcgccctcgcgcgggcctcggctccgcagtgcagccggagcggccgagggggcgtccctctgctcctccgagtccaaatgttcatgtctaggcaaacggccccgatcttctaataaacgcgtccgccccagcctcccccaccagggttggctcgtcccccgcattcgttcgagtccgaagcccggatcgcattccggcgccggcgcggagcccggcgctcgcaagatgcccaatagcgcgtgttgatgaatgacggaagctagttaataagtcggactcagactggcgaggcagagctggtgacgggcggtccacgccacctgggccccgcctgcctctgcgggcggcccgggttgcaactgcaggccccgctcgctgtccgccgtccaggcgaaccgccctttctggggcgcccgcgcccgggcccgacccgaagcccctgccagcggaggagccggggcggcccagtccgcgtggggagcggtttcccgccggggcgatttggcaggtgcgcgccgtgacttccggcgttgcccgggagccgcctgaggaggagcggcgcaggggatgcggctgtggtggcggcggcggcggccgagcgcgggtggcggctgtggcggcggaggggggcgcgggccggcgatggcgcggcggccctgagggcgcggggcgggcggcggccggagggcgggtggcgcgggaggaagcggcggcggtggctccatggcccgggcgcgc

SEQ ID NO: 27802 - DNA, 2300 bp, Homo sapien
gcctcccgagtagctgagattacaggtgtttgccaccatgcgtggctaattttcgtatttttagtagagatggggtttcgccatgttgccaggctggtctcaaactcctgacctcaggtgatctgcccacctcggcctcccaaagtgctaggattacaggcatgagccaccatgcccaggcttttctccttttttattatttttataaagatggagtctcaccatgttgcccatggctggtctcaagctcctgggctcaagcgatccccttgcctcggcctcccaaagtgccgagattacaggtgcccaccaccatgcccagctggctttcttttttaatgaattgcttctttgtgtcctttggccatttttccattctgaaataatccctatatttcttattgatatatatataacagctctttatacacacacacgcacatatatatacattaaagttatcaatctcttgctatataagctgtcagctttcttactttttttgactttcacatattatggaatagtcatcattttcttttatacagcagtctggtttccacatcagttcatctctttcagatcactgtatacacttaataatgttgaagtgttgatcagtcccattgattctcattccttggcactccccatgagcctcgcacctttcggctggcttctctccatctcctctcccacaaggggtccaccgtagcactgtattctacactacagtgtgggtgccaggagggcagagactcttcttatcactcgtgcatccccaagagcacccaatgtggtacatatttgctggacgaaaaaacaactagaaccacctccttaccggtctctctgctcctgtaatatattctctacaccctagcaaacagattgaacttcttttaccctctctcttttttttcccccctgagacaggtctccctctgttatccaggctggtgtgcagtggtgtgaccatagctcactgcagctttgaactcctgggcttaggcgatcctcccgcctcaccctcccaagtagctgggaccacaggtgcacgccaccacactttgctaacagactgatcttttaaagatataaatcgaattatgcctcccagcacactttagactaaactctaaactccgtatcaaaaggcccgccaggtccctggtataccgctctccaaccatccacctaccctctgcttcaggaacccaggccttatctgtttctcagcggtgtctaccggggctggatgaaggctggctcctggtcactcaggactcagcaacatcacctcctgcgtaggccagctgatgaccctaacaccggacggctgccctcttccctctctaaaccactctacaccccctcctcgctggtctcctcctttgtctttcacgccctctgaaagtcctgttgatatgctaatttacacaatctctcaaaagaaaggaagcgtgaggaggatagggaccccgtcagtccccggctaggtcgcggggcatggggcgtggaggggtggggaaagctgggccccgcaaggcgctccgaagcgccgccccgctccctcccggcgcacctgggcctcggcgttccggcgctcctcccagtcgcggcagctggccaggtcgcgctgccactgttcgcaggccggccgctcgccgtggacgtagtagtggtgtaggaagtgcctggcgctgcggcagagcttccactcggcgcggtaggcctcgcaggggcgcggcggctgcggcgagaggcggcgcctgagcggggcccggcggccgcgccctacgccccgagccagtcccgttccctccctccggaagaccccggtggttcccggctccgacccagcacactcacctgccagccgctgccgtccgccatgtctgggcgaccggcgcgccaagcccgcccctcagtccgccagccaatgaaaaatgaagaaaacggcacctcgtgatcgactgacagaagaactaatgagcaccgacacattcaatcacgtcttcgcccccttcttcgagaagcgccgacaaacaggacgagcaaccaatagcaaccgagggcggctgcggcgcgcgcggagggccggggtcgcagggtaaatccggggcgagacctggcgcgaagcctacgcgaccaccgcgacgacagcgccattcaccccgggccaggcgggcatcctgggccgcgcagctaccttacgtcagccgcctctcaaatcacacggctctggccagttcttttcagcagctttatgagattttctcaaatctcaacaatccggt

SEQ ID NO: 27803 - DNA, 2300 bp, Homo sapien
tgtgcctggccccattgggaataattctaagccaagaatttcaagtaaaaacaggcaataactaaagcctaaatctaaatgtttgattaggtactaacacagactggtggttgggcctctgaccataactgaaggcctgttggcaggtgctccgtgttccatctcaccattagaaaagtgtccctctggggcttctcctggagaaagtaggaagaaacaaggctgcctgatccctaggtggcaatggctaagcccagcagggtcccccatgagccagggctaaccctgcttccagacatgggggtcctgccctggtcagggcccctccaacactccagagaggagagaatggtggccccagggtctatccacgtcttcagtgaagagtgtctatgagtgtcatgatgttcagtacttggcctgtggcacaaaccatcatcactggaaatgggcgtggttttggaaggcatgagcactgtggggacttacctgagcctccactgacaaagtctcagttttactagcagagggagaaacccttggtgggtagacagccttcatttgcaggatcacatcagctaacagactgtcactttatgcataatgaagaatgttacagtacctctggctctgggtttttgtcttcactaagcaacacctgctgtgtatgcagtgaaacgcctggtcctttgctggaggcacactcccctgcctggaccaggatggattccattgcagagccttttaatgacacagtggggccagttggagcactgatcctggtcattactcctgcaccctggcctgcagccttcctctcagtgtcttatttgggcttggtccttgagccggctgcctcaacagcaggacccctggtaaaactgcagctttctgatccacctccagggagtctgtcccagtgtcattcctgggactggcccagcagtcccaggatttgtatcagtggatactgaggatttgttatcagtgaagtgggagaaccgcagcataggtactgcagggcgtttctgcaagcccaccagcctcctctttacttgcctttgttgcctcttgtgcattgctcctttttataaacgtcccagccaggcactggcgctccgcctataatcctagcactttgggaggccaaagtgagagggtcgcttgaggccaaactagcctgggtaacttagcaagaccccatctttacaaaaaaaaaaaaaaaaaattaaaaattagcctggtgaggctgtgcatgcttttggtcccagctgttcggagtccaggagtttgaggttgcagtaagccatgaacacgccacgccactgcactaagcctgggtgacacagcaagaccctgtctcgaaaaatgaataaggtaaatgttacatgtctcccgcacccttagaatagaactacagacatccaagccactcctaccccgctcacccctgctacacaccgcctccatacctttgaccggcctatggctgtactcggattgcattctcagcctccacttcaagcctgcgttccctggggaggtcattcaaccctagatccaccatatgtcatgcccaaccaatctcagttactttgcgagttcacctccatcctgagtggacgctcaagcaagactgctggagctgcagatctgggaggttcgctgcaccaccttgatgctcagtatgtacttttgaaaatataccggattgttgagatttgagaaaatctcataaagctgctgaaaagaactggccagagccgtgtgatttgagaggcggctgacgtaaggtagctgcgcggcccaggatgcccgcctggcccggggtgaatggcgctgtcgtcgcggtggtcgcgtaggcttcgcgccaggtctcgccccggatttaccctgcgaccccggccctccgcgcgcgccgcagccgccctcggttgctattggttgctcgtcctgtttgtcggcgcttctcgaagaagggggcgaagacgtgattgaatgtgtcggtgctcattagttcttctgtcagtcgatcacgaggtgccgttttcttcatttttcattggctggcggactgaggggcgggcttggcgcgccggtcgcccagacatggcggacggcagcggctggcaggtgagtgtgctgggtcggagccgggaaccaccggggtcttccggagggagggaacgggactggctcggggcgtagggcgcggccgccgggccccgctcaggcgccgcctctcgccgcagccgccgcgcccctgcgaggcctaccgcgccgagtggaagctctgccgc

SEQ ID NO: 27804 - DNA, 2300 bp, Homo sapien
aaattgtctaacatgaagtgttctttctttttcttcatttatcctttcttttcctacatcaattgcataggtgtcagtctttggcctaaaaaaaggctttaaatagacatgtgttctataagtagtggctgtcccactactgtggctgcaatttaagtatttgacaaagaatgtttctatttttattttacatatttttttcaaaaacaccactcagaagaacctgatctgaatgagtttgcacttttattctcatttcatatggacataactggctccttagtgaacctgttcatagtgaaacaactccatggagaagcaaacatgtgaatgttagaatgaacaaatgctaaagagatgttcctctccttcttccctactccccaactcccaattttaatttattaaatcatccaagcttctgctggcctgtattttttatcagtatttatttggtcttagatcttcactttctataacgtgagatcttttgacatgctaatctgattattttaaatttgttcccatgagccactgtgcctggccccattgggaataattctaagccaagaatttcaagtaaaaacaggcaataactaaagcctaaatctaaatgtttgattaggtactaacacagactggtggttgggcctctgaccataactgaaggcctgttggcaggtgctccgtgttccatctcaccattagaaaagtgtccctctggggcttctcctggagaaagtaggaagaaacaaggctgcctgatccctaggtggcaatggctaagcccagcagggtcccccatgagccagggctaaccctgcttccagacatgggggtcctgccctggtcagggcccctccaacactccagagaggagagaatggtggccccagggtctatccacgtcttcagtgaagagtgtctatgagtgtcatgatgttcagtacttggcctgtggcacaaaccatcatcactggaaatgggcgtggttttggaaggcatgagcactgtggggacttacctgagcctccactgacaaagtctcagttttactagcagagggagaaacccttggtgggtagacagccttcatttgcaggatcacatcagctaacagactgtcactttatgcataatgaagaatgttacagtacctctggctctgggtttttgtcttcactaagcaacacctgctgtgtatgcagtgaaacgcctggtcctttgctggaggcacactcccctgcctggaccaggatggattccattgcagagccttttaatgacacagtggggccagttggagcactgatcctggtcattactcctgcaccctggcctgcagccttcctctcagtgtcttatttgggcttggtccttgagccggctgcctcaacagcaggacccctggtaaaactgcagctttctgatccacctccagggagtctgtcccagtgtcattcctgggactggcccagcagtcccaggatttgtatcagtggatactgaggatttgttatcagtgaagtgggagaaccgcagcataggtactgcagggcgtttctgcaagcccaccagcctcctctttacttgcctttgttgcctcttgtgcattgctcctttttataaacgtcccagccaggcactggcgctccgcctataatcctagcactttgggaggccaaagtgagagggtcgcttgaggccaaactagcctgggtaacttagcaagaccccatctttacaaaaaaaaaaaaaaaaaattaaaaattagcctggtgaggctgtgcatgcttttggtcccagctgttcggagtccaggagtttgaggttgcagtaagccatgaacacgccacgccactgcactaagcctgggtgacacagcaagaccctgtctcgaaaaatgaataaggtaaatgttacatgtctcccgcacccttagaatagaactacagacatccaagccactcctaccccgctcacccctgctacacaccgcctccatacctttgaccggcctatggctgtactcggattgcattctcagcctccacttcaagcctgcgttccctggggaggtcattcaaccctagatccaccatatgtcatgcccaaccaatctcagttactttgcgagttcacctccatcctgagtggacgctcaagcaagactgctggagctgcagatctgggaggttcgctgcaccaccttgatgctcagtatgtacttttgaaaatataccggattgttgagatttgagaaaatctcataaagctgctgaaaagaactggccagagcc

SEQ ID NO: 27805 - DNA, 2300 bp, Homo sapien
gtgtgaagccatcaggccacctcttcccctgagctggccttccagctcctggcatgggcaggcgggtgacaggtataccccatctgctgtcttggagggcatgtgagccagtgctttttctgggctggctggtggactccatcccacccatgctcccaagcttcttcagggcgagccagcctggaataggtactggcctttttccttgtagccaaggcttcgtctgctgacctagatccgagccctggactagccgtttgtgacatgtgggtactcggctgcccgttgtgctgtatgctctaaaatgctgcatggggagggccaggcatcagctcctcctgcctgcttagtgctctcaggcctcttccagcagcccatttctcacctcaagccctagtctgacctctctgcctgtcctcctcacatcacctatggcagtgtcctgcctctggctgaggaagccaccccccatccctggccagccttccctcaggcttgcaattgcagcccagtatccttcccctcgctgacaaatttcccacaaaaatctacccagggacagtgcgcctggcctgcgactggctaactctgagccttagaatacttcctgttagaacatcactcctggggatgccagacccccgttaccaaagccagtcacctctgcatccttctgtgcctgcctgtggcatttggtagagtgaccaccctctatttctgcccttactagcctgacaagcagctgtcagcgtgagtgcatggggtcctctgcaagcctatccatagggcccaccactcaggcttcactcatggcctaggcacggcttcccaggcacagcctcggcctcagcatgcctctccctcctcatgagctccctctcatttgtgacacagccctcagcccccttttcccttggctgttaaagtcaccttctcactgccactcccgatgaaacattcttgaagggatgtgatacctgggatttgcttcagggcatctaatgtggcttgggactgggtgtgaggtagtgctgatcgatggactgagccacgacgtgagcactgtccaactgtcagggctcggtgcgtgggagctctcttctacggctctttctactgatgtatatgtctgacaccccttttaagacggtttcaaataagacaagcaaaatttcattgcaagagacatagagcttctgacctgagtctggactccctgcacacccagtactcatgggcattgtttatctctttccgtctcacttctcagccgtcgtctacctggctgggttgtttaatagagacatgtggaggctttgtcagatttttataacctccttagcagagacctctggggtctgtcaccatcttgcagcctcagctgtggtgggccattccattgccaggtcagccttgccttgtgctgcttttgtcctacctcaggtgcagccctacttgacgcagggccttataatttgcttgtgggacagcttggaagtacagtgagtgactattccaggaaaatgctctgcccctgggaagcctggagctagtgagtaatccgggcagccctgcagagatgcgttcacactgtgagctatacagcttcagtagcacccctttattggccttcttccttccacatcacttgatttttccctccttcctgacatagtatcacgaattacttatcttggctcaggttcctcttccaaggacccaagtaagacgggcctgcccagtgtatagggagcagtggttgtggaggctgcttcatctctaggagtctcatgtagcctcttcttcctttcagatgatgcagaacttactcttggaagaaggcggcctggtccaggtggagagcgtcaaccttcaagtggccacctactccaaattccaacctcagagccctgacttcctggacatcaccaaccccaaagccgtgtatctttttcaaataagcggagttcttctagacaaaggagagtgtgctggcggttgttaaacatcatgtactgtattgaatctgtgcctgctttggggatcacacatttgtgattcaagttgtgatttgagaataatggggttcagctagcacatctgcgtggccctggccaagtgcactgggtgctgtctgggccacctctgtcactttccagacacttcatggagaccacaatgaagcccttctttcagttggtctgtgtcacctggcacaaagccaggatgcacagtatgtccagtggaaggagggagcagcttatctgccttcagctccagccccttctgtggctccctag

SEQ ID NO: 27806 - DNA, 2300 bp, Homo sapien
aacatctttcctgagctccagacccccatttcttttcttttatttatttatttatttattttttgagacagagttttgctcttagcgcccaggctggagtgcagtggcgcaatcttggctcactgcaacctctgcctcccaggttcaagtgatcctcctgcctcagcctcccgagtagctgggattacaggcacccgccaccacgcccggctaattttttgtatttttagtagagatggggttccgccatgttgggcaggctggtcttgaactcctgacctcaggtgacctgcctgcctcggcctcccaaagttatgggattataggcgtgaaccaccatgcccggcccagacccccgtttctaatctccagtgcaccaatgcatcctcagcatgtcaaaaactgagctattgtcttccatccagaagccactcctcttgctgggctcctgcctcttaccaggagtgagataggcccacaggggttctaagagtggccacattcttcctcccttttctctgaccccttatcccatgagagcaacctggaaacccatgccctagccccatactacacaggcacagaaaatccctatcatggacaacccaatcaaggatgcagtcattgccttccagacttaaagagtgtttctggtgtgaattcttcctgtgtgaggcaggagactggggttggccaggaggacaggttcatgcttggttttgggggcctctggtggcagcaagcagagaacaggtgctggctgtggtgtgactcacctcgggctctttgcccagcctgactccagagtagcaacttgacctctctgaacctcaatgtcctcttctttaattggggatatctacagtgtctgtgcatcagaagtactgtagtgtctgtgacaacctaagctatccgattccaaccacaaggtggaggtagcccctgagccagcactggctgtggctatacccagtggaggcctcagctcaaccagtaggtcaacagagctatggagttcacagttctcacgaagaccctgtcattacagaggagagaacaggctccctaaaaaggtcttcctttcaagtcatgctgacccaggagccagacaccaggggtgacccttggcacaggtgtccagaagagactcaggggctgggtcattgaggtgtagctcagatcagtgttgttcaaatcttttaagtgatgggagaaactctttctgtctaaatcttataggaagtcctctaattcataaaatgaggttctctgctttttttggagaaagtgagggggtacagagggactgggagccccagggcactgggagcctctaagtcacaaaatgcagtttgagagtcagtggactgagggacattggagtctctttcacttgcaacaatctcagacccttggctgagcccagtccagtttactgtggaccagctgtatgtcagctccatggctgtgcagctgagaggtggaccgggacagaggtcctggcccctttactgccagtgtgagagtcacccttggtgataggagggagtgcccacccttactgtacctccatgctactctcagaggttctctgtagcttcctgcccaagcttttaacttgatttgctttattagaatttttagggagatctcaaatggaatctgcgttacttcctaacactaagtgtgatttttattggaatatttgtctgaactaacaagctaaattctgctttgatggttgaatccctggacttaagccagcagccttggtttgaatcctggcatcaccacttgtgtgctgtgaggtcttgtgtgctcaccacttgtgtgctgttacttaacctgtgggccttagtttccccatagataaaaggggataatgatagtacctacctgactgttctgggaagactgaacaagggccttacacatggcaaacaccatcactaccatcagttccttctcggtcttctcccgggggcccagtgtctcctgggttttcctgcctctttttgccagcccttcctttatgtgcctgtgcacctcttgggtcagcacgtcaccagtccagcttacttgcctctggccttgctttcagcccacacctcaaggtccatcagagagagggggcgtcctatgtcatgaccctgctgagagctcacactgcccgctgggcccaggccctaggttctaccccgtgtggtgcccctccccttcccaaccactcgcacacctgtccccagcctgtcttgcctaattatccaccatttctgaactgcctgggctcctcttccctt

SEQ ID NO: 27807 - DNA, 2300 bp, Homo sapien
tccaaaattagcaagctgaattagccatctcccaaaatgcaaacatagcatgttcccgcctaaaatctgggatggttctttactccctggcactctaacacagtaatttccaatcttttgtctttcttcttttaagcagcataactgttcagctaaatcttggccagaaccataacacaggaaatagcgtttctgggtgaacaaggccagaacagggtaggggcttgcttcccttgagtgcttctcactagccaacctatgtaagccatttcttctctttgaatataaaaggtaaatccgcacaaaggggcaacatacttaacaacctgcctgcagtttacccatgaacccgaccttctgccccttctttgctgctcccgatcccatctctcactttccttttcaatcccgagacctagcacactgcctggaacatatcaggtattcttgagtggatgaactcaagaatagaaataagccagggtttgacagtgacacacttgggataaaatctaacaatcattccttgtctttactaaaataaacaggtgacaggaagacaataccgtagagtgctttgcagccagacagacttggcttcaactctccagtccctacttctgtgactcgaataaagtacctctgtaaacgttagttttctcatgtttaaaatcatcatcatccttgcttccaaagggattgtagggattaaaagaaataagccgcgatgagggagtacaggtgttaaaagctgtgtaacaggaaatgtaccagcaggtattagcttccatcgttatcattaccgaacacaacaccgctgtacagattcgaaggcacgaacccgtaggcacggagctcacggagctggggcaagagctgggtgtcccccaagagcgggggatgcccactacggattctccctggggagcgccctgattctgttcccatccccagcaaccttgcaactaactttgggtttatggaaacctgttgcgcgtccagcacttgggaaacccgtgaatggacacaaaccttcctttctttcgtcaaggagggcaagtccggctgagacagaatgcgagccacgttcaggaccggcggacgcgaccacaggcggttagtggtcaagggtcctgcttgtgcccggtgcggccgatgagcctgcaggccggactcaggcccgggtgactcggcacctccgccgccgtcccgccccgccctgccccgccgggccctacctcaggccccgggccaaggcccagcccccgcccgctgcccgtcagcgcttaccatgatggacaccacctggcagactccgctcctctcaggcaatgcaacgaagaaaccccgccgaccgctctcccagccgccgctgccgctgccgccgcgccaagccggtacgccccagaggctcaccggaagtgccggacccgagacccggagggggggtgcccgggacaaagcgtcggctgcaaaagagaaaaggccaggcgaagacgctaggctctaaaacaccctcagtagaagcattaaaatgccctttcgtgatttatttccccttttataggtatttttaaacgttattttaaattacgtgttgacagtattcccctccagacgaatttagtagggcccattgtccttacgactacactacccacaatgcactacccagactgcctctgcttcagccatcgaggactcgggcggaactaagctacaaatccttcttcaaaccacaccaaaaacctattgcaaacgtaaatgctgccccattgggtatgtgactgagtttaatgtatggttagaagtatactttccctgagggttcccagtgggaggcagtaggcttctcttcccaaagtaaagatgtccgcccagcgtcgcttttctgggtaaaagcgagtcagagttgaagggggcaacagtgtttgcgttcggcctcagaggtgacgcttctttgggggcgggctggagttttctggccgtgaatggcagagcgctaatggccgcctccaatgtggcccaatcagaaagaaaggaaggctgggaactaagaagctattggttggtgatccctggaccaatcggaggagccgtgatttggcgggagtcttgaccgccgccgggctcttggtacctcagcgcgagcgccaggcgtccggccgccgtggctatgttcgtgtccgatttccgcaaagagttctacgaggtggtccagagccaggtgacgcccagtccgggacccccgccgaggccttgccggtggggaagggatgagggggagcgaccgtgggtga

SEQ ID NO: 27808 - DNA, 2300 bp, Homo sapien
atcaaatttctgcaaaacaagttaaaacaagttcaaagttggggctatccacattcattatctttttttgctgtcaattttgcttctacaacttgggcgtggtaagtcaccagtaaatacagcatgtttttctcttccatattgcctaatgtagctgatacttaaatacacgcttaatctatcgtggaaatagaatgctgtgtcaagaaattacaattgagtaaaaagccacgttattctaaaacgcatcttcaatacctgttctttatgctcaagaaatgcagtttcaagttcttgccacccagaaactggaaccagcgtatattgcacgtggtcacactggaacaaggcctggagagagagtgttttcaaagcctatcttatttaggacattagcaatttaccttgaaaagaaactgaggaagattagacgggttgagagacaaaagacacgggataacattaaagctagtgaaatgcttacgggaaaagctaggtgctagggatatgagcgtttaccataccattctgtgaattttgcaaattaccaaagtaaaacatcggggagaaatgccgatttaacttccaggccttctgaaaagttcctgatccaagggcctgaccaaaacaacgtaaatactatgccctattcaaaaccaaactaacgatcttccctaatagactaggggctcccatattcccagcaacacctgtgacacgactatacccacagttgtcacagattcctctctctcaaatcccccatttgagaggccacgacagatccaaagtttcccccaaatgcaactgctgtgttcacctattaatattaatagcttattgcaaaaatacaaactagtctctttaccttttacttaatcctttatcccaccccacaccgttgggacagggaggcaacctctcctccgagtctctctcctctcacttgctgttcacctcctgccctgctccctctcccaccctaagccctcagcacccatcctgacactctgcccgccctgcgcccccacgcagcaccctcacctcgcgcgccggccccgccctcctagggtccgcagaactcacctgaaggatcttgcacgcacacagagcatccacgtccgaggccacgaagagaaggaccctctatcggggaagagcagaccggctgaacacggcgacccgaaccccggccctcccctgcctcccggtcacccacggtcgctccccctcatcccttccccaccggcaaggcctcggcgggggtcccggactgggcgtcacctggctctggaccacctcgtagaactctttgcggaaatcggacacgaacatagccacggcggccggacgcctggcgctcgcgctgaggtaccaagagcccggcggcggtcaagactcccgccaaatcacggctcctccgattggtccagggatcaccaaccaatagcttcttagttcccagccttcctttctttctgattgggccacattggaggcggccattagcgctctgccattcacggccagaaaactccagcccgcccccaaagaagcgtcacctctgaggccgaacgcaaacactgttgcccccttcaactctgactcgcttttacccagaaaagcgacgctgggcggacatctttactttgggaagagaagcctactgcctcccactgggaaccctcagggaaagtatacttctaaccatacattaaactcagtcacatacccaatggggcagcatttacgtttgcaataggtttttggtgtggtttgaagaaggatttgtagcttagttccgcccgagtcctcgatggctgaagcagaggcagtctgggtagtgcattgtgggtagtgtagtcgtaaggacaatgggccctactaaattcgtctggaggggaatactgtcaacacgtaatttaaaataacgtttaaaaatacctataaaaggggaaataaatcacgaaagggcattttaatgcttctactgagggtgttttagagcctagcgtcttcgcctggccttttctcttttgcagccgacgctttgtcccgggcaccccccctccgggtctcgggtccggcacttccggtgagcctctggggcgtaccggcttggcgcggcggcagcggcagcggcggctgggagagcggtcggcggggtttcttcgttgcattgcctgagaggagcggagtctgccaggtggtgtccatcatggtaagcgctgacgggcagcgggcgggggctgggccttggcccggggcctgaggtagggcccggcggggcagggcggggc

SEQ ID NO: 27809 - DNA, 2300 bp, Homo sapien
caggggtttgtgtccctgcctaaccaggacacctccgatctccacctgcaggccctggaccactgtggcactgtggacacaaggccgcttctgccccttggacgccgagccccttcccacctctgggatcttgcactggctattgcttctgctctgcctggaacttcttccccggatccctgtgaaatgtcacctcttcagagaggccttcaccactgtctttcctgcccagttcttggttgataggttcctgtcagctccttctgggcaggagcttcttgtgctgtgtgctctgcctagagacagtgcttgccacgaagtaggtgagcagaccctccatgagtggcaggaaaggtgggtgcaccctcatgcccctccggagtctggcctgggctactcagaggccagcctccatctgaggtgggtttgtctggggtggcgtcagcccctgcggccctctctgggcctctctgcattggcattgttccactgcagcctggggcctcgaccaacatagtggggtcagggtagaaaccagattgtgaaaggtgaagcctgagactcctctgccacgtccctgagatgctgtgaggctgccgccaaagaaacatgagcttgctggggccaccctagggtgacagctaggagagaagaaaaacaggcagccaggtgagaagggagagccttgggctggctgcagctccaagctggctagagggcaacaggcagcctcctgtgcaggacagacgcatgaagacagccaccctgtggaggttattcctggatactaggtgggaaagtcggcaagcaaaaggacaggtccagctcaagcttctaaaagcaatgctgggggacggtgcagcaaggtgttcctggaaatgacctcggcaacacatcttagaagatgagcaggacccaacctgacagatacacgctgcgggcagaagaggccaaggtaagagacggcccatgtgaggcccataggcaggtaagtctcctggggcagagtgtgtgctcagggccgcaccaagactggtggctggactggccagtcctagcgcatgcaggtacacatcaatccagctgctctgggagtcggctcttcgtccatgggcaatgtgagccatggagggtcttaggtagggtgaggcccaggagaggggcctggtggggtgggtggcctagctgggcaagggcaggtccctgatgacctgaggaggccgcagcagtcatcccaggaagatggtggcatggaagggctgggagtagggggatctggggaagttccctgggcttgggttagggggtagtaagagtgagagggtgggtgggtcagctgtacccctggagtacacagaggaggagatgtccaggagggtctgtagaggaaggggcatggcccatgggtctgcagcaggaggaaggcagtgactaaagtgatagctgggagaaggcagtggtcctcagagccatacctggtggggagaggccacgtggggctgagcaaagagggtatgatttccttccagcctcagggctgggcacacttgccttcagaacctccccacactaggtgagccagacgctggccttatctcatttaccatctcagagccatctgaagggggagaagggaaccgggccccaggagggagaaagtcatcaaacctcccacatctgtgaccagcctcagtgccatactttttctatggagggccctgtccaatggaactgagcacagaccagataaaagaactgggcacccagtggcctcagtccagggcctggagttcaaactttactggaaacaaaggggccgagagagactggggaaagaactactagaaaggggctggtgcccccatggggctgtgggttttggagccgcgtgcccccacctgagcctcagggggcccggagtgtccacaccagtggacctttcgagaaatggctgggccattgtgcagaagaatgcccggaaatcccgcgcctccctcctccagcaaggatgggggctcttcctcctggccaggaaactccaagttggcttccggagggtggcctgggggctggggtgccagggacaccatcgccactggtgggagggcagggcacagcccctccgtgtccctttgtctctcctgtctgaaggccagagcaggctgctaggcctggggccaccactgcccctgggtgctacacccagtgtgctgggtcactgggaacttcctgaagtggtgtcacctgaactgggcccccaaggatggggtgcgggcagtaccgcaggaagaggagcagcc

SEQ ID NO: 27810 - DNA, 2300 bp, Homo sapien
gctgccttcatttatttttttcaggctcatccatggatgtggtattgccttcatttttggaatacatttttggtgagtatagaatttaggttaaggctgggcgtggtggctcacgctgtaatccgagcactgggattggcaaatggatcacttgagctcaggagtttgagaccagcctgcacaacatggtgaaaccccatcgctacaaaaaatttaaaaaacaaaaataaaataaaataaattagccgggtgtggtggcgcacgcctgtagtcctagctatttgggtgcttgggcggctgaagcgggaggatcccttgaacccggaggctgaggctgcagtgaaccatgtttgtgccgctgcactgcagcctcgatgacaaagtgaaacccggtctaaaaagaaaaaagaaaaagaattttaggttacagggatttttttcttgcagtactttaaagatattgctacactatcttcttgcttgcactgtttccaacaagaaatctccttcttcttgattcctctgcacacaatgtgtctttttcctctccatgcttttttttgttttgttttttagacggagtctcactctgttgcccaggttggagtgcagtgacacaatctcggctcactccaagctccgcctcctgggttcacgccattctcctgcctcagcctcctgagtaggtgggattacaggcgcctgccaccaagcccccggctgattttttgtgtttttagtagagacggggtttctccatgttggtcaggctggtctcgaactcctgacctgaggtgatccgcccgcctcggcctcccaaagtgctgggattacaggcctgagccactgcgcccggcctttcctctccatgcttttaagactttctctttagcaccagttttacgaaatttggtttatgatgtactttggtggacttttttttttttttgagatggagtcttgctgtgttgcccaggatggagtgcaatggcatgatctcggctcactgcaacctctgcctcccaggttcaagggattctcccacctcagctacccgagtaacggattacaggtgcgtgccaccacgcccagctaattttagtatttttagtagagacggggtttcaccgtgttggacaggctggtctcaaactcctgacctcaagtgatccgcccacctcggcctcctgaatggaattacaggcgtgagccactgcgcttggcctggcttgccattctatagaacccttgacccttcgtggatcacaccagagctccctgccccccactccctcacccgctggggaagttaaagccacagtgacctccaattctgactaacagccagcgatgactaccctgaggggtgcggctgaggttggatgagctgtgaaggccctgggagcctgggtggatggcactcaggaaaggcagaagagaaccgggactggcatcggcctcccctgcagcctcgcagcctccaccattggggggcttcgttaccagtgaggaactaaggcagagaggccacctcactagtccagaaagtttcttgcttgcgggagcgaatctgactccatgcctgtgtttaaccacaaagagtaacaacaatgcccgcaaaaccgccgagtctggcactgtccactctggatgctgctcacatcgtcacagccgcccaggggccccacacagggtgcctcgggcacctggtgcagtggtcagggatgcaggaggaccccagctgctgctctcggcctgcaggagtactggcttgtgtcaagaaagagcaccaggccacactgtgcttggaggctctgcaaacatttgcggaaatagaaggacacatccttaactgtttcaaaactgaaagatagaagaaacgctgttcttcacttcccctgaaatcaaatctgttaactaggagtttcccaaacccaaatccccaggaatcttgagcctaaatttagcttatccttggaaggtcacgggattaccctggggcagggtcagccagcagctgctcaagataaacttggcttttctgcagactcaggctcttctcacacacaattaatgagatcctgccattcttcccctgggaaagcagaacaatggctgggggtgagcaggtggccttggccagtgctctgccccaagggccctttaccagagatcaggggtttgtgtccctgcctaaccaggacacctccgatctccacctgcaggccctggaccactgtggcactgtggacacaaggccgcttctgccccttggacgccgagccccttcccacctctgg

SEQ ID NO: 27811 - DNA, 2300 bp, Homo sapien
cctcttttctgggagtgttaatatggatgatagtcaaatctgttctaattgggcccttgatttttagctcaacccatatttcctgtgtattttctgctgaggccatccagctgaatccctggcacccagaacaccaacagatactcagtaaatactcgttgagtgaatcactccaacattatgaggtaggtcttgtcatccacattctgcaatatgaggcaaatcgccaaggctaagtgaactggtcaagatgacttggctagtaaattgccattaggtacctccatggagatgctccccaggcctcatgcacctggtgtgcagcactgacctcacctcagccctccctcctcatcctgcacttccccaccccaccatcccccagcccactctccttcctgaactccctgtgtcagctccagcttccactctctttcaccagcacttcctacagccacctctcgctcctagcttctcgcctttacaaccgttctccacgaggcaccagggcaagctgccctaaacccaaatctgaccaggcccttctctgcctaaggctctgcaatggctccccaccctctagagaataaaagtcaagctccggttttacactccagcatctgcttctagttctccaaacacatcacaaactccctggccttcctgcttgcgttcctactgtacctaggggacccatctcacactgcctgtgaactcccatttctgccaagctcaggtcccacttctctaggaagcccccctgccctcacccctaggtccaggtcaggcagggacagctgtaatcctcaacatcacagggtatagatacaattacctagttatgtgtccacctgccctattcaagtagaagcacctgagggcagagactaggtcttttttgatctttggatgctgagtgcctggcacaaggtctgcacttggtggacacttcagtgtcttaatgattcaattcacccagttttccaaacctaggcatcatcttagtttctgctctaatcgggagcctgtcaattactctgcccaaaatctctctggaatccttctttctccctccccactgcactcctgagctcaggccctcattattccctggactgagactaacttccttcctccgaaatcccctttgtataattacaattcctgtctggttcctgtaagtcactttactgaaacacacatcttatgtaaattccacgcctaaagaccctctgcagcgtttcaggacctgcagatgaagggggctttcaagacactccccatgcctttcccacctcccgctccaagcccacctcttgcctccctacgagcccaacaccgctctagcgatcattcccagaactctctagacacatctatgccctatgcaggctttcaggcacctgctgtgccaggatgctcctagggccatctctcgtctcggccatctcccgtcttatccttcaagttctggttcagaggtcatctacttgacgaaacctgagctgccccctcctcccactcagaactcatcccctgcctctcctctctgaccccaggcactttcaccgccactccttacaccacaaggtccctgccccaccttcctggcaccaggctgcagcacccaacgcaagcgcgtgcaaccagtcattaagcggccgccccgtttccttccatttaaccttgctgcgtcgaacatatcgtgcaccctcttcatctcaacaatgggaagaaagagttccagggctatgacgtgcctggcccaaagccacgctgtggggcagagctgggacctaggccttctaattggaaatcttatttatgcgcagcactgaatgcgcgggtcggcagtgaggaccccaggggtccggggttgagggggccgtgccagctgcttccgcaccatggccaccctgctcatgaggactcaagtccgtgcatttgctgaaatttggtctccttccactctcggttgactagaaccattctctccttcccgcagctgatacgagaacttggggggcagttgctgtctagtgatccccacgtcggagcggaagcccgcggcgccacacacgcaccacgcacgcctcgcacatgcgcagccctcgctctcgcacgcaactcgtggccacctagcctagaggcggctgccaagcgtcctggctgagggatggcgggaccccaggcggctggagtggagaaagttgaccgcccccgtcttttctgccccgtgggtggctactgcgtgcccccaagtaacccagaggttgagggccccccagtgcgcggcggcc

SEQ ID NO: 27812 - DNA, 2300 bp, Homo sapien
acatgtgcctcccaccctttgagctatgcccttgacctgctatgcacttgtctcaaggccaagttcaaaccccctaacccaaggctgtccagagctgccctgccacctgagccatggggaggggcgctgagctggtgcctttcacaggctgcctgcctccccctgggcagggctcctgtctctcctcctttgtctccacaagcacaggcttgcatgggtcagcacgtggtgaacagccaaccatcattttccaattctttccaaaaagtcctgtctatgctcagaagtcctgcctggccctttgagtgcccctacccccacacacacattcttttttttttttttttttttttttttttgagacggagtctggctctttggctcaggctggagtggagtgcagtggtgcgatctcggctcactgcaacctccgccttctgagttcaagtgattctcctgcctcagtctcctgaatagctgggactacaggcatgtgccaccatgcctagctaattttttgtatttttaatagacggggtttcaccgtgttagccaggatggtcttgatctcctgacctcaacacacatttctttatcgaaattccaaattctccaaagctcagaaacataaaggtttttcaaaactcagtggcaaagctggacctgaacgatgcgccatcacttactgtctttatttcttccagttcacctgaatacatatgttttgccccgaaaatataaatgggtctgattatgaggagcagccccaggttccaaagaggtgccacataatgtatgatgtatacaaaaaagcctgagttccaaacacatcttggatgagaggttgggactgtgggggatccctacactggttagagttctagacccagagcagggttatggtcaacggcgctctggccacagaatgcagcagagcaaggactgtggaacaaagacgcggcttacatgaatttttcacttaccgtgctgggtgctggtgattcagagatggaaaggccctagcgacacccccctccacccagggagcccacgggccagcagagggaccaaggggcacaggacgggtggggagcagaggcggattccctggctgtggaggtactgtctatacggggtgcaggagacatctccatacaagggggccctcacctggggaggtggtgaccgcaagcctgacagccccaaagccttcagagatgccgcctggggacactttgggaaagtccaggcggaggacacctgggaatgtgatagtgacacaaatgaccggagagacttgctctcagtcactgagtctggctgactcactgaagattagggcctgaacttccccctctgtaaatggggtgcaggccctggccctgccttcacagtgcccctcggtcccctacaagccttctccgcagggtgggatcgggtctgcctggagcatccccacagcctatgggtcagcagagaagcaggcgcagagctggggtgagacggtcagggccggtcctgccagacacctcagatcactcctcttcacaaataatcccattttacagcccaggaagagagaggccggaccactgcccaaaagcctgtggcctacagcctgccaggtgcgtctgctcgcagagcaggtctgcgcagcaccgagcggtcagcaggggcaatgctgggcactggccagccgcgccaggaccatccctgctgacctcggcggggtggggcggagcgtgcagggtctggcccggaaagccagggcaggctttagagaagggccaccggacggatggtccgaggaccggcatggacccgggtcccagcgagggcggggggagcgtaaggctgggcctgggctgcggcaccggggaggtggcggggaggaggccggcaggaacagccgtgcagggcgggggcggcgcgggtctggtcgggtgaccccgggcgcggccagggctgtaggaggcgagggcgtcgccccgaggccgtggtctcgggtccatggtgggggacctgggtccccgcccccccgggccgccctgggtcgcgcgtgggcgcggcgggcgccgattggctgccgggcgcgcgggcggagcgggcggcggcggcggcggcgcggaggggccgctcaccccgcagcccggcctcggcctccgccgcttgtcgtcgcgccccgcccgcgagcccgccccgcacgtcccccgccggcggccaccatgagcacaggcctgcggtacaagagcaagctggcgaccccaggtgagcccagcgcctgcccgcgtgcccgcgcg

SEQ ID NO: 27813 - DNA, 2300 bp, Homo sapien
ggccatggtcgtggcaggccacgctgggggaggggagtcaggctccatcagccagcacagtccctgaacagccctacagcagagggcctgtggtcaccacccacctcccctgcaccttcatgcccctttccctccccatacacaaatttgagtgttcaggtctgcaacagggactcttccccagattgggaacccccagggtctggtctgagtcattctgggtgcccagatgggtcctgggaccctgtgggtacaaataggcttgtggcttctcaaaagggttggccccaccctccaggaaagcaagactggacaggaggctggtctaggcacctgggtgaaacccagccgagctcagggttaaacaatgctgtgaggcccctggggtggggcgggggctgacaaccaggtgggctgggggggctggggaaagcctgctggtgtcctctctggcttgagctcagccatctttggaggaaaaaagaagagcccaattctggcaccagggtggcactggcagcccccatcagggatggagtttctcaggagccatggatgctgagtggaactccagagtcctggcccagggtgcagcaggcagggcaggagggcgggcaggggggccaggagctgggggagtcactggctgaccagtgccattctcctggaagggacacaccccacccagaggtggatgaggctctctgggaggggccccttggggagccaggctgggagctgcctccccatcacagcaggtcagacaaagcctgagatgcagggacacatgcgtcaggctactgtttgagggaaatggaaggaactgaggctgggaaagccaggaggccaggcccctgaggcttctcctgtgcctgcaggtgtccccagcttgacccaagggcactctgagaccctgggctccagccactgctgttgggtgcagccaggttctcttgcccattactgcagggtggggaccccctcctgctgaggtgcccatcgtttgaggtcaaccgggagtccacctcaccccatcccaggcctcccaggcctccaagcccagaggaagaaggcactgtgtggccaaggaagggagccccggagcaggagccaggccaggtgtctgggtgaccagtgggtctgggggagctggaagcacatggcagcttccctgctaccaccgttgctgagcctcagcctgtccaagcattctttttgctctttgaaagggggctgtagaggcattgggggagttccgtcactacgctctgtgcccccacctcctcacaggcagcaccggtgatctcttggccctggctgctgctcccagagctgactcgggtgattctaagaatggaagtgccagagaggctcaggcattgggaggagatgggcgcagctgtgtcatatggctcaggaagccctgggagtatcttttgtcacttggggaccagagaaagggggtggcaggtacggccccttccttgaggctcccccagggaatccacaggccctgactgggccccagtgggtggcagggcaggtgggttgaacgctgagagtgagattcttgccctcctgacctgggcctccccagaggctgtgccttaccaatggggaaactgaggcaggcagtctgagagccacacactctgttagacacctcctagcctgaggcctaggcccagggctgtctgtcttcctggagatgccctgggcctgagatgccagcctgtctgggtgggtgctgggcttcgaggtgtggaccctcagttggaaactgggtgggactcagcctagaggcttcctgcaggtcagggccatggaaggctggggccagtgaggaggctttctggcagcaaggactgagggatgcactggtagagctggggggcctggagctgccccctttccctgggatgaaaggctctcctgttcccagctgtgggcctgcccctcctccccaggtgccagtggtccaggccccacaacaggaccagggcctggacaggaagtggaggaggtctctcagccaggagagcctaagggagggctggtggcgggtggggtggggtggggttggggcctccagcttctaatgttctaatgtgcaggggcttggcctgaccagtcctaccctggaacctttccaggccccatgtcctgctccgctgggcttgcctgttgggattctactggggtcatggaggtgggtggcccacagagcggagctcgggagacccccgcagtccctggagtagccacatgggagggaggcccggctggcaggagctcccagt

SEQ ID NO: 27814 - DNA, 2300 bp, Homo sapien
gaggcattgggggagttccgtcactacgctctgtgcccccacctcctcacaggcagcaccggtgatctcttggccctggctgctgctcccagagctgactcgggtgattctaagaatggaagtgccagagaggctcaggcattgggaggagatgggcgcagctgtgtcatatggctcaggaagccctgggagtatcttttgtcacttggggaccagagaaagggggtggcaggtacggccccttccttgaggctcccccagggaatccacaggccctgactgggccccagtgggtggcagggcaggtgggttgaacgctgagagtgagattcttgccctcctgacctgggcctccccagaggctgtgccttaccaatggggaaactgaggcaggcagtctgagagccacacactctgttagacacctcctagcctgaggcctaggcccagggctgtctgtcttcctggagatgccctgggcctgagatgccagcctgtctgggtgggtgctgggcttcgaggtgtggaccctcagttggaaactgggtgggactcagcctagaggcttcctgcaggtcagggccatggaaggctggggccagtgaggaggctttctggcagcaaggactgagggatgcactggtagagctggggggcctggagctgccccctttccctgggatgaaaggctctcctgttcccagctgtgggcctgcccctcctccccaggtgccagtggtccaggccccacaacaggaccagggcctggacaggaagtggaggaggtctctcagccaggagagcctaagggagggctggtggcgggtggggtggggtggggttggggcctccagcttctaatgttctaatgtgcaggggcttggcctgaccagtcctaccctggaacctttccaggccccatgtcctgctccgctgggcttgcctgttgggattctactggggtcatggaggtgggtggcccacagagcggagctcgggagacccccgcagtccctggagtagccacatgggagggaggcccggctggcaggagctcccagtccctccaatcctgtgggtcagagctggtgaggatgctcagagggcaagggaatgtccacagaagcacgtgggagatgggtcccatcccacccccacccctgtctctgagggcagggccacctgagggctgcagggcagcgcatgggtggccggcgtttattcagcaggctggcgggggcttccaagttttgcagggacctccagtactccggcagcctgcacccttcctttcccttcccttcccttctgtccaccctaagcctcctaggggacaggcaggctggacttcagaaaaggtgggctctgccctcctccggtcccccgaatgtcttgggaaagagtccaccaaacacacatgcacacacccgcgcacacgcacatacccaatgcatgcacacacgtacacacacacgcatacacgcatgtatacacgcgcacacacgcaggcattacacacacacacattacacacacacacccgcacggacgcgcacacacaaacgcgcgcacgcacgcacgcacgcacgggggaggtcagccccaagcagggctggggaggggtgcagggcgcggcgtgtctgtgggcacttggggcgtcgagacgccgccgggaggttttcgggcaagtctgcgagaagacggcgggccctgaactgggcgggtacccgcgctgttgcgcgtgggtcccgggagcggcctccggcgccctctggcgggcggaagccgcgcagcacctcttgggggcgggacgcgcggtggctaccgactcccggcccgccccggcccgcgtgcaggacccggtcgtcccctcctgctgtcctggagcccggactgaggccccgggggcgcggcagggctcccggtccacgcgagccatggcccgaccgcgcctcggctcagccctgccctccgcagccgctttcgggtggctccgcccgcggcccaatttccaggcgaccgtttcccggcgacggcgggcggggccgtctctgccgccccccgccgcgcgctccgcgggcgcctgcgacgccccgcctctggctcgggtgcgggagcggggcctgcccggactgcgacgccgccacagcttggggccagttcgcccagtcagggggatggctcggtcggcctcgggggtcgacgatcccccgggtaggcgacgtgccctgtccaggcctcacttcccgcgtccgcaaaacggggtggacaacgcagcctaaggcagagccgcgccaagg

SEQ ID NO: 27815 - DNA, 2300 bp, Homo sapien
tacgtgggcttcgccacactgcccaaccaggtgcaccgcaagtcggtgaagaaaggctttgacttcacactcatggtggctggtgagtgggccaggctcctcgggggagtggctggggtcactggccagccaagctctgtcgttggagccccagacctaacgcagctccttctctgtacctgtgtgcaggtgagtcaggcctggggaagtccacactggtccacagcctcttcctgacagacttgtacaaggaccggaagctgctcagtgctgagggtgagtggcccccaggaggccctggcactgatccccagtccccttccatgggacctctccaaggactccctttcaggtccagctcccactgttctgttctcgcggtgtgggtcccctgggggtagggccaaggcaccaagatggatgaggacgagggtcctggctgccaagggtgaggggctgagggttggagaggcccttccagtggccccttccccgtagagcgcatcagccagacggtagagattctaaaacacacggtggacattgaggagaagggagtcaagctgaagctcaccatcgtggacacgccgggattcggggacgctgtcaacaacaccgagtggtgagtgaggcctgctgagaaaggccttgcctaggcggccacagcactcgaggcctggcctcacctccctcctgcccacagctggaagcccatcaccgactatgtggaccagcagtttgagcagtacttccgtgatgagagcggcctcaaccgaaagaacatccaagacaaccgagtgcactgctgcctatacttcatctcccccttcgggcatgggtgtgtggctgtcctggggccaggctcgggagtgcagcccctacaatatggccccctggctgtgcctatgcccacccttggctgctctcggcaggctgcggccagtggatgtgggtttcatgaaggcattgcatgagaaggtcaacatcgtgcctctcatcgccaaagctgactgtcttgtccccagtgagatccggaagctgaaggagcgggtgagcctgccgtcgcacaggggcctggccagggccctggggctgagagtaccagggggacttgtctggcctcaaatctgatggtccttgccccaccacagatccgggaggagattgacaagtttgggatccatgtataccagttccctgagtgtgactcggacgaggatgaggacttcaagcagcaggaccgggaactgaaggtgaacatgcagactggtggggcaggggggatggagctggtgaggggcagaaccagagggctttgtctccttcacattgagcctgctggaggagggccaggtcagcccagttgggtgcaagagtcatttgttctaggagtagaggacctgtacccccttcatccagggctagaaggtaaaggtcaccatgtctttgcctggctggggtgggtcatgtgggccccgtgtggtgcttggcaggtatggagcacttgcccagatccagaggtgcagcagtgggccaggcccccaaccccaaccctcttcccatgggtcaccagaggaaggggctgccccagtggcacaccctggctcccagatttctgagctccagggttggtggctttgggtgccccggcagctagagtgatgatggagaccatgccaggggcaggtggccaccagggcaggggcatcagcatggggagacataggctcagccctggggagggaaggggcagctggagggggtggttcttgatgagggaggagatgaggagggagcatgcctggttgggcatagcctggaaaggccctggaatgtgagccacatgggctctggctccagccaggggcagagaggccagaaaggggcaacgccaggatctctttgaggagagatagttgatggtgatgctggaggggtgccccgggagttacatgcccgtttcccatcagtaaccgtgcaattacgctcaccgggtgtgagcctttctccctccttcccccaggagagcgcgcccttcgccgttataggcagcaacacggtggtggaggccaaggggcagcgggtccggggccgactgtacccctgggggatcgtggagggtgagtagagtcttggggtaccaggtctggtgggggaaggctgtcctgggccggcgccagcccactacccacccccaccccgcagtggagaaccaggcgcattgcgacttcgtgaagctgcgcaacatgctcatccgcacgcatatgcacgacctcaaggacgtgacgtgcgacgtgcac

SEQ ID NO: 27816 - DNA, 2300 bp, Homo sapien
caagcagcaggaccgggaactgaaggtgaacatgcagactggtggggcaggggggatggagctggtgaggggcagaaccagagggctttgtctccttcacattgagcctgctggaggagggccaggtcagcccagttgggtgcaagagtcatttgttctaggagtagaggacctgtacccccttcatccagggctagaaggtaaaggtcaccatgtctttgcctggctggggtgggtcatgtgggccccgtgtggtgcttggcaggtatggagcacttgcccagatccagaggtgcagcagtgggccaggcccccaaccccaaccctcttcccatgggtcaccagaggaaggggctgccccagtggcacaccctggctcccagatttctgagctccagggttggtggctttgggtgccccggcagctagagtgatgatggagaccatgccaggggcaggtggccaccagggcaggggcatcagcatggggagacataggctcagccctggggagggaaggggcagctggagggggtggttcttgatgagggaggagatgaggagggagcatgcctggttgggcatagcctggaaaggccctggaatgtgagccacatgggctctggctccagccaggggcagagaggccagaaaggggcaacgccaggatctctttgaggagagatagttgatggtgatgctggaggggtgccccgggagttacatgcccgtttcccatcagtaaccgtgcaattacgctcaccgggtgtgagcctttctccctccttcccccaggagagcgcgcccttcgccgttataggcagcaacacggtggtggaggccaaggggcagcgggtccggggccgactgtacccctgggggatcgtggagggtgagtagagtcttggggtaccaggtctggtgggggaaggctgtcctgggccggcgccagcccactacccacccccaccccgcagtggagaaccaggcgcattgcgacttcgtgaagctgcgcaacatgctcatccgcacgcatatgcacgacctcaaggacgtgacgtgcgacgtgcactacgagaactaccgcgcgcactgcatccagcagatgaccaggtgcgcgccccagccgcgagccagacctcgcccctctggccccgcccacgtctccataactgagggccggtcctgtcagcccacccagacttgaactttgcaccattccctaagccccccccctcccccagagcctggtctccctagaaccaagtccagggctgtgagggctccggagggcagggcctcagcagtggcggggatgggccaggcatcgccagcccacgctgagcctcccggtggcgccgccccgcccatcctcccccccgccccgcgcagcaaactgacccaggacagccgcatggagagccccatcccgatcctgccgctgcccaccccggacgccgagactgagaagcttatcaggatgaaggatgaggaagtatgtggggcggcgggggcggcggaggcgggcgtcagggatgctcctccgcggtgctgctcacccgccgggttgtctccgcccgcagctgaggcgcatgcaggagatgctgcagaggatgaagcagcagatgcaggaccagtgacgctcgccgcggacacaccgtccgtctccgggacgccctcgcacccctggacaccagaccggactgttcccgacccggagacgcggggccacagcccccagctgaccctaatttattctcagcaccaccccctcccaggtcattgtgtctgtttccgaggggcctggaccgtagcccccgcccagctggccctctctgaccttgggggatcaggagcgaagttgggcgggacttcagagatccgcctcccttgcccttcccccgcccccggacggtcacagcacccaaaccgcaggccctgctctggcaggcaggcaaagctaggcagaagaggattcccaggatcctgggtctgttccctgccccagtgctgcagaacggacttgggagccctcctttgcctgctcccgcgggtcacccagcgagtgctgagaccccattttctgtcgaggcgggccgagtcttcccttatccccagacgcctagcgggcagggttgggctgaatcaaatgggagccctccagacataaggaggccagaggctgcaaggagcggggtcgtgaccgcttacaccccttctccacagcccggcccgacctggagggcccccggggcactgggcggtgagccacctcctggcaactctcggtgccgtcccct

SEQ ID NO: 27817 - DNA, 2300 bp, Homo sapien
cctggaatgtgagccacatgggctctggctccagccaggggcagagaggccagaaaggggcaacgccaggatctctttgaggagagatagttgatggtgatgctggaggggtgccccgggagttacatgcccgtttcccatcagtaaccgtgcaattacgctcaccgggtgtgagcctttctccctccttcccccaggagagcgcgcccttcgccgttataggcagcaacacggtggtggaggccaaggggcagcgggtccggggccgactgtacccctgggggatcgtggagggtgagtagagtcttggggtaccaggtctggtgggggaaggctgtcctgggccggcgccagcccactacccacccccaccccgcagtggagaaccaggcgcattgcgacttcgtgaagctgcgcaacatgctcatccgcacgcatatgcacgacctcaaggacgtgacgtgcgacgtgcactacgagaactaccgcgcgcactgcatccagcagatgaccaggtgcgcgccccagccgcgagccagacctcgcccctctggccccgcccacgtctccataactgagggccggtcctgtcagcccacccagacttgaactttgcaccattccctaagccccccccctcccccagagcctggtctccctagaaccaagtccagggctgtgagggctccggagggcagggcctcagcagtggcggggatgggccaggcatcgccagcccacgctgagcctcccggtggcgccgccccgcccatcctcccccccgccccgcgcagcaaactgacccaggacagccgcatggagagccccatcccgatcctgccgctgcccaccccggacgccgagactgagaagcttatcaggatgaaggatgaggaagtatgtggggcggcgggggcggcggaggcgggcgtcagggatgctcctccgcggtgctgctcacccgccgggttgtctccgcccgcagctgaggcgcatgcaggagatgctgcagaggatgaagcagcagatgcaggaccagtgacgctcgccgcggacacaccgtccgtctccgggacgccctcgcacccctggacaccagaccggactgttcccgacccggagacgcggggccacagcccccagctgaccctaatttattctcagcaccaccccctcccaggtcattgtgtctgtttccgaggggcctggaccgtagcccccgcccagctggccctctctgaccttgggggatcaggagcgaagttgggcgggacttcagagatccgcctcccttgcccttcccccgcccccggacggtcacagcacccaaaccgcaggccctgctctggcaggcaggcaaagctaggcagaagaggattcccaggatcctgggtctgttccctgccccagtgctgcagaacggacttgggagccctcctttgcctgctcccgcgggtcacccagcgagtgctgagaccccattttctgtcgaggcgggccgagtcttcccttatccccagacgcctagcgggcagggttgggctgaatcaaatgggagccctccagacataaggaggccagaggctgcaaggagcggggtcgtgaccgcttacaccccttctccacagcccggcccgacctggagggcccccggggcactgggcggtgagccacctcctggcaactctcggtgccgtcccctgccctcgctcgaggcctcttctccccagcaccgctgtggtgtgccgggatcctgagcctaggcctcccgatgttcccacccgcatgatcccttcccgccacacgatgctccgttttcttccgttgtgaatgccgcgtcctgtcctggtgacaggagaacaatgttggtgaacgtcgcagcgggtgtccgagtgctccgtgtgcccctgagagcgggtgggagcggaagcctgagcggcctgcggcctccggcgatagtgtgctatctgccgctgcagcgcgcgtccgcgcggcctctgggctatttctggccaggccgcagcactgtggtcggtgcgggcgtggcaggggcggggcggccttatcgctcggctctcccgcctacgcctcccgctgcagagtaagccgggctgccgtcttctcgccatgggctccggtgagtctggagtccggtcgggcccccggctgctccctaggccgacccgggttgagaggagctctggtcgtttggctgcagctgggagagacttgggtcagacttagaggggacttccagccggcgtgcggggtggtcagggtggagaggctggcgggctacc

SEQ ID NO: 27818 - DNA, 2300 bp, Homo sapien
tgggccccttcctgggaacgtggctgtgggcctggagctcctgggcagggttcctgcctgctgtctgacacaccccccagagcttggaaccagccagagtacccacgaccccagcagtttgagtaaaggcccaacaccaaggagaacacgtgggggtgggcttggtgaggacttccgtgtcaggaggcgggcgccagggaggagagaggtccagggagggcaaggtcaaggagcagtgggaccacctgagccacaggttggggaggactcccattgagaccccaggctgggtaacaggaacggcctccttcttcatcgcaggcagtgtttgcggtggcacaggagatccggcggtggacccaaatgcgccctgccctggcaggcagggaagtagaccgcttctgtctccagccctccctggaggcggacctggcccctgttctggctctggcttgggtccctccactccaggagtccccagcccccagttctaactcagcacccgccccagaggctgcaaacccactgcctatgcacagagggagacagcactcccgtcaacgcctccgcatgcaggacctaatgtccgacccggctttgatgcagatcccagctcgctcccgtgccggctcccgctcccgctcctcccccgccacccccgcccgcggttcttctctcggcttggcggctggggtccgacgaaggggcagaggccacaactcagcggccccgcgggcagccccggcacgcggccccacccgcccgcctcccaggctcggggtctcggctcgtccacggccacgagggtcgcccggaatgtcgcgttcgccggtgctgtgggccaagcactttcgtgggatggagggacgattggggagcgcccgaggctgctgtgttggcgcccgcccccgagggctgggagtcaagaggtgggagtggagaggggaggagagggcagagctcctgggcgcgcggtcctgtccgggttcaggcgaggtttgggcccccagccgcccgcccttctctggggcccggggctgagctgctgatggcgggagggaggacggtgagggcagctcctggcggcgggccttccccgagaccccgaggccgcgtccaaatagggcgctgtaagcaactccaggcggtccatcctaaaacgaattagcagggtcaagtaaagcccggctcctcagtgcttccctttgcacggtgcgcggcggagcccgattctgctctctccatactctgaggcctagaggaggagtcccccgtgcacctcgaacctccggccggtcccttctgtgtgtatatttgccccaagtagcctgggaccaatgctgggggcgcaacttgcctgggaaacacagcccagcccaaagatcctggtatactgtctgcccaccagggacgcacgggaggtaaaggagggtgcgcggcaacccagcggtgctcagaattctgagcagtggggaggtgctgtgcctttatggataggaggggaagggggtcctgctgggtgggcgtgagggtgcctgtctgaaggctcccctgagggagccacgtgtgtgcaggggaggcggaactgggcagacagatgggcggccacaattctccagcggcagcctacctgcgctagggaaaaaaacttctggaattagggtttgcttcacccacaactacgaagactggggtggggggcgagtctcagcacactggactcccttggggcagggctgaggtgcagcccagacagcaaaggccgccgcgggtcctcggtcgcatccctcccttcagcctcctgcactcagccaagcctctgctccccaccccttacctacccgagtggaagccaagcttcggttttccggcctgtaaaatggtatcatagctcccatctcgccccctgcgctgggagaaatgggcgtcttgtcttcgctgcgcattgcatgcggaggagcagatgtctcagcccaggccctagccttgcatcgagccctgaggaatcagaccctgcgacccctagccgcgcctcaccttcctgatccacgcaagggagctcccagtcaggcctcctatcgcgcgggtgtggaggtgcggccggcagggggagcgaggaggaagggaaccgcggccgggccaggtgagggagggaggaacacttgccgcgggccgtgctgaggcgctgcgttcgcgtgcggaacccgcgtgtgccgggctagggccatccgacgggcgcgctccctccgggctgcgggagggcacgacgggtggggtggcggcaggtgaagaggagtgtg

SEQ ID NO: 27819 - DNA, 2300 bp, Homo sapien
gtgggtgtgagtggtgagtgaatgtgaaggcctaagacattattgtacactactttagactttataaacactgtacacttaggctgcaacacacttatattaaacattttcctttttttttgagatggagtctcactctattgcccaggctggagtgcagtagcacaatctcagctcactgcaacctccgcctcctgggttcaagcgattctcctgcctcagcctcccaagtagctgggattacaggcacataccaccacgcccggctaattttttgtatttttggtagagacagggtttcaccatgttgaccaggctggtctcaaactcctgacctcaaatgagctgcccgccttgggctcccaaaatgctgggattacaagcatgagcctccacagcgcctggcctaaaaattttctttcttcaataataaaataactatagcttactggatgaccagttacatatgtggtccctagttgaccaaaacgttgttatgcggtgcatgacagttatacacaggagagggcctgaaagaaaaaaaaaatttggaccaaaaaaggccttttctggctcagttggattcatttcttccacaggcccactgcccactctgctgatgggcgctgagctgtagactgagctgccttgaggctgaggtaagctgaatttgtgggaacccccacctttcccttgagggaggaagtttaaattatcaggtcaattaggaaagatacaaccgaaaaaaatccaaatttcattcccacttcaaggaggcgtttcctggctcggtgccacttttattatttttggcccaggctgctgaaagccccacagacccagggaaggtacaatgtgacctttgattcgcgtttcagggatcaaagtgagtgagtttgggtgtaaatgcagataacatttcagagagctttcatgaaaggagtcactggaccagggcagaaagggagctggtgtgttacgtgtgtgttccccttgagaagcgtcactttccggtgaatccggctgcctgcccgtggccccaaggactcctggcttgcatccaggtccttggcccacaggcatcagatcctgagctggggcgcctgcaccctctcccacctcttctctaggcaccgtgaagccgaggagaggtggcgtgggacggcttgtgcaagtgagaagagcaccaccacttcatcctcacctatcttgtcccaggatctgggtgctgactcggcaggcttgggctgggcacggccctgtggggagggcttggtagcctgccctcgctgtcgtctccgggtccagcctcggcctgagtcgggaagcacacaattatatccacaacaaggaggcccagaggccctgcctgcagcccccaggtatgcaggtagagggtcctctcggactgcctgccccctgcctctggcgcccagcctgcagctacgtcgaaccgggccctaacaaggttccccgcactggcaatgagtgatgagaggcactccgcgggcacgccgttccagggcgctcacgaggcccagcagccccgctatgcccacatccaccccgacacctgcagccccccaggcttagcccggccccgcagcagccctctcgacgcccagcagcaccccagtgtctggctgacgccagggcagtaacggcgggctgaagcagcatcggcccctcggtctacgccacagccgggtgcagatttcccggatctgagggaccgccgggcaccgtccgctggggatcatgaggggcagctttggcccgaccgtctcgcgcctgtacacgcggccccacctgatcccgtggcacttggcgcggcgtgggaatgggcgcgctctcccatcacccaccgcgcggcactgccgcgccagcagggaccgggagagcctgcgaggtagcggccacacggcatacagcgcaggcgcggcctggatgggaggagcgcgtggagcgtgccgggagcatgcgccgggtcgtacacggcggccgcgcgcacgctgggggcgtggctgcgcgatgtaatcggtctctggacgctgcgcggcgctcctaggagcaggcgttcccgactccggcaagagggtcagtgtggaggcgggagcccgggcggccggcttgaactccgtgcacgcgggcctggagctgcgcccctgcgtcttttcccgacttctgatccgcagaggggcactcggagccccagcctgggtcgcagtgccttcggtctgcgggcctcagtttctcggtccgcgccgggggtttgtgggggcacctggagacatttgggc

SEQ ID NO: 27820 - DNA, 2300 bp, Homo sapien
tgacacagtggtattagtgcacctaatcatagcaaaggtacagtaaaagtacagtgcaaaaaataaaaaatagaactggttagggcacttgccatgaacagaggtgcaggactggaagttgctgtgggtgtgagtggtgagtgaatgtgaaggcctaagacattattgtacactactttagactttataaacactgtacacttaggctgcaacacacttatattaaacattttcctttttttttgagatggagtctcactctattgcccaggctggagtgcagtagcacaatctcagctcactgcaacctccgcctcctgggttcaagcgattctcctgcctcagcctcccaagtagctgggattacaggcacataccaccacgcccggctaattttttgtatttttggtagagacagggtttcaccatgttgaccaggctggtctcaaactcctgacctcaaatgagctgcccgccttgggctcccaaaatgctgggattacaagcatgagcctccacagcgcctggcctaaaaattttctttcttcaataataaaataactatagcttactggatgaccagttacatatgtggtccctagttgaccaaaacgttgttatgcggtgcatgacagttatacacaggagagggcctgaaagaaaaaaaaaatttggaccaaaaaaggccttttctggctcagttggattcatttcttccacaggcccactgcccactctgctgatgggcgctgagctgtagactgagctgccttgaggctgaggtaagctgaatttgtgggaacccccacctttcccttgagggaggaagtttaaattatcaggtcaattaggaaagatacaaccgaaaaaaatccaaatttcattcccacttcaaggaggcgtttcctggctcggtgccacttttattatttttggcccaggctgctgaaagccccacagacccagggaaggtacaatgtgacctttgattcgcgtttcagggatcaaagtgagtgagtttgggtgtaaatgcagataacatttcagagagctttcatgaaaggagtcactggaccagggcagaaagggagctggtgtgttacgtgtgtgttccccttgagaagcgtcactttccggtgaatccggctgcctgcccgtggccccaaggactcctggcttgcatccaggtccttggcccacaggcatcagatcctgagctggggcgcctgcaccctctcccacctcttctctaggcaccgtgaagccgaggagaggtggcgtgggacggcttgtgcaagtgagaagagcaccaccacttcatcctcacctatcttgtcccaggatctgggtgctgactcggcaggcttgggctgggcacggccctgtggggagggcttggtagcctgccctcgctgtcgtctccgggtccagcctcggcctgagtcgggaagcacacaattatatccacaacaaggaggcccagaggccctgcctgcagcccccaggtatgcaggtagagggtcctctcggactgcctgccccctgcctctggcgcccagcctgcagctacgtcgaaccgggccctaacaaggttccccgcactggcaatgagtgatgagaggcactccgcgggcacgccgttccagggcgctcacgaggcccagcagccccgctatgcccacatccaccccgacacctgcagccccccaggcttagcccggccccgcagcagccctctcgacgcccagcagcaccccagtgtctggctgacgccagggcagtaacggcgggctgaagcagcatcggcccctcggtctacgccacagccgggtgcagatttcccggatctgagggaccgccgggcaccgtccgctggggatcatgaggggcagctttggcccgaccgtctcgcgcctgtacacgcggccccacctgatcccgtggcacttggcgcggcgtgggaatgggcgcgctctcccatcacccaccgcgcggcactgccgcgccagcagggaccgggagagcctgcgaggtagcggccacacggcatacagcgcaggcgcggcctggatgggaggagcgcgtggagcgtgccgggagcatgcgccgggtcgtacacggcggccgcgcgcacgctgggggcgtggctgcgcgatgtaatcggtctctggacgctgcgcggcgctcctaggagcaggcgttcccgactccggcaagagggtcagtgtggaggcgggagcccgggcggccggcttgaactccgtgcacgcgggcctggagctgcgcccctgcgtcttttc

SEQ ID NO: 27821 - DNA, 2300 bp, Homo sapien
accagaagtctgaatttggagaaggctggggtagatactagccccgacactcagaagatcctggtggactcccgggaagccacctctgtgccccacatctacgccattggtgacgtggtggaggtacggcatgcgtcccgggaccagggcccctgcccctgcctgctccaccacccctgctcgctgggctccggctgctgccgtcctgtaggagagaaacgacactttctctgatgacagaggctctgggccaaaccccagggccagcctgtctggagttctggggcaacctggacatgggcctcggctctctgcctttcctttcctttctgtggtgggagtgtggatggtctaaagacagctgcaagcaccagcagcagacgcctgctgggaatggggcatgggtcagctctgcacgcaggcctcaacccctggcaggtaggctagaggcataggcttagaaatgccaccatggccttggggccgtcctgtccccacagggttgagaggcaggtctagttcgggcccacctggccccgccctccccgcctcagtatcctctggcttgcctctctgggcatcacaccggggcaggtcctttgctctcagctgctgctgctgctgtgaagtggagaccggtgccagtctttcctgggtgggggctctggagccctccttacacatggccccagtaagggactgtggtggtcagtcttgggatactgcaccctggcagcctcaggagtgctcggcctgtcctgcatgtgtccagcacctgctgctgaaagtggctctggagggtcgctgagagcttctttgtagcgagacctgtcagtgtctgcgtcctggggctgtggtaccaaatcaccacacacgggtggcccagaacaacagacatggattatctcacgtttggggggcagtagtctgaaatgaaagtgtcagctggggctgggtgcagtgtctcatgcttgtaatcccagcactttgggactccgaggcaggcagattacttgaggtcaggagttcaagaccagcctagccaacatggtgaaaccgtctctactaaaaaaatacaaaaattagccaggcgtggtggcacgtatctgtaatcccagctacccgggaggctgaggcaggagaatcatttgaactcgggaggaggaaggcggaggttaccgtgagccaagattgtgccactgcactccagcctgggtgacagagcgagactccatgtcagaaagtgtcagctgggccaggctccctcggaagcctctggggtaggatgccccaggcgtccctcgggttgtggctatatcactcctctctctgcctcatcgtcatgtgacagtctcctgggtgtgtctctgggccctgatttgcctcttacagtttctctgcaattggacttagggtccaccctaatccaggatgacttcatttccatccttaccttaattgtatctgcaaagatcttatttccaaataaggtcacactctgaggctccaggcagaccctgcagggtcctgtagggcccatctagccgacccgattgtgtggacagagcatgtggctccatgtgcctcagccaccctgcagccccagcttgcttagctggatggttcagctgctcagtgatttctgcaagcgcagcctctgcctgtggaccatgtaggtgcagtggtctctggttgcagggtctgttgaatcctgtgggcgctgcaccctgagacagtgccatgtgcatctctgtgcacagcgggaagcctcccttctgtctgggaatctgagttttccctctgcaagtgtgtagctcccaggctcctgtgttggaaactggaacatttcaaaccgttttgccagaaatgcatggcgcacacaaaggcattctttatttaaacattaaatccactctgtcagaaaggtcgttctgaatagtccaaagagttaacacccaaccagtggtcccttgagcggctgggaagagcctgtgggcggggcgggggctattgtttaatgagatgttgtgtgctgtgcgccgcccgccgggatgtttccgtagttagtcaggcctgctggaatgcgcaggctgcgctctgagtttatctccacggatctctatgcatttctggaatgccaaacaacatctgcatttcctgctgccatggtgattggcagcccatcccagaggacggtgctggaacccccaaggctgggcacaccctgggacggagggatctccagcacagcgacattctgatttggaatttgttatggactgtgacgtgcagatcaagct

SEQ ID NO: 27822 - DNA, 2300 bp, Homo sapien
ataggagggaaatggtcgggagctgaccaggcacaactgctttatcctggcataggagggaaatggtggggagctgactgggcacagccacctgcatcctgctgctcacagcattcgggccccagtgggtccccaccttggcacaagtcgtccaacctcctgcagggctccaggcctgagccagtagggcctaggacgcctgattggctgtccagcaccagcagggagatctggcccttctctggccactgcccagtcctttgctcagcaagacccatagtggggctcagggcctggtgtcctgccatcagggctggccacggctagggacgtggccccacccaagtggagctggcctcttccctgcacccactcccagccacgtcccaccagcccagcttctaaccccactgtgccctcggctgccctcctcagggctgagcctgctgcctgccacaggccactcactcttcttttgctgttcattcccgaagggctgtggagtccctgcagggccaggcgtgtctgtgccgcgcagcccactctcccctggccatccagcctgtccagctgtcatgcctttcacattagtggctccattacattcccaccgacttcccagagtgatccacagagcatgtgcggaagagtcctggctttggatgggccacctatttccatgcctcttttatctcttgtgactacttttaaatttatctttatttccttcgggacctggggacagggtttggtcagcacctgcaaggtctgtagttgccatagtgccatagttaccatgaggaacatgatgagtgctcttggcttcccaggaccagccaggcaagcgtgcagaggagagtgtgggtgcagcgtcagatgttctgttccggcacggagcaggcaccaggaagtgctgggcctggtgggctggacaccaggttggagagggaccagacggctgagcgtgagcccccggcctgcagggaccacagcccctccttcgtgccccagccctgcccatggggcccagctccttcctctgatgtgggctggcatcccctgtgtctgggctgatccccgaccggtgccagccctcccggcacccaattcctgcggctgagcagagcacagaggctggagccggcctcccgcaagctggcttagccaagttggtatgttttgactcctgccccgggacagcagctggagacttaagggttccctctcacgggagcttcagcttccagatgcttaggtgggcgccacccgcataccggccagcagctggtttgtcccagccacgatgagcaggggagctatgcttttgaggcaaaattgccttcgccattggtggatcatcctgagcccctgggagccgagagcacctggggttgggagggaaaagctgctgtggccatccgctggcctggcaaaatcacacccatctgagttaggggagaaagggacctctgctggctgttcggctatgaagaggcccatgcggtgccctctctccgggccccaggctgtgtggagactggcagggggcagctgtgctgaccccctggactggccatcccctgcccctcttggcctttgcacccaagagcaggatcagctgagccagctgccccctagaatgggcacggtgtagtttggacactgccccttagctcagctccccttggccctgaggtctctaggctgggactgtgtgccaggcagccacgaggggctgcagcacagagcaggtgggagacccggctgctagctctgctcacctggccctctactagcgggttacgggggcttgctttctcctaatggggagagaccttcaagccctacctgggcagagggccagatcccaggacttgagcattgttggggtacagtccagggtgtggctggctcctcttcagcttgtccagatagggaggaggccattgggagccagcaggtgtcccttgaaggaggcccctctggactcttgaggcctgggagctgatggatctcactgcctaatggtatcaggctgtggtgctgcagacagatgcagggaggccaggcaggccaggtgccaacagctccccatgaagggctggtttctccggatgaagtcagtaccagagccactggcactgtgctggtggccctgcagcagggcctgaggcctgggcatgcggaagattctggagtcccgcgcttagcactctttgatgtcagggagccccagcattggcaagtgcctcttcctttcccgcgtgccaggaaccagtctaaggccgactccagtttcc

SEQ ID NO: 27823 - DNA, 2300 bp, Homo sapien
tgtcagttcccgcaggtgcgcacacatctcacgtgcactcagaggctggctgccaggtgaaagagtgggtgggtttggttgtggggcaggctcgctgcaggccatggcctgagtgcctggatgcagcttcccaagctttctcagctgtgagccagggctcctctaggctccagctcttgtatcctttaggagtgcatgttctagacctgtctgtggggcatctgcagggccagggtgtggagagacatgacactccaagtacactctctgcagccttgcctgcctaggaaggtggaggtggctgcaaagataagtgcagccttctcatggcagacgctaggctctgatggaggtgttgggcaggttgcccagccttgtatgacagaccctgctctgatcatggaacctcttggccttgtctgaagcagcgaccggctccagatgctctgggagggtggtgcttctcatctgggcaggctcgtgtctgcagaggggctgagggcactacttgttttataccctagagtcttgtcatcagtccccaccctgccctcaccccagcagactgatgacttgctattatttcttccttccttcagcagggagttggctggtgcctggtgctgggtgtcccggacctcaggcccagttcagtgtacttcccctctctacttcctccctccagtcccttctccatccctcccttttttggctgccccttgcctgccttcctcgccagtagcttgcagagtagacacgatgacaccttttgcaggctaaaaaggctgagagtggcactatgtgcagtgagccaccatggaggaccaaggtgaggcgacaccacaaccagcccaaaaggaattccagggatgaaacctgagcccaggcagctctccctgtgcccagggtggcttccctcctagctgactgcagctgggcacaccaagaccctggctgtgtgcactggccagctgtgagggacaggggctgcttgtgcttttattcttttttttttttttttttttgagacggagtctcactctgtctcccaggctggagtgcagtggcgtggtatccgctcactgcaagctccgcctcccgggttcacgccattctcctgcctcagcctcccgagtagctgggactacaggcgcccaccaccatgcccggctaatttttttgtatttttagtagagacggggtttcactgtgttagccaggatggtctcgatctcctaaccttgtgatccacccgccttggcctccaaaagtgctgggattacaggcgtgagctaccgcccctagcctgtgcttttattcttgctcacttgtgacggagggcagccttcacaactgaaaggcacgtggacttgagaatgttttagtccaccttggtggctcatgcttgtaattctagcaccttgggaggccaaggtggaaggattgcttgaggccaggtgtttgagaccagcctgggcaacatagccagaccccatctctacaaaacaaaaaaatttagctggacgtggtgatcggtgcttgtagtcccagctattctggaggctgaggctagaggatcacttgagcccaagaggtagaggctgcagtgagctgtgattgtgccactgtgcccctgtcgtgggggcccttccgggtctatgtcccagccctgtgctgaccgtgttccttctcacctttcatccctcccccaagcagggcagtggactacaatcttctgggtgacagagtgagatcctgtctcaaaaataaatagaataaaaaagaaaatatcttagttctgtgtctggctgagaacactgggtgaggtttgagttcagagtggttggtatggtgtgcgtgtgatttgcaaagatgatcacacacgcccacggccaacctcaccaccatatggcttggtctctggatttgcacagactatgtgtatcgagtcactctttctgctctgttgtgtggtgtcttgtcacccctgaccatcacagaatggagtgtccaatcctgataaaattgatcctgtaccacgtttaaccagacagacagtccgtcccacctctcatcccttctctcagcaggtcagcgggactatgatctcctggtggtcggcgggggatctggtggcctggcttgtgccaaggagggtatgtattctgtatacttcgtggcaaggcctcgaagcttttagggcccctagagagggtggtgctgtccagaaaacgtccatgagcaaaatgcgttgcctccctgctggggtcaccccagtggcctctgtgttgtggcttgtt

SEQ ID NO: 27824 - DNA, 2300 bp, Homo sapien
gaggcggagcttgcagtgagctgagattgtgccactgcaccccagcctgggcgacagagagagaatctgcctcaaaaaaaaaaaaaagaaaaaagtataaaagtattacttgggaattgataaatgttcatattgaaatgaaatcttcactatttatgttcctctgccacggctccagccagtccctccattcggggttcctgacttcctgcaacacaggtgtgagccactgtacccagactaggggtgcagtttttttttttttttttttctgagacagagtctcactctgttaaccaggctggagtgcagtggtgctatcatagctcactgcagccttgaactcctgggttcaactcaccctccagcctcagcctccctagtagctgggactgtgggccctgcagtttctccttttagagtaggaagacctgaactgtcccaggcttggagtgggtgggcgatgcagcccctgaacaggagccagaatgacaacacctgctgccaggaaagagctctagatagagcagccatacaggagggcccctgaggtggcaccctgaggtggccagcctgcctgtgggtgcacattttgggggacccttccacttgccctcactggtgcagtgctgcattctcttgggccttgctatgagctctgggctcctgctctttgctggcctgtaccaggcagtgggttcaaagaggagcagaaaattaatggacaatatgtcagaaggcagaggcaagacagacacttgctggggccaagccctgcaggtggagagggtatgcctggctaaagtgggtgaaaggcaaggttatgaggttctccaggacactggagtgcacaggtggtgtgtccccaggtaacgcctgccacccagcccttcctcccacagaacagcatctgccctacccacctttgaggtactttggggtccttccttcccagcaggctacccaagcccttccaagtgcttaaaggcagatttcctatgcttgcaaacgactgccctatgccagtgtttatcagcccgagagggctcctgggtgtgcacagggggcgagcaagctgcccaagataagcacatccatacagacagctgctcaccctgcctgatagcagacagagggggcacagtgcgaggctgcagggcaggatgacctaacaagggccctgctatggcaacaagaaggacaggcacctgccatggaaggtagggacgttctgagcaaagcttccggctaccaggcagctggaggagagagatgcttctccatcagcaggttcatgctccccgggggacctggtggcattttctccctgaccagcagtccttggttctctagacttatattaaagccattagaataatttacaacaatttaggcctttccagagcccttgagttgaattaggaattgagtgtgctttggactggctgttggaaccgagttgtggctctgtcagttcccgcaggtgcgcacacatctcacgtgcactcagaggctggctgccaggtgaaagagtgggtgggtttggttgtggggcaggctcgctgcaggccatggcctgagtgcctggatgcagcttcccaagctttctcagctgtgagccagggctcctctaggctccagctcttgtatcctttaggagtgcatgttctagacctgtctgtggggcatctgcagggccagggtgtggagagacatgacactccaagtacactctctgcagccttgcctgcctaggaaggtggaggtggctgcaaagataagtgcagccttctcatggcagacgctaggctctgatggaggtgttgggcaggttgcccagccttgtatgacagaccctgctctgatcatggaacctcttggccttgtctgaagcagcgaccggctccagatgctctgggagggtggtgcttctcatctgggcaggctcgtgtctgcagaggggctgagggcactacttgttttataccctagagtcttgtcatcagtccccaccctgccctcaccccagcagactgatgacttgctattatttcttccttccttcagcagggagttggctggtgcctggtgctgggtgtcccggacctcaggcccagttcagtgtacttcccctctctacttcctccctccagtcccttctccatccctcccttttttggctgccccttgcctgccttcctcgccagtagcttgcagagtagacacgatgacaccttttgcaggctaaaaaggctgagagtggcactatgtgcagtgagccaccatggaggaccaaggtg

SEQ ID NO: 27825 - DNA, 2300 bp, Homo sapien
tgcccacctgagccgcaaaaccagcaagtttttattaaggattttaaaaggggaggggttgtgccaatagggagtaggtcacaaagatcacatgcttcaaagggcaaaaggcagagcaaagatcacatgcttctgaggaaacaggacaagggcaaaatcagaactcctgataagggtctatgttcagctgtgcacatattgtcttgataaacatcttaaacaacggaaaacatggtttaagagcagagaaccagtctgaccacaaatttaccaggacggagttttttccccaccctaataagcctgagggtactgcaggagaccagggcgtatttcagtccttatctcaaccgcataagacagacactcccagagtggccgtttacagacctccccccaggaatgcattccttttccagggtcttaatagtaatattccttgctaggaaaagaatttagcgatatctctcctacttgcacgtccatttataagctctctgcaagaagaaaaatatggctctttttgcctgaccccacaggcagtcagaccttatggttgtcttcgttccctaaaaatcactgttattctgttctttttcaaggtgcgctgatttcatattgttcaaacacacgttttacaatcaatttctacagttaacacaattatcacagtggtcctgaggtgatgtatattatcagcttatgaagataacaggattaagagataaagacaggcataagaaattataaaagtattacttgggggcccaggcgcggtggctcatgcctgtaatcctagcactttgagaggccgaggcagccatatcacaaggtgaggagatcaagaccatcctggctaacatggtgaaaccctgtctctcctgaaagtacaaaaaattagccaggtgtggtggcgggtgcctgtagtcccagctactcaggaggctgagacaggagaatggtgtgaacccaggaggcggagcttgcagtgagctgagattgtgccactgcaccccagcctgggcgacagagagagaatctgcctcaaaaaaaaaaaaaagaaaaaagtataaaagtattacttgggaattgataaatgttcatattgaaatgaaatcttcactatttatgttcctctgccacggctccagccagtccctccattcggggttcctgacttcctgcaacacaggtgtgagccactgtacccagactaggggtgcagtttttttttttttttttttctgagacagagtctcactctgttaaccaggctggagtgcagtggtgctatcatagctcactgcagccttgaactcctgggttcaactcaccctccagcctcagcctccctagtagctgggactgtgggccctgcagtttctccttttagagtaggaagacctgaactgtcccaggcttggagtgggtgggcgatgcagcccctgaacaggagccagaatgacaacacctgctgccaggaaagagctctagatagagcagccatacaggagggcccctgaggtggcaccctgaggtggccagcctgcctgtgggtgcacattttgggggacccttccacttgccctcactggtgcagtgctgcattctcttgggccttgctatgagctctgggctcctgctctttgctggcctgtaccaggcagtgggttcaaagaggagcagaaaattaatggacaatatgtcagaaggcagaggcaagacagacacttgctggggccaagccctgcaggtggagagggtatgcctggctaaagtgggtgaaaggcaaggttatgaggttctccaggacactggagtgcacaggtggtgtgtccccaggtaacgcctgccacccagcccttcctcccacagaacagcatctgccctacccacctttgaggtactttggggtccttccttcccagcaggctacccaagcccttccaagtgcttaaaggcagatttcctatgcttgcaaacgactgccctatgccagtgtttatcagcccgagagggctcctgggtgtgcacagggggcgagcaagctgcccaagataagcacatccatacagacagctgctcaccctgcctgatagcagacagagggggcacagtgcgaggctgcagggcaggatgacctaacaagggccctgctatggcaacaagaaggacaggcacctgccatggaaggtagggacgttctgagcaaagcttccggctaccaggcagctggaggagagagatgcttctccatcagcaggttcatgctccccgggggacctggtggcattttctcc

SEQ ID NO: 27826 - DNA, 2300 bp, Homo sapien
tgtttttttggggttttttttttttttttttttttgagacagtgtcttgctctgtcgcccaagctggagtacagtggtgcgatctcagctcactgcaagctccgcctcccgggttcacgccattctcctgcctcagcctcccgagtagctgggactacaggcatctgccaccacgcctggctaattttttttgtatttttagtagagacgggatttcactgtattagccaggatggtctcaatctcctgacctcatgatccacctgccttggcctcccaaagtgctgggattacaggcatgagccactgcgcccagccgagtcattttttaatactactgcatgtgagttaacacaatcattcccaaattgaagttttagatgggccctcaaaatttttaggatatggttttcctacaggtttatattgaaagtatggggtatctcctattactcctctttttatttgtcttaaaggagaaagggagaggccagagaccaaatgtccccatttccctatagctaatctctctggaagacaagcagcccagacttgagcttctagatggatacaaccaggtgcatgtccaaggcacagaggagggtatttataacccatagtaacattaaatgcagtgccttctcctggctgagcggtgcaacggtcatctgtagttccaggcatccacacactatcgttagtatagatttctgcaggagcatccatccaggtgagaggtcgaataagtggaggaaaaggcacataagcccaataagaataattttgtgtagcaggtaaatcagtttaaggggaaactggtgagacagaaagtgtaaggaagataattattaaataaaacctattgtaagtgagatccagtgctgaaggaggaagagaagaacagagggatgttattttcaggctaatagaaatggtgagatttttaggttcgtaaggagaaaaagataattaggagaagtgggattagttagaggggtttacattgccattagggaggattgaaccagacccattttgatttggcatgccagtttctgaggagtcggtacagatctcatcaggtatgagggcagtctctgacgcgaacgtctcttcctcgtggtttttattgtcagtattcacacgaagtttaagtctcctagtgggcacccagacgggattgacgatctcctggtaaaacacaagcataccctcttccccacgttataattgttccaggttcccaggtattggtttgggagtttttccatgacactggcttgccttcgtttagggagaattttttgcctgtataatggcatttagctgcagtcagagtattgtttttaggaacatttagaaagcttaaacaatgctaaatataattgggagtggggagtagttaaattatgcttttaaaccagccttgtcttcttttacagtaacttgaagaggtttagtaattttttcacgttttggaccgagaccgagtctggaaacaaaccccatgttttccattatatgttgactgggagcactgtaaaagttatgtggaatattaatttcagccccaatttgtgccagcaaatctctgccccgaagattaatggggatgggcatgatataaggctgaattgttcccttttgaccatcagggccagtgcaagccaagataaatgtgctctggtgaacttcttcagcttttctaacaccttctagtttcatgttagtgggatgtttaagccaggaggaaggccataaattagaggaaataatagaaacatcagccccagtatcaactaggccctcaaccttttttccttgaatgtgtatggtgcaggtaggccattgtttagaaattacattaatccaataagcggctttttcaccgctggagcccatcccagggccccatgtcttatctcctttgtttaaaacaatgttaggtagtaaaagtaattgagcaattgactcactggccggaatggaaacaggaactttggcagacaccataagtttacataagtttaatctcatcagaggaatcagaattaatgagactagtatgaactatgatacctttagtatcatgaggtggatgccctgcctaacaccaggcccaccgaaccttgaggtaaagggccagtgacccccatggggacaattaaaggcaaagaattaggtagtaaatttagaggaatggtactacagagatcgaccgccctgctgcctactgtggaggtagacaagcattgtactgagacagaagaagaggctgggacccatctggattggctgta

SEQ ID NO: 27827 - DNA, 2300 bp, Homo sapien
attgggcttatgtgccttttcctccacttattcgacctctcacctggatggatgctcctgcagaaatctatactaacgatagtgtgtggatgcctggaactacagatgaccgttgcaccgctcagccaggagaaggcactgcatttaatgttactatgggttataaataccctcctctgtgccttggacatgcacctggttgtatccatctagaagctcaagtctgggctgcttgtcttccagagagattagctatagggaaatggggacatttggtctctggcctctccctttctcctttaagacaaataaaaagaggagtaataggagataccccatactttcaatataaacctgtaggaaaaccatatcctaaaaattttgagggcccatctaaaacttcaatttgggaatgattgtgttaactcacatgcagtagtattaaaaaatgactcggctgggcgcagtggctcatgcctgtaatcccagcactttgggaggccaaggcaggtggatcatgaggtcaggagattgagaccatcctggctaatacagtgaaatcccgtctctactaaaaatacaaaaaaaattagccaggcgtggtggcagatgcctgtagtcccagctactcgggaggctgaggcaggagaatggcgtgaacccgggaggcggagcttgcagtgagctgagatcgcaccactgtactccagcttgggcgacagagcaagacactgtctcaaaaaaaaaaaaaaaaaaaaaaccccaaaaaaacaactcatatggtttagtaacagactgggcacgaaagggctatttaaaaaacagttgctcctctggcggaaaggaatgcctggagactacttattttatttcttactgggaggaccaggatcatcatcctattttgcatagaaggttcagtttgttctttcccttaaaataggaagataagggcattatccccctaagtctcgtatgatattccccattctgagtccagaatacctagaaatttggaatttggctattgccgtgtctggactgtgagtatgggaaggggaagcttttctgtctgttgtccccactaccgcccctcacatccgtgattctgaaccccatgataaatgccctttgaacctttttcctccttttgatgccgaatccccttttatgggactccgccagcacgggtgcatttaaccttcctgagcttgcccacctgacgcatgcagccaagaagctttgaaagatggagtgccctggctgagggttccaggtctcagcaaggccacgaggtggtgactgcctcccagaactctgttgggccaccctccgtcctggagacccccaaaacctccatagcaccaactctgcccattcacacacacagtcagccctccctcccgagtccaccgcgggcagagggccagccaccatgcctcccatagccgccatccctgggaaggagccctgaccccgtccttacacccctctacactcactgcctgtggggagagctgctcgctgtcacaagcatccagggggctgggtcgaggggccccctgcatggtgggggaccatgttgtcgtgcatggaatgaaactggccacacataacagatatggtggcgctctggtcggatctaggggagtctgtcctacaggatgaggcttgaactgtcctgagtgaccagacacccagcctctgcttcgagtgctcagttatgattattgtcctgatttagttaactgttcttcaggggctccaggaggacgagtgtgtatcctcccattgctctgtgcagcctctaacctctagagtctaggggtctggggagaagttgggaagtctggccagtggggccggtgcctggtgacctcgggaggtgggatatcatcatcttcagaactgtagttgttactgggataccagctctgggagaccacaggtgcagtcagcacagcaggaccttagacaaggcacccagccccagtttccccacctgggaagggggctacttgtggctagaagcagcccggactcctgagcaagactagaccaagaggccggtatgtggacacccccgcgtgggcacccccacggggacaccctggccaccgccgcgcggacaccctcacgaggacaccccggccgcgcggacacctaccgcggggacgccccgaccccatcctacctgctgcgccccgcgccgcgccccgcaccccgcccgccacggcctgcgtccgccaccggaagcgccctcctaatccccgcagcgccaccgccattgccgccatcgt

SEQ ID NO: 27828 - DNA, 2300 bp, Homo sapien
caaatccctattgggactcaggtggtcttgtagctgccctttgcccccaggatctgaaaaaaacagccctgcagactgaagccggaaaacttgatataaacttgaaagaactcagaaccacaacagattctccaggggcagcctttgtgcctggagctgctgctacacaggccgcccaggaagaccccccctccagctcctgcatgccacatgctctctccagaaagtaaccacaactgggataccaatgcctatgccatcatcacagacttcacaccacacaccaggaagtccctgagtgcccctgctggccttgttagggcccaacggccagaaacctcaactgctgccctgtaggctcaaaaactgggtttatcaacagctccattcatctttgtttttatttctttctttctttttatttttttattttattattattttttttttttaaagataggggctctctgttgctcaggctggagtatagaggcaagatcatggctcatggcagcctccgcctcccaggctcaaacgatcttttcacctcagcctcccaagtagctggaactataggcccatgccaccacgccgggctaatttttaaattttttgtagagatggggtctttatgttgcccaggcttgtttcaaactcctggcctcaagtgatcctcctcggcctccaaaagtgctgggattacagacatgagccactgtgcctggcctgttatttttgtttcctcattaaatgcttgactgcttgcatcatccagcaaaaatcctttgctaccaagtctcaacagatggtcccgctggtagtttatgaacacaacacagaacagaaaatggacggggactgttgagaggaaagaagcaggtctctgctcttcttgcacagggggagtgctgacaaagaccctccctccccacactccagccaggctccttagagtccccttctccactgggcctcaccctggcctatctaggctggaacgaacactaacatagctcctaacagctcaaggccacattcccagaacgatcctagccccctctaaagtgcctgcctgagaagttcaaggctgccacaagaatttcctgtgtgttccagccaacacctgaggatggggcccctgtctcccagtctctgtgggaggttgggggcctgacttcggtaagccccagtggcaaacccagatcagttggtttcacaggggccaaccctcccttcccagttttggtgattttctgtttccctaactctactgagtccccaccccttcccactccctcactctccctttaaactccaggcacatctagacaaatcagcatggagccagctttttctcatgttgtcagtagttaccaagtaaaatctgttttttctgcattaactagtgtctcactgggctctgcagggcagctcctacggtccctcaggcttggagggtcactttaaacaataaaaagcaacaggacacaaaaatccctggctggaaaaatccaaaaagcaggtctgttagcagggcaggcccggagtgacttcccctttctctaacattcccacgtggtcctgcacaccacacatccccccgaccctggggagtcctgggccccttcctggtggagcagcctctctcttgcagggaaaggccctggggtaccccaaggcctccaacagggagcctgttggagaagtcaccaaggccctctgagtctggggctccacagaccctcccccaggcctcctgcaactctccagctctgagagtctgatcccagcccaaggaccaagtgggaccctcccctgtgactctaccacaccctcaccaggtcaagccctactccagggagaggcttatcctcctggtctggacccccaacccagtcttgaagcgggatctctcaccgctatctggagcccctcatcacagcacagatcttcaacctcagctttccacaaggagtctggggaccccaccccggtccaaagatccccacccaaggtccgaattccccagttcccatccagattccccaccccaagtccggagactcccacccaacgtcagatcacttcacagcggtccgaattccccacaccctatcccagtgttccaccctaggtctgaaggcccccgccccgaatccggccgcattcggccccggtctagccagcgctctcacctctcccgcgacggcccgcccgggactggacccgccccggtccggcgcaggcagcgcggcgggcagccctagctgccccagaagccccacgacgatggcggcaat

SEQ ID NO: 27829 - DNA, 2300 bp, Homo sapien
gacactgagctggcgtgcccactctcgagtcctgggaccccaaactaaaggagctgttccttttccccatggagggctgacggggcaaaatcccagggctgggaacatccgagcagctttgagtagcacaggtgggtttctacgtggctttctttaaagggaggcctgattctcggcttttcaggacccgccctccattttctcacttgcctgctctttcgtcctgcgaaactgggcagtggccggtgacagcgcagggtcagccctcggatggccaggtgggcgtgatcccaccctcctccgtggctgggtgggcgtggtcccaaagtcaattggatgtggtcccgcgtccctcccggcccagtgggcggggcctccccttctggggcctcccatcccacaccagcgagcagagaggagggtgggcggggaggccctacggggctggggcggggcggagcggaggtggttagctgtcgggaggtggggtgggcaggggccagggctctgttggtggcccggggcagccagtccctctgctcagggcttcagttcacactcacaagggaatcccagcgctcttctcctctggcggttgctggagggccttgtgaggtggccgtgggcactgtagcccccaggcactgcattgtggcctgggcgtgttggcctttgagcctttggccttgagcacttccccatcccccatggctcttggccgttggggcccagttggccgcagagcctttggccttgagcacttccccagcccccatggctcttggccattggaccccagttggccacagagccgcgggcaggtgggacaggcgggcactgggtgcctccttgcaccagccaggcccagcctgcagagtggagtgggccggtccctcctgccaggcaaaggaagggggcttcgggcccctccctgctgtggcctcctcccctctgctgcctcccactaggccctgggagacactgcctgcagatttatgaacagacagacctagagattagagattcaaaagccaaattcttacacaattcaagtattaacgcagatttggatttataatttgggactccaaggtctaccaagtaatttgctgtttcagaatagcccttttaatttggggtatatatttctaacactgttttttaaatatggagagtaaacaaaatggcccattatctgaccacacaaatactagtagtcattatagataaaccatagcagataaataatagtaaacaaagcaacaggctgtgtcataggaaatccccaccatgaagaaaggagcaaggtggaaagttctggctgcttcaggtctgcatggtccctctccaccatggttccccctgtcatcttcctgccagaataaggacactgtccttagggaagcaccatctcttgttttttccccacgagccctgtgggtcatggcacgtcctgccccgctgggaaacacagtgggccacgggtttccctgcaggcctgggacccttcccaagggtagcagcagaaggcagcacgattcccactcctgcagctgtggacaggggcacccccactgtcactgagccctgcaccgggttccatcacctgctcggggctctggcctttggccttttcctgtgagctgcatgttggccactgtgacctatctgtctcatcatctttttcttactggtttgtgtatgttcttggtaaactagcccttggtcttacacatcatttccaaggtactaaggactcttcaggggaaatacaacttgagcagagtggttccctcctcttgtggttcacaaggtgcaggtgcacacacacatagcccacagggcagtgtggacagggaccaggagactgcccctggggtccctggctgggggacactagtagggatgtcccttggcctctctgaggccttctgctgtctcttctgaggccggaaaggcgaagcactgccctcgccctgctagggaaggctcaggccaggctggccctatccggggaaggggctcaggtatctggaccttggtcatcgccaggttagggtttatgttgatgattatccaaaggcaaaattgatttccacagaaataacatctgctttgctgccgagctcagaggagaccccagacccctcccgcagccagagggctggagcctgctcagaggtgctttgaaggtgagttggccaacggaagccggggcagtgccagggtgggtacagattccggcccggtgcatgggcacaggtctgctgagcacatgtccactctgcctgtgtaaatag

SEQ ID NO: 27830 - DNA, 2300 bp, Homo sapien
accatggttccccctgtcatcttcctgccagaataaggacactgtccttagggaagcaccatctcttgttttttccccacgagccctgtgggtcatggcacgtcctgccccgctgggaaacacagtgggccacgggtttccctgcaggcctgggacccttcccaagggtagcagcagaaggcagcacgattcccactcctgcagctgtggacaggggcacccccactgtcactgagccctgcaccgggttccatcacctgctcggggctctggcctttggccttttcctgtgagctgcatgttggccactgtgacctatctgtctcatcatctttttcttactggtttgtgtatgttcttggtaaactagcccttggtcttacacatcatttccaaggtactaaggactcttcaggggaaatacaacttgagcagagtggttccctcctcttgtggttcacaaggtgcaggtgcacacacacatagcccacagggcagtgtggacagggaccaggagactgcccctggggtccctggctgggggacactagtagggatgtcccttggcctctctgaggccttctgctgtctcttctgaggccggaaaggcgaagcactgccctcgccctgctagggaaggctcaggccaggctggccctatccggggaaggggctcaggtatctggaccttggtcatcgccaggttagggtttatgttgatgattatccaaaggcaaaattgatttccacagaaataacatctgctttgctgccgagctcagaggagaccccagacccctcccgcagccagagggctggagcctgctcagaggtgctttgaaggtgagttggccaacggaagccggggcagtgccagggtgggtacagattccggcccggtgcatgggcacaggtctgctgagcacatgtccactctgcctgtgtaaataggccacatggcctgaaatcccctagaagcctggtgtccgcatgacctccccctagggcggagcctctgcttccctgttctcttctgctctgtcctctggtgccctgaggctggcctccaggggtgtcccctctgtggccctaggcctgcctccttgcctgggtgtgcctttctaaaatggagcgtccagcagagagtgggatctcctatgccactgggagcccagggccccatcccagaaagacctctgagtgagcacaggggccctagaagaagtttccttgtgtccttcccgttttagggtctgtgacctgaacccctgggcttctgcctcaggcctcctgtgctctgctctctgcctgctgggtcccctcaccaggcttctgtctggttcccaggctacctgcctggagggtcacaccaggaggatttcaaacaggtttcaagtggggtcacttgccatcactgtgccccacgaggtacactgttgtgggcggcagggctggcctttctcatctgggacatgccacgttgctgttcccaaggggagtggtgagtgggtctgtcctggtgtgcctggcctggggactgccagtgtccttacttggacactcaatgaaaaggccacatgaatccctggggcgtccagagcatgggtgaccagcacgggctcaccacatgaggccaaggggctgcaccatacagcctctcctttggccacccgtgactacccccaactccgggccatggggcttccctacccctgggtgtcctctaagccagctgggagacaacagcctgagtccgtgtctgcttctgtattttgtgtggttttagaggatccctgggctgcctggggaagcacccagggccagggagtgtgaccctgcaggctccacacaggactgccagaggcacacacctgctctgtctacccgagggcaccagagggcacgagaaggctggctccctggcgctgacacgtcaggcaactgaggcacaaggctggcatttctgaaccttgcccctctgcaaacacaagggggcgatggtggcactccaagcaaaggggcgtgtgggtgctgcaggaggagcacagagcactggcgcccctcccctcccgccctgcagatgccggaggccccgcctctgctgttggcagctgtgttgctgggcctggtgctgctggtggtgctgctgctgcttctgaggcactggggctggggcctgtgccttatcggctggaacgagttcatcctgcagcccatccacaacctgctcatgggtgacaccaaggagcagcgcatcctgaaccacgtgctgcagcatgcggagcccgggaacgcacaga

SEQ ID NO: 27831 - DNA, 2300 bp, Homo sapien
cgcagcctggccgctgatgacgagggtggccctgagctggagcctgactatggcacggccacaaggaggaggcctgagtgtgggcggggccttcataccaggtgagctgcaccccgtcccctgtggctacctcctctgggaagtctgccctccaccccccaactacagagtgccccacttgtcaagtggcgcagttgagttagtcatgcatgttagtttgaattggccttggctctcgtcagggacagaagaaaggtggaccctggggtggtaggagttcggctgggcactgtcctgcaggcccagggcccaggaaagctgggaagagtgccggccactggccttgctccagccacactctgggtaaccagaacccagagccctggcccttgtcacagcccctggttctgtccccattgccctcagtttctgcatctctggagtggggatgtgaccacagcccgggtcaggattttgttgtgtgaccctggccaagtcacctgaccgtcactcctagcctcagggcaggcggtttgatgacagcaacccacagggctactgagagctaaggagatcttgtgccccaaggggctggtggcctgaatactcctcaggtggtcctactgggatggcttcatgcggagagggccatttactccccctacatcctggcacagccagagatgggcctcatggaagatggggtggttttgtggaagggaggtgagacggtctctccagcagccatagcagatgtctcacagaaacttgttttgctcgggattgggaaactgcccggtgacagcagtgagtgagtttgctgtcctgggagggttgcctgggtcctggtagccgctggctggggtttggcatttggctctgaattggttctcactgggctggtgcatgactctctgtgtccccaccatgctccgggccaagatacaggtgctctcagcccagcgctgctgggtgagtttgcagtcctgaagaaggtgtgatggggcagctcagaggcagggctggcggctgctgtgacgatgtccacgcgccccacttgcctgtgcagggcctacgaggacacagcagatgatggcggcgagctggcggacgagcggcctgcgttcccaatggtgacggcgcccctggcccagcctgaacggggcagcatgggcagcctggaccggctggtgcggcgctcgccctcagtggatagcgcccgcaaggagccgcgctggcgggaccctgagctgcctgaggtgctggccatgctgcggcaccccgtggaccccgtgaaggccaatgcggccgcctacctgcagcatctgtgctttgagaacgagggtgtcaagcggcgtgtacggcagttgcgggggctgccgctgcttgtggcactgctggaccacccgcgggctgaggtgcggcgccgggcctgtggggcactgcgcaacctctcctatggccgcgacactgacaacaaggccgccatccgggactgcggtggtgtgcctgccctggtgcgcctgctgagggctgcccgggacaacgaggtccgtgagcttgtcactggtgagtgggacctggccatgctcacatcccctgggaagagaagagtgtgaggctcaacccgggaggaacgaggccactcggcctgcgaccgcctgggaaagcacccggtaggcaggagtgcagctgctgagacgcttgccccaggagccaggcatcaggcccagacactgtgacaggttccccagtctctaccatagcagggaggctgacgctgcgcccctcgggcatgtcccctcacctcctgccttcacacctcctgcccccacagaaactctcctgggacccacctccttggttcccaccccaaccgtgcagtggtggggcttgtgccttgtgagagctgagggacaggtagggtcaccgtgtctctgtgaggccctgtggcctcaggagtgttagtgccacctgccacatggcagggaatgggtgggacgggacagcactgccacaccctcctctgcacctcctcccctttggggctccttcctagctggaaaccagtactgggtgtcccccggaaccactcacggcttttgttacttcctactgttctgcatgagctgggacatgaggagagtgggacaggtcctgagcgtggccacctggggaggtaggcaggcggtgcatatggtcagcacagattggccaatcgcaccccacaggcaccctgtggaacctgtcatcctatgagcccctgaagatggtcatcattgaccatggcctgcagacgc

SEQ ID NO: 27832 - DNA, 2300 bp, Homo sapien
aggggtgctaccctaccctcacagagccacagagatgcagagggccccgggactggggggagactacagggccacctctggagggagtgccagagcaaacatgggagccaagcagcccagatgtggtgggtggggagactcaaatttagcaggattgagggtcagaacttgttctcccaggaggaaccttggtcagaaggtccttgtgtttatgctgaaaagcctgacagggcagctcagccaagagctgggcaggggctggcttggctgtgctcaactaccctctcagctgggacttgagtcccttagcgaatgttctgtgcccagtcctctgctgggcgctggtggaccccagaatgggggtagggtggggacaggggacagctgggagcagacattgcggataggatggggcaagactgggggaaatgccttcccagacacgctgcggctcacactgtcgcctgatctaaggcctggatcacctgcttaggagctgaccggccactggcatggcacaccgggcaagagagcgctgactgcccccctgcattcagcaccatcccagctccaatagagtgagtacaagataggtaacacctgccttgtttggaccagacctctaaacaccgcccagatcccagagtaaaggcagataaggcagtagttaagaagtaggaagaagtaaaggcagctaccccagagaagctaaggtcgggagaggtggaggctcccactgcacccccctggcccataccataggggaggtttcccccacagcagcctgggtactcacctgaggttattagacagcagcattaagagcctactctaaaaaatacccacggggcacctttcttttccttatttctaaatatgcctggatgtagggaaagggagctgaagtcctttagttccattttaagtatgttacattacacatagctaagaaacggtgaaatattgtaagcagccaatatttaattatttaaaaattaaaataggctggagctctcaggccacctgcccagggcgactccccagcaaaccgagcagtctccctcagagtggagatgacatgtctccgcaccggcaccgagggggcgcagggcggcgtggggagggggacccaggccgggggtccgggtggcgcgccctctctcacccccgaggcggcaggagcagcgcggcgcgaggacacctccgggccgtcggtgcccctgagcttcccggcggcgcgctgccccaggaaagttcccggcctgccgcccctcgggctgttggaaagtttcggcggctgcagggccctggcagctaggcgccaagcgtcgcgcggggcgggcacggctgcggggtcgggccgcgctcggctggagtgctcagtgcaagacgcccggacgggtagggtagggccccaaggccacgcacaaagagacccgcccccgccggcccggggtctcggacgccgcagagcgcgcggacaagacgcgggtggggcggagattggctccgacgtccggcccagaccctcgcccggatctcgactccagggataggaccctgtccggaccgctgcccggaatgcgtcccatatctgcagccccgcccccagtcccggctccgacccgaggccccagccccgggtcccacaccccgcccactggctcaggcttacctggagcgcagcgtgggcggccccgcagcgcggcctcggaccccagaagggcttccccgggtccgttggcgcgcggggagcggcgttcccagggcgcggcgcggtgcggcgcggcgcgggtcgcagtccacgcggccgcaactcggaccggtgcgggggccgccccctccctccaggcccagcgcgcaacccgagaccccgggccagccctcccgccctcacgcggcccgtgcgcaaagcggaccgggccggcgacgcgaatctccgccccgccccatctgacagcaaattttcccattggtcgagagacccggcgcggcacggcaaccggcgccgattgggcggatgcgcggagatgacggcttgccattgggcctccgggatgtcagtcccggcggatgaccggccccctcgcggaggggccgcggccccgcacctgcccgaacctctgcggcggcggtggcagggtacgcgggaccgctccctcccagccgacttacgagaacatcccccgaccatccagccccgagcagggactggcagagccggcgccccttccccggactctggccgcgtagcctccgccaccactcccagttcacaggtatccttcttcagcgcctgc

SEQ ID NO: 27833 - DNA, 2300 bp, Homo sapien
gctggtctcgaactcctgacctctggtgatttgcctgccttggcctcccaaagtgctgggattacaggcatgagccactgcgcccagcctcccttgttgtgtttctgacccctggctgcagcctaatgggccgactgctggacagcggtcctgagtcctgtttgaattggtgctgccccgacatcctctgacctcagctaatgatcctgcctgccgagggcagacaggtctctgcaaccctatgggtggtaggggtggtgatgagaggagaggtagtctcacttgcacagattttggtgtatggttctgtcttttgcactctttcaacagaggtctgtccagtccctcttgcaagtgtggggagggggtggtgcaggactatgaggtaactgtgagaagaggggctccagcagaaccagggtccaatggccttgaagagatggctggggacagctggactcattacgtctactcctaaatggaggaaacgacccctcagctacacagcacctgagccagaatgtcaccatggtgctgctccacaggatgacagctacctggtttgtgagggcccctattctagggacagctacttcattctgccctcccagagcagcaagcaacaaccctatgccaggaggccaattggcacgtcaagtgccagctccaatcgattgatagtagctgcctggctctgaaaggcagctgggatcgattcaccatgctgccagcacacagatggacccagcggtggtcccagcagtgagttcttgccttgggccatttcattttctttgtcctggccaaggaatgattggatgaacacactggactcccaatatgggtggataagacaagagtgtctggtcacacccctccaccactcataagcatggttgtgggcagtttggttccccaggcggccttggagaatgcaatgagccgaggaactggtcatctccaggtgcatccagggcaggaaaggatgacagcatgcgtgagccagggtcactggctaagaagtcatctcaggacctccccctagaaaagcccactgggcagcatccctgctggttcccccctacaccacaaggttacgcagagctggcggagggtcatggtcccactcatgtcaggtgctcttaatctggcaaggaaatgtaacctacgtgaatctcaacaggcagtgaagcaccgtttcttcctgactccaggtagggtgaagaaaatgggacagtagtacggggtgcgggcataaacgcacaactctgcctccccagacgcagagctgtggggctgtgagaatgccaggaggaggtaagaaagggcggccccatggggggcctgcagggtgggacaagcccaagaggtctctacatccaggcctggtgggggaggtgagcccctggtttaccgagggggtcccttcctgccctcggaaatactgcagctcctacctccatcgtctccccgctgcggggacccaggggcgtgaggatgagagagcccccaggccccagggtcagacgactgtgttcaagcaagtgagaacctctctgaggctgtttcccaactgtaaaatggggatagcagcagaactctctctcgcggcttgcgtgaagaatacaattcgatgtcgacaggagggagcggcgcgcagcgcgcagcgagtagcaggcgctgaagaaggatacctgtgaactgggagtggtggcggaggctacgcggccagagtccggggaaggggcgccggctctgccagtccctgctcggggctggatggtcgggggatgttctcgtaagtcggctgggagggagcggtcccgcgtaccctgccaccgccgccgcagaggttcgggcaggtgcggggccgcggcccctccgcgagggggccggtcatccgccgggactgacatcccggaggcccaatggcaagccgtcatctccgcgcatccgcccaatcggcgccggttgccgtgccgcgccgggtctctcgaccaatgggaaaatttgctgtcagatggggcggggcggagattcgcgtcgccggcccggtccgctttgcgcacgggccgcgtgagggcgggagggctggcccggggtctcgggttgcgcgctgggcctggagggagggggcggcccccgcaccggtccgagttgcggccgcgtggactgcgacccgcgccgcgccgcaccgcgccgcgccctgggaacgccgctccccgcgcgccaacggacccggggaagcccttctggggtccgaggccgcgctgcggggccgcccacgctgcgctccaggt

SEQ ID NO: 27834 - DNA, 2300 bp, Homo sapien
ctgggaggcggaggttgcagtgagctgaaattgcaccaccgcacggcagcctaggagacagagcgagactccatctcaaaaaaaaggaaaaaagaaaaagataagaaaaacacagcaagggagaccacagggaccagtagcccagtgttctccctctctcatcctctcacctagctccatgcggacagctgtgaggcccccggagaaagccacagagagaaaatgctttcagctgggtgtcaagaacttttcaagagtggcagctgttgaaatcaaaagagtggccacagaaggtagtgagcttcctatctgagtttgtgtgcaattagaggttggatgccagtgagcctgttgcagccccaagatcccagggcttaggtgcccatcctagacccatttcatctgccgtcacctgcttcctggcatcgcatgtcatccagactggagtgtcagtggtgacaaagaagatcagagtgtctgctctggctctgtctagctgggaaaagtatggctgggggtggggatggcccaaggccacaaggtatgacagaacaggatgcaaaccaccatctgacatgttactgcatccctctttgtgggcaaagggaaaccttggtcaactcatgtccagctttgaggtgcatggcctggtgctttggggaagcccattctccaggtgctgccatgaaccccagggcacagtccatcacccccaagccccagatcccacttgtccaccaccaccacctcttggccctatagattgcataggtttggctgctcagagggaaatcactggtaccagccccacatgatcccactgctggatggtgggagagacaaccatgtctggctgggtctgcggcccgctggccatgagtccctgggcatctggagtccttgtaaaaggttctgttgggttccaggggaaacacagataagatagcaaaagtgtggagcacaacgggcccgcatgtaggtccaggttagactcttgccgttgctgattaccagccaggctcttcccatccctgagccccagttttctgcagggcatcagggcacctaggtcttcaacacaggttgaagctaatgtggcctctcttgcttgccacctttttcaacttcaactgaatgacataactgctccaagtctcagtgtttacatctataaagtgggatgaaagaactgctgacccagacattgggtttagagtgctttacacattatcattatccctaatgtctttgtcatccatgtcatagttttttgaatgctcactttgaggcagggcctgagcctctgggctttgactctccacctttctgccacataggcccaggcacagcccagaggctacaggagcagcggtcccagctaatgcctctgtcctgttgggagggccccagtcagtgcccacctgctcaccctgcacaagtcaagctgggccagcccctcgtcgctggggcctggacctggatgtgagctcaaaggctacactggggggtggaagtgggggaggtggtgggtgtgcagggtatagtgctcaaatgcctagtccagggtctgggggtacatactgggaatggcagggacatcagggaggaaagagccgacctggaggccataaagtgaaggaagggatgaccaagaggaagatggccaggtccagaggtggggttgagtgaacaggatggggagaccaggacgcagtctgagggggccagtccggaagtgagcattcctgtacctcttccgagagaggccgcagggtgagcaggtgacagatggtgtccatgagggcatggactcaggggcggctgcgacctcccatggcgtccctgcaggcagggagccgcggagtccccgaaggccgctggatcaggaagcgctcagacgcccgcgcagcccgaagctttggcgcagccccgggggcggggcgccaggaggtggcagcctccgagcgacagcgcgcccagccaacgggacgccggcatgcggcgcgccgccccgcccctcgctgcgcggcccaatggtgaacgcgccggcttcgggctgggcggtactgggctggctgcggtggcgcgcgggcgcggcacccggaagtcggcggcggtggcggaggcggtgagtgcgcggctccggggctggccgactccgctagtggcccggccggcctgggctcgggggctccgggctctgggctctgggtgcgcggaccgggccaggctgcttgaaggtgggtgggctggccgcacttcctcaccctgcctcagtttcccctttctgaggtatggta

SEQ ID NO: 27835 - DNA, 2300 bp, Homo sapien
tctcaggcaggattggccactgtgttctgctgtcctctgtgggccacgctctccgaactgttggccaaatgctgcatgagctcatcagctcctggcaatttttaagatgttttcatatttcatccagcatcttgagttgtttttaccaaaaggattgcccctagtagcctgcccaccctcggatgatggccccctgtgggcgcttccagggcacccggcaaggggacccaacccacttccagccccacagtctgcttcccacagggcccccttgcaacaacacaccctttagcttcccatcctatgcagagtggtggccagcagaccatctcaaatggctgcccatccccctgacccagtgcgtctgcacgtggcgcttattgctatcccaatacttcaactgcacagccaccagctcctcactggagcagatggtccccaatggccatccctaatgcccgtgcctatggaggcacatacactgagccctcttcacctccgtccccactcattagacttttctcagaggaatctttttgggtctcttcagtatttgaacagcttcttggctgtcccatgtcccagctgtgagcactggctctgccctggagccgtgtcactaaatcattgcacatgtgcacatttcagggaacttgggtgtcacccttgggtggcctcggaatctaatctccgttctgcactcgtttgcattgtggaaaactgcctgctctgggccccagaggtccctgggtggggacgaggtgtatgctaagtgtgcagtcacccagcgtgtccccggcacgtgtccatgccagctgctgtgggtgtgtggggccttcgggtcctgtgggatggcgagtgtgtgtgctgagcaggacctgtagggcctgcatcccaggtgagtgggccatgctgttggaggcggaggcagggctgcccccactggtggcgtgtggggtgggtttggtgctgttgcaggggaggagatgtgcatgtgggggacagtcttgaaggaagaatgtatacagtggtctatttccaagacaaagtgtcttaaattggcttagctcagcaaactacagaagaaacaggatatactaggccaccctgcttggatagctgatgtgtgcttgtcggcctccactttccccgcacttagttgccttcacccgaaccaaagaagttcagtctaagctgaaagtttactagcctgcaaaatagctcattttgtctgttcttatcagcctgcctgctacttaggtcgtaagttaaatacttaaaaagtccctgagctaactaggactgcaatgcattgtgggctgcaacaaaatacagcaagacaagcccccaaaaaaacacctgaagcccctacccaacaattaataggcgacgtccgggaaaattgtgaccccacagtactcggcctatgaggaactgggggagggacctgcgtactaggggataaattgcttgtcgaaactgtgctgggtgtgcctgtctgacacctgatcttgcaagactgtcattaaaagtctcactttcgctgttctctgggtctgagttcattctttagatttggatgggtaagtttgtttctcacagtgtggctcctgccctcacttctgctgccccccggggaccccctcggcaccccagctcggtgtgtccaggccttaagactaccatggtgctgatgggatgcttctgttcagggctggtgttgcaggtggtggagagacagtctggccagtgccaatgagtgcatgggtttgggagttgtttgtgtggcaccggccaagagtgtggtgtccagttcccccacacccagcaagtagtacagacaccacagaggtggttctctctgttctggcctgttgcaggttcggagggcagccctgagtgtctgccatccgctcaactcagtgttttccttttcccgcagacctcgcgacctgtgtcagcagagccgccctgcaccaccatgtgcatcatcttctttaagtttgatcctcgccctgtttccaaaaacgcgtacaggtaaccccctcgctctgcatctgctgcgccctgcagggtcctgggtgcccagccagttctcatgccacccaagctgctgtgtgcaggaaggtgtgtgggccaggacggggctgcacaggcctggcactgccctccaggacagggtcactcagtgtgggatgctgtcagaatgcctctcggggcggggactccagtcaatgtacaaagacgtgaagactcagccacagaaggcagccacaggtaggacagaggagtgacatggg

SEQ ID NO: 27836 - DNA, 2300 bp, Homo sapien
tttttttgtagttttagtagagacgaggtttcaccatcttggccaggatggtcttgatctcttgacctcgtgacccacccgcctcggcctcccaaagtgctgggattacaggcgtaagccactgtgcctggcctaatttttttgtagggggttgggggccggggaccgagtctcgttctgttgcccatgctggagtgcagtggctggatcttggctcactgcaactcctgcctcccaggttcaagcaattctccagcttcagcctccgtagctgggacaacaggcacctgccaccaagccctgctatttttttttgtatttatagtagagacagggtttcaccatgttggtcaggctggtctcgaactcctaacctcaagtgatccgcccgcctcggcctcccaaagtgctgggattacacgcatgagccactgtgcctggccttgctcactattttttctggagacggtctcgttctgtcacccaggttggagtgcagtggcccgatctcagatcattgcaacctccacctcccgggttcaagcgattctcctgcctcagcctcccgagtagctgggattacaggtgcctgctaccacgcctggctactttttgtattttcagtagagataaggtttcgccacgttgcccaagctggtgtggaactcttgagctcaggtgatccgcctgcttcggcctcccaaagtactggggttacaggcgtgagccacagggcccggcccactatttttatcactcaagattttcgtctacagcagctattattggggtggctacccagtggaaaatttttctatttccactattccttccacatttattgacaggaaagctagtctaaggaagagctgtaccctcacttactcagaccctcgttttccttttttttttttttttttttgagacggagtctcactctgccgcccaggctagagtgaaagtggtgctatctcggatcactgcagcctggaactcctggactcaggtgatccttccacctcagcctcccgagtagctcggaccacaggcgcccgccaccacgcggctaattaaaaataattttgggcccggcgcggtggctcatgcctgtaatcccagcactttgggaggccgaggcgggcagatcaattgaggccaggagtttgataccagcctggccaacatggtgaaaccccgtctctaccaaaaatataaaaattagccgggcgtggtggtgggcgcctgtaatcccagttactcgggtgggtgagccaggagaatcgcttgaatccgggaggcaaaggttgcagtgagctgagatcgcgccactgcaccccagcctgggagacaaagcgagacaccgcctcaaaaaaaaaaaaaaaaagaaagaaaatttgtagatactgggctctcactatgttagccaggctggtctcgaactcctgggctcaagtaatcctcctgactcgacctcccaaaactctgggattacaggcgcaagccaccgtgcccggccgaaccaccgtgcccggccgaaccctccctgttttggaaatcctgtattagcaaaggggacagcgccagacagttgagcacacgcgttctttataaatgatgatgtctgatacagtgatgcttttaacagggttgtgtaacgcctgtgtgtgcacggtctcttctgcagtgtccaccgaaggtggcccgtctgcgtgtccgctcccggcgtactccgcgctccctgttcccggcattccccgcgctccccgagcttcccgcgctcccctgctcccggcattcccggtgcttcccgttcccggcgctcctcgcggccgccgccctcagtccagcgagccccgcctgggcagcgactgttagcgcgaccgcggcctgggcgcctggtccctcccgcgcggccgcgctattgggccgcgcgcggcggacacacgcgctacgcgccgccgattggcggcctccgcagcgcgctctgcggctcccccaatgcggggcggccgcgcgcggggattggccgcacgccgcgaaggcccgccctccgctcgcccggcgcggcaggcgggtgccggcgaccggagagcctggacaggctttccagatggctgcggcggtcggtcggtgaggctttcccggctgtggtttggctgcgggcggcttgggcagcccgcgggcgcctcaggtaggtgcggggcgcgaggggcgcccgcgggcggttgggcgggcgccgcggcctgcgcgagggcgcgcccttccctcccgcctccctccgggaccgaggccgcgggcgg

SEQ ID NO: 27837 - DNA, 2300 bp, Homo sapien
caggttctgaggtgtgtggccctggtcttccttgtaatctgtggcactgggcgcattgacccctcggtctgttttctctaatggtctttcttggttgccaggagactgacctcaccccgcttagtgttcctcatgcctgcctggttgctgcccacagcctcttgagcgtcttcagcactttatagtcagttgttagctctgtgctgtgtttcctggatcctcagcacctttgatggacacatctttgggaacatacggtgtgaaattcccattagattcagaaatgttaggacatcttagaatccaggaaatggggtgacagtgcagtggtcattgacctgccagtgtgtccaggccctgtgaccttgtctcttgtccatatagtgcgttcctcggagtagatggccagtggatagttgttaaatgtattgattaaacctaaactagtctctggttttcatgttgtgtccccttcgaagtacatccaccatgccttgtcccttgttaaatgtgtgatgtctgcatctcctgttctttccgggaatcttgggaggatgttaggtcatgcagtgcggtttgcatgtgtgcatctttactggtatgcacgcatgtgcatgcatgcgtgttcctgtgcacgttgtgggagtgtgcatgtgcgtgtgtctgcatgtgttccttctgctctgatgcagggttttctggctgccccctcagacccatcttccctgcttcatgttgtccctttcttcatgcttcctctgtagtaaggcttcctagagttgcatccttaaccctcatctctgggtggccttcctcctgtgggtttggcgactacctcctcagtgcgtcctggccttccgtatctggaccagtcatggctccagagttgtggcctcggcaccttcagagcctgcctggaggtcccctctgttctcctcgccaggctcctgcctgcatgctggaatttgggtgtccttccttgtctttagttccctcttttctctgctatccacctccgttgggtcaacaagtgcggtcagttctgtgacactgttcttggcccattgccagggcctctttcacacctttgtcctctggcctggaggactgtccccgtgccttggatgcagttgcttctgcctggcacagctgtgggtctcccctctcaagtaggaacctacttgtggcatgagagtcgcttcaccttcagtggctccttattgtccccagggcggaacgggctgcaggtggcacccaggcctctctgtgcctcggctccagctgtctcttgtggctccccaccccaaatcctggcaggtcccttccccacagccacccacccctctcctccatcgggaacagaactatgctgccacctctggtgacctcagcacgctgcatcactgtccccgtccacgtgctaccctgtgggcccaggagagccctggggtccctgggtagcagagcgcctggccatgcctctgaggcccctagtgccgcagagttgagctgagggtctcgcgctcgccctctgactgacccagcccttgcaggtgagtggattgctgtgctctggtggcctgagggaggccacgcgccttctgtgtgttccagaaagggtgcctcccactgcatgcttgcttatctgagttagaagaatgctgtggtggagtttagtgtaaatttttaaaatattttttgagccttatgattatatagtttttgtgtttctgaagtaggaattaaagtgggcattaacaaaatatttaactttggacttaagttataattcaggttctgaagaataaaagtaaggttagtttgttttgatgcctaaaaagtcctcttagggaatattattttgaagccctttactatgctgttaatagtgcttggcttttaacttggtaccagggaattggaaggtttctgtcattttgtgacgatatttttaaatttctttgcaggtagaagaagaaaggtgccactccggcatgaagacagactcgcttagtcgccagtcacttaagctgagtgcattgtgatttccaataattgaggcagtggttctaaaagctgtctacattaatgaaaagagcaatgtggccagcttgactaagccgccagcgcacagcgcggcaggacgcgcccgggtctcagcggacttgtgcatgttagctgtgtagatttatgtgagggcttgtaaaactctggtcttgtaaactagtcttaagcgcttttaatatggagacagatgagagcccctctccgctcccgtgtgggcccgcaggagaagcggt

SEQ ID NO: 27838 - DNA, 2300 bp, Homo sapien
gcttcctctgtagtaaggcttcctagagttgcatccttaaccctcatctctgggtggccttcctcctgtgggtttggcgactacctcctcagtgcgtcctggccttccgtatctggaccagtcatggctccagagttgtggcctcggcaccttcagagcctgcctggaggtcccctctgttctcctcgccaggctcctgcctgcatgctggaatttgggtgtccttccttgtctttagttccctcttttctctgctatccacctccgttgggtcaacaagtgcggtcagttctgtgacactgttcttggcccattgccagggcctctttcacacctttgtcctctggcctggaggactgtccccgtgccttggatgcagttgcttctgcctggcacagctgtgggtctcccctctcaagtaggaacctacttgtggcatgagagtcgcttcaccttcagtggctccttattgtccccagggcggaacgggctgcaggtggcacccaggcctctctgtgcctcggctccagctgtctcttgtggctccccaccccaaatcctggcaggtcccttccccacagccacccacccctctcctccatcgggaacagaactatgctgccacctctggtgacctcagcacgctgcatcactgtccccgtccacgtgctaccctgtgggcccaggagagccctggggtccctgggtagcagagcgcctggccatgcctctgaggcccctagtgccgcagagttgagctgagggtctcgcgctcgccctctgactgacccagcccttgcaggtgagtggattgctgtgctctggtggcctgagggaggccacgcgccttctgtgtgttccagaaagggtgcctcccactgcatgcttgcttatctgagttagaagaatgctgtggtggagtttagtgtaaatttttaaaatattttttgagccttatgattatatagtttttgtgtttctgaagtaggaattaaagtgggcattaacaaaatatttaactttggacttaagttataattcaggttctgaagaataaaagtaaggttagtttgttttgatgcctaaaaagtcctcttagggaatattattttgaagccctttactatgctgttaatagtgcttggcttttaacttggtaccagggaattggaaggtttctgtcattttgtgacgatatttttaaatttctttgcaggtagaagaagaaaggtgccactccggcatgaagacagactcgcttagtcgccagtcacttaagctgagtgcattgtgatttccaataattgaggcagtggttctaaaagctgtctacattaatgaaaagagcaatgtggccagcttgactaagccgccagcgcacagcgcggcaggacgcgcccgggtctcagcggacttgtgcatgttagctgtgtagatttatgtgagggcttgtaaaactctggtcttgtaaactagtcttaagcgcttttaatatggagacagatgagagcccctctccgctcccgtgtgggcccgcaggagaagcggtgatggagagccgagctcgccccttccaagcgctgccccgtgagcagtctccaccacctcccctgcaaacgtccagtggtgcagaggtaatggacgttggctctggtggtgatggacagtccgaactccctgctgaggaccccttcaacttctacggagcttctcttctctccaaaggatccttctctaagggccgcctcctcatagacccgaactgtagtggccacagcccgcgcaccgcccggcacgcacctgcggtccggaagttctcccctgaccttaagttgcttaaggatgtaaagattagcgtgagctttaccgagagctgcaggagtaaggacaggaaggtgctgtacacaggagcagagcgcgacgtgcgggcggagtgcggtctgctccttagccctgtcagtggggacgtgcatgcttgtccctttggcgggagtgttggtgacggggtaggcatagggggtgagagtgctgataagaaggatgaggagaatgagctggatcaggaaaagagagtggagtatgcagtgctcgatgagttagaagattttactgacaatttggagctagatgaagaaggagcaggcgggttcacggctaaagcaatcgttcagagagacagagtggatgaagaggccttgaatttcccctacgaggtatgttggcagcccctcctctagagggctcttagcaaaacccaaagagagatttgggaattgcagcatcttttgaaagcagggaaa

SEQ ID NO: 27839 - DNA, 2300 bp, Homo sapien
gcacgctgcatcactgtccccgtccacgtgctaccctgtgggcccaggagagccctggggtccctgggtagcagagcgcctggccatgcctctgaggcccctagtgccgcagagttgagctgagggtctcgcgctcgccctctgactgacccagcccttgcaggtgagtggattgctgtgctctggtggcctgagggaggccacgcgccttctgtgtgttccagaaagggtgcctcccactgcatgcttgcttatctgagttagaagaatgctgtggtggagtttagtgtaaatttttaaaatattttttgagccttatgattatatagtttttgtgtttctgaagtaggaattaaagtgggcattaacaaaatatttaactttggacttaagttataattcaggttctgaagaataaaagtaaggttagtttgttttgatgcctaaaaagtcctcttagggaatattattttgaagccctttactatgctgttaatagtgcttggcttttaacttggtaccagggaattggaaggtttctgtcattttgtgacgatatttttaaatttctttgcaggtagaagaagaaaggtgccactccggcatgaagacagactcgcttagtcgccagtcacttaagctgagtgcattgtgatttccaataattgaggcagtggttctaaaagctgtctacattaatgaaaagagcaatgtggccagcttgactaagccgccagcgcacagcgcggcaggacgcgcccgggtctcagcggacttgtgcatgttagctgtgtagatttatgtgagggcttgtaaaactctggtcttgtaaactagtcttaagcgcttttaatatggagacagatgagagcccctctccgctcccgtgtgggcccgcaggagaagcggtgatggagagccgagctcgccccttccaagcgctgccccgtgagcagtctccaccacctcccctgcaaacgtccagtggtgcagaggtaatggacgttggctctggtggtgatggacagtccgaactccctgctgaggaccccttcaacttctacggagcttctcttctctccaaaggatccttctctaagggccgcctcctcatagacccgaactgtagtggccacagcccgcgcaccgcccggcacgcacctgcggtccggaagttctcccctgaccttaagttgcttaaggatgtaaagattagcgtgagctttaccgagagctgcaggagtaaggacaggaaggtgctgtacacaggagcagagcgcgacgtgcgggcggagtgcggtctgctccttagccctgtcagtggggacgtgcatgcttgtccctttggcgggagtgttggtgacggggtaggcatagggggtgagagtgctgataagaaggatgaggagaatgagctggatcaggaaaagagagtggagtatgcagtgctcgatgagttagaagattttactgacaatttggagctagatgaagaaggagcaggcgggttcacggctaaagcaatcgttcagagagacagagtggatgaagaggccttgaatttcccctacgaggtatgttggcagcccctcctctagagggctcttagcaaaacccaaagagagatttgggaattgcagcatcttttgaaagcagggaaattaaaaaaaaaaaaaacaaaaaccaaaatcccctctgaggtggaataatgttaatgtggagaagagaaagatgtaaggagtccagatttttaaagtttcctaatgaaaagtttggcccatgggtaggccctgcatccctgatctagcgcgtggggcagcaggtgctgctgagttacgctccttggcagtgtgtgcccctggaccaggtgtgttggtgtcagctggtagcttcatcctgtttgtttttcagatgatcatgcaccctaagggcacatctaggccccctgagagcacctcctttctgtgtctgttctcaggaatgctgttgagctctcctgttgcaggagcatgagcgccaggggctctggtgtctgaacagcgtgttttgcaggatgactttgacaacgatgtggatgctctgctggaagaaggcctttgtgcccccaaaaagaggcgaacagaggaaaaatatggcggagacagcgaccatccgtccgatggagagacaagtgtgcagccgatgatgaccaagattaaaacagtgctcaaaagtacgtgtgtgggtcagaagcagtgggtgttccagggcagtggaggggtggttgcttccttagcagaaatgctttgagagagctctgg

SEQ ID NO: 27840 - DNA, 2300 bp, Homo sapien
aggggacaagttagctatgccaggtgccacatgttgctgcctatgtcgtgttggtagcagttaagcaggagggcttttggtctagacggttgcaggcagggtaaacctggggcttcagcttctggggctgggggcaggagtcttgacctcggggcctctaggaggctggtttggtgctgcattttcaacaggctcattcagaaggtaaacccacattcgtcctgcacagctcactggtcagcagccattctggcctggatgcctggatgttcacagacggacagctgcatgtgacccccacctcaggtggctgggccaactttgtgaccactcactgtcacagaggagcagccccagcggacccgtggcccgtctcttgcttggctccgtattccctttgcttcttttcctgacttaacctaaagctggcaggaggcagctccatcttggcctgactctgtggggagagagcccacgcagtgtgcatgcacccctgacctttaacactccctccctgaatcatcacctgatggtggcctgggtacaggtgtcaggtccagggtcagggccacttggtgggtacctagccctgagagtcactggccctttttccccttatgtatattttttaaggtttcatttgctttcttctgttttttaattttttttttgaggcggggtcttgctgttacccaggttggagtagctcactacagcctcagcctcccaggctcaagtgatcctcccacctcagcttcccaagtagccaggactataggtgtatgccaccatgcctggataattttaaaaagttttttgtagagtcagggtcttgctgtgttgcctaggctggtctttctaagtttttaacttgttcccaatacctgtgagaaaattaagttttagttacatctttgccttacgctcttcccagcagtcaggcctggtggcaggtgtcaagttgataagtcgtaaacctcttcctcacaactgcctataaagcaaagaaggggttgggagtagtgtattaaaccaacttagaaacggaatcatttgaagcagtgttttgtatgctgctgagagtgcagctcagttacaataaagacttgtcacctggtcactgggagcagtggctgacagccatgcagtttattagcaaagctcatccagccccaaggcgcctctggccacaaccagacaggcagcaaaggagtccagtgtccacagtgcttaccagatgtggaggcaggagctgaggctgggacttatatcttgcacagacctgttctgtgctccttcatgtgctggtttgacacgtgtaaattcccacctcaggccacatgctatctgtcctaggcctggaggcatagcagtgagcaaggcagagaggaatttcgattatctgtgaagacccagttaaacacatgctagtacccaacaatttcttgtgcaggaggtgctgtggcaacaattccaagtgtttttacagtgattataggatgttcttgtcttcctgtgcaggtcgtggccgcccacctacagagccgctgcccgacgggtggatcatgacattccataactctggagtcccggtgtacctacacagagagtctcgggtggtcacctggtccaggccatacttcttgggaacgggaagcatacgggtaggggaggcatcagtcgtgactttaggcttgtaagttctcagaccaaaacgtgcacatccacacacatggcaccgcagccaagcagaggccggtgaaaggcatcagagtttcagactctcgggttgtccttgtaatccatattgcaatttcactatccacagaaacacgaccctcctctgagtagcatcccttgtctgcattataagaaaatgaaggacaacgaggaacgggagcaaagcagtgacctcacccctagtggggatgtgtcccccgtcaagcccctgagccgatctgcagagctggagtttcccctggatgagcctgactctatgggtgctgacccggggcccccggacgagaaagacccactaggggctgaggcagcccctggggccctggggcaggtgaaggccaaagtcgaggtgtgcaaagatgaatccgttggtgagtttttgaaggactcttcccttcttgcctcctgggacccatgagctttgtttttctaatgaaggccataattgttcatagttcctagttgtacttgtgagcaaggggctgtgcacctccactgttggtgtggctgaaaggcttgtcttcctgtccttgcaagaacctgcctgggtgcagcaccct

SEQ ID NO: 27841 - DNA, 2300 bp, Homo sapien
gcttcagccaaagtcctagtctgggaaggcacagtgggcaatgtctctgcacctcagcctgctgcagcttccctatgcctcactgtgtggaatctccccatcacctcttgtttccctgtctgcctctcttgtccttcctgtgtgttcttgggttggctgcagagccagggtgatgacactgttggaagccttgctgggctgggcctctgctggccacctggggctgggctctgtgtagctgtgtggggctttggcctttggggagctgggccttttaaggccagcttttgggtctggctgactttccctctcctgtagtctcagttgtggcaatagtaaagcctctctgcaaaggtgctttatctttatagagttctgagaagggtgccttatggatcagaatcagatccaaataaggtgggcctggccagccagccatgtacctggggccctcttaggataccagactccatcccacagtgctcagggtggaagggtgctgtgggctctggagatgggcaactggacggtgaggtacggagcatgtcttgtacccggtgggttccttgcagagttgaggtatgaagtgctaggcgagctcacaagaacagacattaagcatctggggaaagccaaccgcaggcccagccatgaagaggccggtgggcctggtggggactcacaagcctctgctttgtgttgtagtattttaaccacatcagcatcgaggactcgcgggtctacgagctgaccagcaaggctgggctgttgtctccatatcagatcctccacgagtgccttaaaaggtagggtaggggggtgcctccccccatgagtcaggtcgggggagctcctctctggcgtctcatattcttgtggctgtttgtcccaaggcagaggcatggccaggtttccctgggtacacagcagccccttggccctggccaccagtcagtcccacaggcctgaatcgggcgtgtggagaattccctcctctggctgagatgcagtctggggagaggcttggtcatttcctaagggcttcccagagcaggcctcctcagaggcagctggctgctctgctcaggggacgccatctgttgtctgttttctcttaaagaaaccatgggatgggtgacacgtctatcaagtttgaagtggttcctgggaaaaaccagaagagtgaatacgtcatggcgtgtggcaagcacacagtgcgcgggtggtgtaaggactccttctctgctgcctggtggccgctgggcgggcggcccctggtgtggccctgcgcctctgtggcttggtctcagctgttgccctggcattgtccctgagcccagctgtgtgtgctggccaccacacgttcagcctaaggcggactggcagccgtcctgcctgcactttccctgtcttttccctttcccccgctgtcacccctgtctccgtccagcccttgtccctgtggcaggaggaaaggccctcctcctcgaacagccagcagaatcctgctgctccctgtttctggaggtgtgcgtcttggcgggagggaggctctcggctgcgtggctttgagtggtagtgtcctcagctcctagactctgagggccactctctcaaggtggcagctgggtactgtgagactcaggtgcccagagcagtggcagagtgctgcctattcctgtagaatgtgccctggctggccctcggggtgtgggtcaggagggctgggagcggcagggggccccatgagcactgggtgtttgtgaccccctctccatgcttgctctttctctgtgtaggtaagaacaagagagttggaaagcagttagcctcacagaagatccttcagctgctgcacccacatgtcaagaactgggggtctttactgcgcatgtatggccgtgagagcagcaagatggtcaagcaggtaactggccatcagcaggtcccagggcagcctgtgctgccaccctggagcgtattcctgaggctctgtgctcagagggggcagagctgggcagctctgctgttgctcacagctgcctctctcctgggccacttgtgtggctttgtgggcaggggtggggtcgtcccagctacatctcctatcccagcctgctgggcatggtcagtgaagtgtgggtgattgggaacgcaggctgggcccagctatgtggcttgtagggagatggccaaagtgcaaggcagggccaggcaggagatgctgaaggtgcgcccggctcggaggtgtgcaaaggctcaggagccagggccagctctccctgcttgaaggagagcga

SEQ ID NO: 27842 - DNA, 2300 bp, Homo sapien
gtccctgagcccagctgtgtgtgctggccaccacacgttcagcctaaggcggactggcagccgtcctgcctgcactttccctgtcttttccctttcccccgctgtcacccctgtctccgtccagcccttgtccctgtggcaggaggaaaggccctcctcctcgaacagccagcagaatcctgctgctccctgtttctggaggtgtgcgtcttggcgggagggaggctctcggctgcgtggctttgagtggtagtgtcctcagctcctagactctgagggccactctctcaaggtggcagctgggtactgtgagactcaggtgcccagagcagtggcagagtgctgcctattcctgtagaatgtgccctggctggccctcggggtgtgggtcaggagggctgggagcggcagggggccccatgagcactgggtgtttgtgaccccctctccatgcttgctctttctctgtgtaggtaagaacaagagagttggaaagcagttagcctcacagaagatccttcagctgctgcacccacatgtcaagaactgggggtctttactgcgcatgtatggccgtgagagcagcaagatggtcaagcaggtaactggccatcagcaggtcccagggcagcctgtgctgccaccctggagcgtattcctgaggctctgtgctcagagggggcagagctgggcagctctgctgttgctcacagctgcctctctcctgggccacttgtgtggctttgtgggcaggggtggggtcgtcccagctacatctcctatcccagcctgctgggcatggtcagtgaagtgtgggtgattgggaacgcaggctgggcccagctatgtggcttgtagggagatggccaaagtgcaaggcagggccaggcaggagatgctgaaggtgcgcccggctcggaggtgtgcaaaggctcaggagccagggccagctctccctgcttgaaggagagcgagtgtgtcagggtagctctccctggtaccagtgccggtccatctctaacagaagagcatatgtgtaccatctgtcttgtttctgctgttgtggccaacatcctgcagtgtaagccagtgcccactcctgaggggtggagggtaacatggggaggtgagtgtaatcattttcctcaaatgattacagaaactctctgggttcttgccctcctggtcattggaaggggaagtagttgtggaggggttaggcctgcaggtggggcagccctaggactgtgtggtgggtgggccctctgcccaagccagctgccaagagcagggcctgcctttaggtccctgagaccgaggcctcggcactgtccccgaagaggcctttactctggacatgataagggagggtgagggggctcacacgggccaccagggcatgttaaggaacttgagagagatttttgggaagcaagttgaaatgtaggtagcacttgcttctgcccttgctgtgcatggtccttggctgtgacggagggagagaaggcaagccccactctggcccgggggtgggaaacttccctgagcaggagggggaaaggtcccagccaggcacagccacagcttgggggagctctggcatcccgaggaaccacagcacccttggggctggcctaagacgggaaggggctgaggccagcctgatgctgctctgcattcatggagtgtgcagagagctcagtgcctgaggctgatgggctgggctgcagcgtgctgttcttactggctatggccacactctggtttcactccttgatgaggactctgggcaccacgagcacctcacctccctactctgcccatggcaggaggccatataagtggcgtggtgtgggcagaaaggcctggcagctatggactgcccctcgctctctgctgctgtcagtgggcctggcatcactgaggcgggccagtcagcatgcagttatgttgccacagctcctggctgtttcgtgtctgccagaccctgggcgcgcctgccttcagggtcccaggcacacagctgctgggcagcgggcaggccgtagagctacagcctgcagtcctgagcgtgaggtgctatacttcccaggagacatcggacaagagtgtgattgagctgcagcagtatgccaagaagaacaagcccaacctgcacatcctcagcaagctccaagaggagatgaagaggctagctgaggaaagggtgagtgccaccctagcgggagggctgccgggccacggccattcctgtggcacctgtggagggacagcagaccccaggacccgtgcctgagctg

SEQ ID NO: 27843 - DNA, 2300 bp, Homo sapien
tggctcctctcctgtggtgccactggtgccccgacgcccacattcctggtccctccatcctgccgggacctccggcgcccactccccaccttggtgcccaacgtcttccctgaccccaccttggaccagccttgctgatgccctcatccagcccctggctttaaaagccaagcccgtgctaagcacagcctcctccttgccccacttggttgagggctcatgaggccccgcaggccaataggctgtaccttccctgccccagcaagggggctttgcctcccacaactcacaccggggcccctggaatcacccaactgcagctcccacccccacacctagccctccaggaggtcctgccaggcctgtctccaaaaacggccgctccaggtccccacagccttcctgcagcagtgagcaaacagtgaaacagtatttcccagcccagaggccaccatggcctccctcctgccgagcccagagcagtgccctgtggtaatgcactgagggccactcctcatcctccctgtgacaagggccactgccgtgtgtacctctaggttatcccgagtcaaatcagtgatgaccaacctctttcttacttcaccctcccctgtggctcacctgcctggatactcccccaaatctcaccgcctgagcccactgttcccatcacgtcctgatggtgcgtcaggcctccctcaacatgtccccatgcccaccagggactcatggctacctggaagaaggcgtgtggagagatccggaaggtcagccctagcaggtcctcgtggatgcaccggtccccagccacatgctccaggggcaggccctcctggctaggagtctttctgtgggcgaaggtgcaggtccttcagtgtcacagtccctgcagggacctgccccgccccactcgggctccttaccgctgtccctcctccacgaagtagaggcaggtcactccactggccctgcctggccctgctgtgaagtgctgcgctagggaggtcttcagctctgccagctcctcagggctcagcttctggagtaagtggtgaaaagttcccatcaggctgtgctgaggcccacctaggctaggcaccctcccccagcagggcccccgttgagacctgggggtggaagtaggcaatggccatggcctggtggcggcggctggtgcgcacagtcagctgcttccagtggcctgtgtacgtctctgggtcgtatgccgagtatggagtggacctgtgggaatcacgagctggcccaagtgcccacaactgggcaagcagtccccctgctctctcctctggccacaccttccttcatctggctgaaatggcaggcactccagaattcccggggcaggatcaccaccctctgctcccacaccgcataggacttcccgggagccccgtcacaggtcctcaccggatgaactcctggaaggccttcaccacctgcttggtggcttcggggatgtgcacggtgtcaaacggggctgccacagcacacgtcccgcccttgtacttgccgagccgacagcccacggtgttatcctccccatccaccccgacgccaaccagaaactcacacttattacgatactcagtctgcagggagagagagctgcaccttaccctggctgcccagcgcttgggcctggaaaccctgatttccccacaggggctggcagtcaaacaagaggaacagctgacaactatgtgatgttaccagaagaaaacacaaagcagggagatcaacaggaagggtgagcaaaagcaaagtttttcaaaacccaggataggggtttgtggccaccgaagtctagtctgacctgctggggtgatggcctgaccccctccagcgggcagcaggccttgttgtgcttgtgcctctgctcgagcagccagggcagcaaggcacggttggtgctcccgatttccctgtaagaggagcagatcggtggttggactccacctactgcccccgacccatgccaggccactccccaaatgtccaggctcctgacccctcctttgggatgtcattgtgcccactgtgacgtgggtgtcttgctggctagctcccaaaggggccgccagatcctgtgctgggcctcccaactggtgcatggacaggctgaggaagcacaggccgggcagagccctggccaagaggggcgtcttgcgcccacactcacttggcaagtttctgcagcacctgctcgcactccagctgcttccgctcaagctgctcagcatagggcactgtccatagaggggtcaccacgtcggccactc

SEQ ID NO: 27844 - DNA, 2300 bp, Homo sapien
tccaccccgacgccaaccagaaactcacacttattacgatactcagtctgcagggagagagagctgcaccttaccctggctgcccagcgcttgggcctggaaaccctgatttccccacaggggctggcagtcaaacaagaggaacagctgacaactatgtgatgttaccagaagaaaacacaaagcagggagatcaacaggaagggtgagcaaaagcaaagtttttcaaaacccaggataggggtttgtggccaccgaagtctagtctgacctgctggggtgatggcctgaccccctccagcgggcagcaggccttgttgtgcttgtgcctctgctcgagcagccagggcagcaaggcacggttggtgctcccgatttccctgtaagaggagcagatcggtggttggactccacctactgcccccgacccatgccaggccactccccaaatgtccaggctcctgacccctcctttgggatgtcattgtgcccactgtgacgtgggtgtcttgctggctagctcccaaaggggccgccagatcctgtgctgggcctcccaactggtgcatggacaggctgaggaagcacaggccgggcagagccctggccaagaggggcgtcttgcgcccacactcacttggcaagtttctgcagcacctgctcgcactccagctgcttccgctcaagctgctcagcatagggcactgtccatagaggggtcaccacgtcggccactcgtgttactggtggctcactctcaccctcctgtcgcctcctcctggccatggggtcggccttgggccgggccaggcgcacactgagtgggcggcctttccagagggcaccatgcaaaacgcgcagggccttgtccctctctgcagcgctgcggaatgtcacaaaggcgcagggtggttgcccaaagagtttggttttgtggggctgcagaccaaagcggcccaggaagcgccggacgtcgctgaagctggcgtggcgaggcacgttctgcagctccagtttaaagatctcagaggtaaacaagtcatccctgatgtagctgtagagcccgggctgaggccccggccctgtagccgccccagcgccctctttctccacctcctccagggctgccggggctgcagggggcaccgagacggtagggcagctcagggcactgctgctctcctggccacagctctccatgggcttcgggccctgtgtggggacagatggggtgctagggtgaggactaggccctgggggcctggccccccaagcttccttatgggacacccagacctccgtcggtgcactctgcactcagccctgcccctcccccagtctaccctcccgaccccattcccgtctcctttcctcccctatcgcacctgcctcgtccccacctattctctggcaggtttcctgacccaccccgcctcctcccaccccatccccgtctctacccagcgtctccccgcactctacctcgttgtcgaggttctcactcatcgcccaggcggttctccgcctagaccagggacgccatgggggccgcctggccacctcgtcctgggcctgtcacaagggaagtggcctgtcacaagggaagtgctcagaggggaggtgctcacagagccggtgcaacgccgcgaggtcgccgccacccccggcttcgccccaggcggggcgggactcgaacctgcgatgctcaggtccgggtctcaggcttggggctgtaccgcccgcccgccaggggcccgcgccggccgctcgcttcgccagccactcttagtccgccagcgcgtgcggcggaggccgagcgtctctatgatcctggcttctggcaacgtcatcgtcacgcgccggatccaacccccaaccactttagccagctctagaggcgcgcgtggccgggacggaagtgcgcgcgggtgtcgccgggagtgcgcgctcctctggctgacgggcgggccgggcatgcgccgcgggcgttttggcgggaagcgcggggcgggccggacaatgagagtgtccgcctcctgagccaataaagctgtactggttttgaatcgcggcgcgtttcccgccgctggggtcaggggtcgaggttcgggtcgtggggcggagggaagagcgggcgggcgggaggcgccggcgccagacgcggagggaaggagctacgagtagccgccgagaggccgcggagccagcgacgaccgacccagccgagccgccgccgccgccgcgcccccatggcggccgccaaggtgccgccgggcccaagcggggacagggtgggcggg

SEQ ID NO: 27845 - DNA, 2300 bp, Homo sapien
ttgcttagtaaaacgaaaaaagtcgctacaggactgctagtatttacactggattcacagctctgccagcaattttttcacagttcagaaaactaagttaataactagataaattgtaccggtgaaagtcatgaaatcctggcccaatttagaggataagagagcaccaataatcatattttaggttcgagtcttccagaacacatgccttggtcacccagaagtccgtaagagacccaagacttcaccactagactcaaactggaaaagaaaacataagcttttcgctgctcttcactgttccccacagcactgcggctctgcagcggcccgcactcaaccagacaccgcagccaacaaagccgccgcctgggtcggcgcatctaggacctgtgccccacgctggaacgcgagcttctgccacagaggccagtggcggttccagacgtaagaaccgaatgaatgaagtgctgcgtgggcgacggaaagaataaatgcaccgtactagtggggagccccaagtgggccgagccggaggaaacccgccgcccgcaccagttcctggaggctggggccgtcccgcgtggcgacggccgctccccaacccaccccaaggtcacgcgggggccctgcagcccccaggcctctgcagagcctgcacccccaaacgccccaactccgcaggcctcgagcccccaaaccccacgcgccccgactccgcgccaccgaggcccagcagacggccgagcctgcaggccggcggaggttggtggcggcggcgcgggccgcccacgtggccgctgataacggccccggccccgcccgcccaccctgtccccgcttgggcccggcggcaccttggcggccgccatgggggcgcggcggcggcggcggctcggctgggtcggtcgtcgctggctccgcggcctctcggcggctactcgtagctccttccctccgcgtctggcgccggcgcctcccgcccgcccgctcttccctccgccccacgacccgaacctcgacccctgaccccagcggcgggaaacgcgccgcgattcaaaaccagtacagctttattggctcaggaggcggacactctcattgtccggcccgccccgcgcttcccgccaaaacgcccgcggcgcatgcccggcccgcccgtcagccagaggagcgcgcactcccggcgacacccgcgcgcacttccgtcccggccacgcgcgcctctagagctggctaaagtggttgggggttggatccggcgcgtgacgatgacgttgccagaagccaggatcatagagacgctcggcctccgccgcacgcgctggcggactaagagtggctggcgaagcgagcggccggcgcgggcccctggcgggcgggcggtacagccccaagcctgagacccggacctgagcatcgcaggttcgagtcccgccccgcctggggcgaagccgggggtggcggcgacctcgcggcgttgcaccggctctgtgagcacctcccctctgagcacttcccttgtgacaggccacttcccttgtgacaggcccaggacgaggtggccaggcggcccccatggcgtccctggtctaggcggagaaccgcctgggcgatgagtgagaacctcgacaacgaggtagagtgcggggagacgctgggtagagacggggatggggtgggaggaggcggggtgggtcaggaaacctgccagagaataggtggggacgaggcaggtgcgataggggaggaaaggagacgggaatggggtcgggagggtagactgggggaggggcagggctgagtgcagagtgcaccgacggaggtctgggtgtcccataaggaagcttggggggccaggcccccagggcctagtcctcaccctagcaccccatctgtccccacacagggcccgaagcccatggagagctgtggccaggagagcagcagtgccctgagctgccctaccgtctcggtgccccctgcagccccggcagccctggaggaggtggagaaagagggcgctggggcggctacagggccggggcctcagcccgggctctacagctacatcagggatgacttgtttacctctgagatctttaaactggagctgcagaacgtgcctcgccacgccagcttcagcgacgtccggcgcttcctgggccgctttggtctgcagccccacaaaaccaaactctttgggcaaccaccctgcgcctttgtgacattccgcagcgctgcagagagggacaaggccctgcgcgttttgcatggtgccctctggaaaggccgcccac

SEQ ID NO: 27846 - DNA, 2300 bp, Homo sapien
tgcagggcagcaagggcatctggtgaagattcatgaaaggaacgggttaaatttccacatgggattagtcaccaactttaggccctttctttaagcagcctcagtctgattaaaagtcaggccaaaacctggacacccataaaagttgtaacctcaaccttaaagagtcctatttctgggacatcagcctacttacattttaaaaagttcctcttcatcttcttccagtgttttaatttcttgctcaggaagagaaactattggctcaaactgagggtcatggttggactcgtctgtattctcagtggaagtatcatggtcctcatgagtgtcctgtggagatacaaagaggttacactgctggcctatggatctggctcacaaccagagcccaaccagtgcctgcagtggtcagccctccgacaatgaagggacttcagatacaaggatgggcccaaccccaaagcaagaaattaggcccactcttccacactaggaaagctctgcgtttatgcccagctccatgtgagcacagagtgagacaccagaacttggggcccctcccccagattcacagacatcaatcagatctgtgcacagactgatgggggaccctacaagccgccaacacttgcagagagtggcctggcagaaactgcctcatctctttgagcatcagtttcttcctcatccataaaatgcagatgatacctgctgtgtgaagatcaaaggacacaatgatgggtcgaaatagattttgaaatattactttaaagcaaaatgtaactctttcagttttgactaattaggaaatagttgtgctcttgcttagtaaaacgaaaaaagtcgctacaggactgctagtatttacactggattcacagctctgccagcaattttttcacagttcagaaaactaagttaataactagataaattgtaccggtgaaagtcatgaaatcctggcccaatttagaggataagagagcaccaataatcatattttaggttcgagtcttccagaacacatgccttggtcacccagaagtccgtaagagacccaagacttcaccactagactcaaactggaaaagaaaacataagcttttcgctgctcttcactgttccccacagcactgcggctctgcagcggcccgcactcaaccagacaccgcagccaacaaagccgccgcctgggtcggcgcatctaggacctgtgccccacgctggaacgcgagcttctgccacagaggccagtggcggttccagacgtaagaaccgaatgaatgaagtgctgcgtgggcgacggaaagaataaatgcaccgtactagtggggagccccaagtgggccgagccggaggaaacccgccgcccgcaccagttcctggaggctggggccgtcccgcgtggcgacggccgctccccaacccaccccaaggtcacgcgggggccctgcagcccccaggcctctgcagagcctgcacccccaaacgccccaactccgcaggcctcgagcccccaaaccccacgcgccccgactccgcgccaccgaggcccagcagacggccgagcctgcaggccggcggaggttggtggcggcggcgcgggccgcccacgtggccgctgataacggccccggccccgcccgcccaccctgtccccgcttgggcccggcggcaccttggcggccgccatgggggcgcggcggcggcggcggctcggctgggtcggtcgtcgctggctccgcggcctctcggcggctactcgtagctccttccctccgcgtctggcgccggcgcctcccgcccgcccgctcttccctccgccccacgacccgaacctcgacccctgaccccagcggcgggaaacgcgccgcgattcaaaaccagtacagctttattggctcaggaggcggacactctcattgtccggcccgccccgcgcttcccgccaaaacgcccgcggcgcatgcccggcccgcccgtcagccagaggagcgcgcactcccggcgacacccgcgcgcacttccgtcccggccacgcgcgcctctagagctggctaaagtggttgggggttggatccggcgcgtgacgatgacgttgccagaagccaggatcatagagacgctcggcctccgccgcacgcgctggcggactaagagtggctggcgaagcgagcggccggcgcgggcccctggcgggcgggcggtacagccccaagcctgagacccggacctgagcatcgcaggttcgagtcccgccccgcctggggcgaagccgggggtggcggcgacctcgc

SEQ ID NO: 27847 - DNA, 2300 bp, Homo sapien
ctaattctcttggttgtggaaccggaattcaagatgacctggagtttgttgggctgctgcgctttctggtggtgttgtgacgggcagttcttggagcctgaagaagggctggggcgttcgtggaggcatggggtcctgcagtgcagagttgtcctgtgtcctcctgcgcaggccctgcatgtgggctgcaggtctgcactcttaacctcacggcttttcttgcaggcgggcaaaactgttccgatttgcctctgagaacgatctcccagaatggaaggagcgaggcactggtgacgtcaagctcctgaagcacaaggagaaaggggccatccgcctcctcatgcggagggacaagaccctgaagatctgtgccaaccactacagtaggtggcatgaacgaccacctcgacagtccccagcagcttggcctgggacctttgggaagattcagggctgattgggaactggggagcgtgttatttcatggagtgcaagtttgtggtgtgtttgttgaatttaaaaccagaaatacgtttttcagacgtgcctctgaactcagagcaggcccgcagcgaagcttagagcacacgggggtgtggagtcagccagacgggccctgatgggaggacgcagcgcccaggctgggctcgggacgaggagtgagtgctgcagggcgagggggtgctgtgtgtgtgtgtgtgtgtgtgtgtgtgtgtgtgtgtgtggtgtctggggggtgggggttggtgtctggggggggttaatggggggtatgtgtagtatctagggggctgtggtgtctactggtggtggtgtataggggtgtgtggttcggtgtgtgtggtgtctggggcagggggctgtgtggtgtctgaaggtgtgtggtgtctggggcgggggttgtgtggttgggtgtggtgtttgggggtgtgtagttggtctggtgtctggggggtgtggtggggtatgtggttgggtgtggtgtctggcgggggtggttgggggtgtgtggttgggggtctggtgtctgggtgtttggtgtttggggtgtgtatgtggtgtctgggggtgtgtgtagtgtctgaaggtgtgtggtctggggggctgtgtggtgtctgaaggtgtgtcggggcatgtgtggtgtctgaaggtgtgtggtgtctggggaggtgtacagtgtgtggtgtctggggggcgggtgtggtatccggggtgtgtgtaggggtcatctggtgtttggtgtctaggggggtttgtggtgtctaaggggtgtggttgggtgtgtgtggtgtctgggggtgttggggtgtgtggtgtctgggggtgttggggtgtgtggtgtctgggggtgttggggtgtgtgttgtctgggggtgttggggtgtgtggtgttggggggggtgtgtggtgtctgggggggtttggtgtctgagggggtgcggtatcgcggtgggggtgtgtgtgagagagattgggggtgttcgggcagtgtaagagcagatgtgtgaggtgcccaggcaccagcctccccagttatggtgtgttctaccctcaccaggatcttcctggggaggaaacgggaggggaacggggctgagaaggtggccaggtcctgggcgcctctgaagctacataagtagaggcccttgggcaggttcagccaagagctccagccaccctgtgaggggtccagcctggcctgcaaagaagtggcagtaggttgtcctgagtatggctggctgccagctgtctttagattgaacctgcactgcccagcttgttggcatgtttggaagtacacttgtcctggggtgtcccttggtaagcttcctagtgtcgtttgctgagtgtcatgcgtgtccggcggggcagggtccctcatcccaggtgcaggatgactgctggcaggagcctgagtggctcagcccttgagggcgatgcagaggggtgggtggtggtctgcctatgccatgggcacctcactgcacggcctggcctgccagacttccttgggaactggctcctgggttcccctccctccctgctcagcatgtctagtcctggggaagcttgcactctggctggtcctcctcctcgagccgtttgaatcatttccttgggggtcttccctgatgccctgtgctgctcccagagcctgggtcaggttgtgggttgttgtgtgtgcatcataagttggttctgggctcctgggcatctgggcagagccatctgtgtagccagcagtgtcttgtgcccatcatgggcccttggtagacagggaaagtggcagtgggtagagg

SEQ ID NO: 27848 - DNA, 2300 bp, Homo sapien
tctgcttcattttccttttccctgggatcttagctcttcttgaggaggaaactaggccatgggcttggcagccatgttgggtggggaggccggtgccaacctcgcttggttctctgtctccagtagtgggtctgcactacttgggacccctctgcccaggcctctgtgttaaggaaaagggatcccaaggccagatgcaatggttgacacctgtcaccccagcactttgggaggcaaacgtgggaggatcacttcaggccaggagttcaaggccagcttgggcaacatagtgagagaccctatctctacaaaaaaatataaaaaaaatagcctggcatggtggtgcacgtctgtggtcccagctacttgggaagctgaggcaggaggatcacttgaaccctggaggttgaggcttcagtgagccatgattgcaccactgcactccagcctgggtggcagagtgaaaccctgtgttaaaaactcaagggaaaagggatctcaccaagtaggcctgattccgcttcttcccactgtcagcatttggcagtttactccagggttcagctggtggaggaaggtgacagtcctggcaccctgcacagagcatgggcatggagtcagacctggatcctgaggggctctgtggcatgtgccactagaggaggcacttcatgggggaaggtaggagcaagggcaaggctggagatgggcaccaggtggcaggtgtgttgccaactgagaggctcacttgtggccactgcagagcccaggtaacgagccatctgctccagtggtgtctgctctaggctcaccattgtgccctgagacccctccactgcctcagagctaccatcagtgcttgggagcgctccaggctgcacctcctggagcagggcaccctgagaacagagcttaccactacggctgcctgggagaaagcccatcaccatttctgctgtgcagtagttagttgcattaagggctgggtcccggccccagtcctgggttcctccttccaatagccacaaccctggcctgcccaccctgaggagctgcggccgggtgcttccccaggggagcaggggcctgcaggccaaggagcctcatgcctgtgccgcagggtagggccgctcggggttctggttgcagaggagcagacactcagggctgggggcgatgggtgaggtccccccacagatctccacctagggaggggtctaatgggtctgggcttcagaacaggggacgctcggggcatgttggcgtggccgaggacaatgaccctcactggggacgctccggagcttgactgagggtctcccgctggcaccgcctcctctgccggcgtgtgtgtgtctgggggggggacccacacgaggccccgccccaccccgcccacagcgccgtcggccccggcccggtccaccttaagcggcggcggggcgggtgggatttcctgcgggaggagacgcgccgggcctatcgggcagggccggggcgccgggcttcccaaagggccccgcctcggggaggatgggggctccagccgaccgtctctcaagcctgcagctcgggccaggacgtggagggcccggcgcccgctggccgggctcctccagcccagtggcccgagggagggctgcgaggcggtcagaaggcaaacagccacgacgccgctgcggtgtcacacccgcgccccctcgtgaattccaaggggcttcagaccagaggggtcgttagggaaagggctgcgcccacagacgcccccgaggccacctgcacggctccgcggcccgggaccaggggggcctggccttcgccgtggtgcccaccacccgggccgcaggggtgcgtgggtgcccggcccccgagagccgcgggcgcccgccgggctggggtccccgaggccgcggggtcctgccccctccgaaggtcccgcgaaccggtggcggtccccgggccccatcaactcgccccgcccggtcccgccccgccgcggcccccagcgcccggtccaccttaaggggcgcgctgacataagagcgcagcagccgccgccgcccgtggggtgggatttcctccgccgccgccgccgccgccgccgcgggtcctgcgccgcgtccagcccgcccgcccgaccccggcccgaccccggccggccctgcccgcccggccccggggagggatgcggcggcgcggcgcccaggatgccccgcagccccgggacgcgcctcaaacccgccaagtacatcccggtggccacggccgccgcgctgctggtcggctccagcaccctcttc

SEQ ID NO: 27849 - DNA, 2300 bp, Homo sapien
acgggtcccaaggtgcccttctgtggaccaggcgagcaggtaaggaggcctagcctgccccctggcaggcctcgtcccccaggcccgcctctaggagctcgccccacagccttcaccccgtgaaggccccacctccagagccccatctctccagcagaggccacatcccctgaggccatgcccctcagggctctgcctgggtcaccaagggccttgtgtgactggtaggaccctgtctgtgtgcacccagagctgggacccacagaggggagcagggtgtcctgggaggggctggcgtgggccatccaggcttggcgtctgtcccttggccagcattgccctaggccaggtgggcggctgcccccaggagcactgtgtaccaggatgcctggaattccaccattagtcactctgtaaggcccacgggaagactttggaagaatttgagacgtgcttgagaaagcacatttctcttccctgagttgcatgagtgctctgtggtcactggaatggtgggcagtgcggggcggtctgtgcagtgatcaggaacaccaaacagtcccagggtgccatccttccttctgggccaccccgagaggcaggcctgtgactgggccctgtgcacctagaccagccccatccccagggacctctcccctcaggactgatgtctttcctggagagagtcactgggtgaagcagtgagtctgagcctccttggccaagggtctgagtctgcaggcatgtaggggccgtgcctcgcaggaggaggcatccctgtttggagatgagggctctgggtatgtcatcttcctgggactcctgggtccagtgggggattgggtctggttggccaagtgcattgagcccacatttgccctgatccacttctggctttgtggttcctgaggctcttgtcccaagcccaagcccaagcccatgcctatgtgcccgtcacaggggctagacgaggctcctcctccctctggctgccctgagtggtgggcccctggggctgcatggctccaagggcagaaccccaggtgtctgcagtagccagctgtggcctccctcctgttgcagagcccctgcccctcagccgtggatgctcagggacagggccatgggtcactatgtggctcttatggctccttgaggcccagttcctgaggccacggtgccatgtgtggcccccgtgggtgctgactggcggctgcaggcggggtggcaggtgggcagtggtgagaatgccttctccctacaggttccaggccctgattccctgaccctgggggacgacagcatccgtagcctggactttgtgtccgagccgagcctggacctccctgactatgggccagggggcctgcatgcagcctacccgccatccccaccgctcagcgcctctgatgccttctcgggcgctttgcgctccctgagcctcaaggcctcgagccggcggggcggggatcatgtggccctgcagcccctgcgctctgagggggggccccccacgccccaccgtagcatttttgccccccatgcactgcccaaccgcaacggcagcctgtcctatgacagcctgctcaatcctggctcgcctggtggccacgcctgccctgcccacccagcagttggcgtggccggataccactcaccctacctgcatcctggggcaacgggcgacccgccacggcccctaccccgcagcttcagccccgtgctgggcccccgcccccgggagccctcgcctgtgcgctacgacaacctgtccaggaccatcatggcatccatccaggagcgcaaggacagggaggagcgtgagcgcctgctgcgctcccaggccgactcactcttcggcgactcaggcgtctatgacgctcccagctcctacagcctgcagcaggccagtgtgctgtccgagggcccccgaggtcccgcgctgcgctatggctccagagacgaccttgtggctgggcccggcttcggtggcgcccgcaaccctgccctgcagacgtcactgtcctcgctgtccagctccgtgagccgtgcaccgcggacgtcgtcctcctccctgcaggctgatcaggccagcagcaacgccccggggccccggcccagcagtggctcacacaggtcacctgcacgccagggcctgccctccccgcccggcactccccactcaccatcctacgcgggccccaaagctgtcgccttcatccacacggacctcccagagccaccgccctcgctgaccgtgcagaggtgggtgccgggaggtgcgggtgggcttcctggca

SEQ ID NO: 27850 - DNA, 2300 bp, Homo sapien
gttatgcagggctgggcattggggtggggggctgacctggaccctccaagacatcagattgtccaactgctcagttttcattggggcaagtgcctcgctgagggtgaagggggctgtgagtgcccatcagggagcctggacaggtcccgcctctcacagctgtcccactctctggagctgccttggtggcagatggcactgtcctagaaaggtgaggctggagctgtctcttccaccaggggtggccaaggacgcttccagggtcttccatgcaggcctccagggtcaccctgggcgtggctgagggcatgcagaccacgctgtgctcccccccaccccccatgcccgtcgcttgcctgacatgctcctcagctgtcttgccccgcagaagctgtgtggtctcccctgtgagtagagtcgggctccatgatcctccggagcagcgccagggactctccccaggcacaattttaaagggggccctaggacctgccaggtccacggaagtggtccttgtaactctctccctggtggcagcctctggtgcattccggcaggggcagcccctcctcatcacagggaccctgtgtgccaggccccagctgcgttgccgctgaattatggatttaatagcagagaagccttgcaggccgcctgtgctggctcgggaaaccggggcccagccggggcctgtcacggtcctggtgccgccctgcttcctgtcggcgccacggagcaagcggagagatttatcttcccggctttaagaggtactaacggaggaggctgagaggcaggagctgaataattgatggccttctctggctcaggatctgctgaaaatgacacggtgcaaggcagaggggctgagagtgctgaccacaaaatgctgagaagccactccagggcggtcacggccagaaggaggacccccactcaggacggggtcacaggcatttggggcgggtgtcagaggctcctgccctgggtcattccagggggccaggatacccagaagctgggcctagaggcccacagggctggctcacccccacttccctctcacacgcctgccatcaccggtgcttcagcccagcaaccccatggctcgttggccccgtccacagcccccactgcctcctgtgtgctgggcgtgggcctctgagctctactctcagcctccttagccccaggagaggagtggaggacaggggtttaacgtggggtgtggtgcggagcggggagggctgtggcgccccctcagcccctcctttcctaacagcctcagcctcccccctggagaatcccctacctgctgggcacatctggcctctccccaccattctgtctccagccgggagatctctacccagtgaaacagtgaaacaggaagggttccctggttaccccgcgcagggcgcagggcatgcagcgggggagtggctcgcttcttcagtgccccaccgctcacacctctaggggagcatacagacgggcaggctgtggggctctgaccccatggcagtgtctgggggtgaatgtttacagctcttgaaaccccagtgggagtgcgttaccgggtggtcttttagtctagcggtctgtaggtggctggtgagagtgagctcaattagacccctgccttataacaaggacagaggaatttctgtatcccagggtttcttgccttggtgtaccaaaaaattggatcacacgtgggcttggagaatgagtgcaaggttttattgagtggaagtagctctcagcagatgggggagccagaggggagatggttttcccctggagtcaggcaacattctcgggatgtccagcagcttgtcttcttccaccagtgtgttcctctccccacacagaggcttctgtctctgccttgctagggtcttgggtttttataggcataggatggaggcatggcaggccagggtggtcttgggaaatgcaacatttgggcaggaaatgcctgtcctcacctaggttcgtgggggtggagccctaggcagggaccacgcccttctctacggagcacttcccgtccctcctctgtatcatttaaagggaccacgcttttcccttctcagcacttcctttccgtatcaacaggaggccagggactggctggacccctaggagccaggtcctacggataggtgagccggccccccagggcaaacacctccactgggcagacctgactgcccagagctggattctttacttgtaaaaggggccatgagtgacacaggctcggcctgctgtgccttgaggaaaggagaggctaa

SEQ ID NO: 27851 - DNA, 2300 bp, Homo sapien
cctctcagaagcccagggcccagcatacaggaagctccatgagtgctcatcatcacacacactccagaggctgagaacatcttggaggcctggggcctgctggccagaccctgtcctgggccctgaacacaggctgggcctggaagggacagtgaggggggccagagcccatgcctgctcagtgcagcaagcccaggcacctggtgggtgggccctgcagccagggaggcccctgcaccccacccttcccagccctgccctgggtaccgtgtgccacatctcagagcccacccatggggccctcccaactccagccaggagggaggatagagaacttttatttcagaagagtgcaaataaacaaatccttccttcccccaccataaagagcccggctggctttaggagagaaggcagaatttttagcctctcctttcctcaaggcacagcaggccgagcctgtgtcactcatggccccttttacaagtaaagaatccagctctgggcagtcaggtctgcccagtggaggtgtttgccctggggggccggctcacctatccgtaggacctggctcctaggggtccagccagtccctggcctcctgttgatacggaaaggaagtgctgagaagggaaaagcgtggtccctttaaatgatacagaggagggacgggaagtgctccgtagagaagggcgtggtccctgcctagggctccacccccacgaacctaggtgaggacaggcatttcctgcccaaatgttgcatttcccaagaccaccctggcctgccatgcctccatcctatgcctataaaaacccaagaccctagcaaggcagagacagaagcctctgtgtggggagaggaacacactggtggaagaagacaagctgctggacatcccgagaatgttgcctgactccaggggaaaaccatctcccctctggctcccccatctgctgagagctacttccactcaataaaaccttgcactcattctccaagcccacgtgtgatccaattttttggtacaccaaggcaagaaaccctgggatacagaaattcctctgtccttgttataaggcaggggtctaattgagctcactctcaccagccacctacagaccgctagactaaaagaccacccggtaacgcactcccactggggtttcaagagctgtaaacattcacccccagacactgccatggggtcagagccccacagcctgcccgtctgtatgctcccctagaggtgtgagcggtggggcactgaagaagcgagccactcccccgctgcatgccctgcgccctgcgcggggtaaccagggaacccttcctgtttcactgtttcactgggtagagatctcccggctggagacagaatggtggggagaggccagatgtgcccagcaggtaggggattctccaggggggaggctgaggctgttaggaaaggaggggctgagggggcgccacagccctccccgctccgcaccacaccccacgttaaacccctgtcctccactcctctcctggggctaaggaggctgagagtagagctcagaggcccacgcccagcacacaggaggcagtgggggctgtggacggggccaacgagccatggggttgctgggctgaagcaccggtgatggcaggcgtgtgagagggaagtgggggtgagccagccctgtgggcctctaggcccagcttctgggtatcctggccccctggaatgacccagggcaggagcctctgacacccgccccaaatgcctgtgaccccgtcctgagtgggggtcctccttctggccgtgaccgccctggagtggcttctcagcattttgtggtcagcactctcagcccctctgccttgcaccgtgtcattttcagcagatcctgagccagagaaggccatcaattattcagctcctgcctctcagcctcctccgttagtacctcttaaagccgggaagataaatctctccgcttgctccgtggcgccgacaggaagcagggcggcaccaggaccgtgacaggccccggctgggccccggtttcccgagccagcacaggcggcctgcaaggcttctctgctattaaatccataattcagcggcaacgcagctggggcctggcacacagggtccctgtgatgaggaggggctgcccctgccggaatgcaccagaggctgccaccagggagagagttacaaggaccacttccgtggacctggcaggtcctagggccccctttaaaattgtgcctggggagagtccctggcgctgctccggaggatcatggag

SEQ ID NO: 27852 - DNA, 2300 bp, Homo sapien
tgagagtggaaagtggggtgatggcaggcagggaggccatgctatctccagaaggacagtagagcatcctattagagttggccaggcagatagaggagagagaaaggtgggcgagagggccagagaggccttgtggccttgaggctgcagagcccaggggacaggtcaggggccacgggccagggaggtcttttggggtggggaggggctgcagtccaccatggggccagggaggaggctggtgagtcaccagtctggcccctgggatggggtcagaggacaccctccccccacctggctgcgtctccctcatcccagggccccggctgtgaagacaaacccatgctgcaaagttgggtttgattatctcataaaaagatgccccctcctgctcgctcagcagaggggttgccatggagaccagcgggcaggccccaaggggggccaggctggagccaattaccatggctgcagcgaggagagagcccacctcacccgactctcagaagttggtttacgaaaagcagttgtctcggcaggaaccgagccgtgtctttgcgcccaatacccacttcctggcagaactgagcgccacgtggccactcccccatgtcctcccctgtctcccccgaccccgcaccaccgtgtggctcagttctggcacctcactgggggcatgtttagagtggacacacagctgcttcgggagggagatccatgagcacagggctcggttcaaggcgagtgagctgagccctgaccacagccagactcacagcccacagcttcgggcctggagccacaggacagtggtgggatggtggcatggctcagtggtaatgtggcgggcgtggccaccatgggtggctagtcttggtgggtgcagtcagccgcatggtatggttggtgacaaggctcagttggtgacccccacagtcagtggtgtggtgtggtcgataatgtggcagtgagtcctgaccctgccccatgagcatgtggggcctccaccccacctggccccaggacaggaagtgccatttacatagcacagttttccctctggtgacagcaggtgagacagcagtggggagctgacatggtcaggccccaccttcctaggaagagtgtgtagaaagagagcagagagggtgtccgcagtttaaacagaacacgaggccaggtgctttcctcacccagcccacccagggaggggcctccggacccccatccctgggctgccatctccctggtagccaacaaatggccctggggcagggggtttggcagaggaggcccccaggctgtggggagggggtctgaggacctatgaacctgagtctgggaggacgcacatgcccagcggtcactgcgcgtgctgggcttgctgggctctgcgtttagggcgactgcactgtctgcccaagtagagaggacccagtggggcaggggccccatgtgggtaggagggccccagggtcacagttctaggttggggaagctggcctgtggtccactccttcctcctgcccggctccaaccccagcacttagccggcctcatgtctgcagaatcctgctcttagccagctgccgtggaaggtgttagctgtcaacgcaggtgttagctgataactcaagtgttagctgataagccataaccttcccagggggattcacattttaatagactcactgctgaaggcagaaagaatcttcagcattccaaaggggtgggggctcaatggtggaatgagaggcaggaaagcttactccggagtgggtgaccccgctggtgagaccagctctggatgcggcaccccgggagggactactgcccatgtagggccttggtgaagccccaggtgtatctggccctgtaatggaggaggggttgcaggcacctggggctgggggagaacccactgggaggctatccctgctgatggcgtctgggtgggaggggtgcaggcagctggcactgcaggggttggctggggaggagtgaactcctcccagggaggagatggagcagagaatgaggccagggggcggaggcttcaggagggttcctgccaagtcaggaagtgcttgaaaggaggatgtgtggaggagggagcaggctgcctgggtggttgtgggacgcgactcctcctaagccctggacacacttgccctccacccccgccctcgggcatccaggcgcccgtttttgagatagacgtgcccagagggaccccagccccattgcagtgtttcctaggccctgtgggtggaacccccactgggaccccccggggactc

SEQ ID NO: 27853 - DNA, 2300 bp, Homo sapien
tgcaatgggtgatgacgtcttggtgtggctctgggaggacctgttgagccacctcaggggctgagctggtggcactcggcagccagcaccctctggggaggtggcagtgtgtgcacagcccaccccttcaggaggccaggggacagagtggctgggggtgtctgggccccacctcaccttctgtgtggctgggaatggcatgcactccacaatgccctcataagcctaggctgggacaagggtgatagggataaagcaggccaaagtgatgagggccacagagcggcagccagaggcatgtgggcagtgcagcctccacaccaggcagagggcccacccagcatggctccaccctgcgaagctgcctgccactgggatcagatgggagcaccagggctctgggaggtcctcacttcctctgcacaaggcaggcaggtcaccggccctgcgccctgctcatctccctcagggccacctccatggccaggggcaggcagagggcacaggggtgcccagtcaccaggtctctctgcttcatatcagtggacctgggctctgaggggggccatcaaggcatcaggctggcccactccgtccttgagtcagggtcctacagactgacaccaggtgggcctgcaagaccctcatctgcatggtcctctcatgcagggtgggcctggggaggacccagcccggctgagctgactcccagcacttctccaggtgcaggggcagcctggcagttgtctgaagaccccgggatgcacttaggagctcatcggtgaggcccggtaggtgccccgagcagaagattgagaagggacacctgcacccctgtgtggtgtgtgcaggggcgtcactggattctctggccccatgcctcacaccgcccgtggggggctggcttggtagagtggggggatactaagcaggtgacctcggagagcgtcttctgggtttggagcccccattccgcagaagggaagaggtgggggacccctgcagggttacgggtaacatcaggcctaggtcccttctctaggatggtgcagagagggccacaaaggcccaggagggcccccagaactctcttaagccctgagcctgtttcttactgaaaaatgggggcgatcgtgctgcagcaaggggcttctgtgcagggggcgggggattcatgggtttcgtgaggccaggaagggagtgggtcaggcagaggccattcctaggcctcgggacaaagcccttgcccgcttggggaccgggccagcctaggccgccacaccctcgggcccgcgtccccggccggctccggcccgggccgccatcccctccgccgcctgcaggggccgccgcctcttcaggaatgcgccgcctttgtctgggaccgcgcggcgccggtgcaccgggcgggctgagcgcctcctgcggcccggcctgcgcgccccggcccgccgcgccgcccacgccccaacccccgcgccgccgccgccctcgccctgtgcgccctgcgcgccctgcgcacccgcggcccgagcccagccagagccgggcggagcggagcgcgccgagcctcgtcccgcggccgggccggggccgggccgtagcggcggcgcctggatgcggacccggccgcggggagacgggcgcccgccccgaaacgactttcagtccccgacgcgccccgcccaacccctacgatgaagagggcgtccgctggaggtgagtgtccgcgctgcacccgagcccggccggcggcggggcgcggaggggggcggctcgccccctccccggagccgcagggcccgtcccgggctgccgaggcgagggaagcgtagccgggcggcagggaaagccaccgcagtgccgcgccaggctggggccgctggcgccccggccccgggagggcggagccggaggcggcaggaaaagttgccgcttcccgggaaagttgacggcttcggcagggccgagggtggcggtccgagggtccccgatgctgggccaagtcgagggcgggggccgtgggctggaagggcggggcccggcctcggagcgccccggccaccaaggggttaacgagcgggtttttgcagaaacgtgggtaccgagggtgggtgggggtgtcgggccgcctccaccccagcctcacggtctgggctcagaacctcccgtttctccgaggtcagtccacagtgggatgaatgggggcgttggcggcagtagagggcgtgggggacagggttgtcccagcgctgcctccagggcgggcggtgagaggaggcagcaacgcccaccatctg

SEQ ID NO: 27854 - DNA, 2300 bp, Homo sapien
cccataactccctatcagcgctggccgacgcctaaccatcccagctagcacccaggagtgggcccagcttccagtggggagggtgctggccaacgtgctgaccgaggtggcggacacaggaaaccagcccatcccccagcgctccctctgcaggcctcagccctgctcccatgcagagacctgtggggaggtggaggcccaggtcccagcgcagagcaaccgggaacagccaggttggtggctggagagggtgctggtgccagaagcctccagggccacccctgctccccatttcaccccatgcccatcccatgccccagaatggtcacttcggctgcggcaggaggggtgggaggggctttaaacctatgagatagggtgtggggtcacaatcttcagctatagtgggctgctctgggtcactggtaattgaagagacgcctgcggagtaagcaagcaagtgtcctctcaaggcctttctgcaagcacagagcagcccgagactggagcctggtccaccccagcgctgtcctcagactgatggtcagtgccacgtgactcatctagggtctgatacatccctgtggagagagctcagttcctagcctgggggctgctgtgtgcagggaccctggagaagaatgcttgtctgggggtcaggcctcagcctcccactggctctgtgagcttcgcctgaggttccctatctgtgcaatgggtgatgacgtcttggtgtggctctgggaggacctgttgagccacctcaggggctgagctggtggcactcggcagccagcaccctctggggaggtggcagtgtgtgcacagcccaccccttcaggaggccaggggacagagtggctgggggtgtctgggccccacctcaccttctgtgtggctgggaatggcatgcactccacaatgccctcataagcctaggctgggacaagggtgatagggataaagcaggccaaagtgatgagggccacagagcggcagccagaggcatgtgggcagtgcagcctccacaccaggcagagggcccacccagcatggctccaccctgcgaagctgcctgccactgggatcagatgggagcaccagggctctgggaggtcctcacttcctctgcacaaggcaggcaggtcaccggccctgcgccctgctcatctccctcagggccacctccatggccaggggcaggcagagggcacaggggtgcccagtcaccaggtctctctgcttcatatcagtggacctgggctctgaggggggccatcaaggcatcaggctggcccactccgtccttgagtcagggtcctacagactgacaccaggtgggcctgcaagaccctcatctgcatggtcctctcatgcagggtgggcctggggaggacccagcccggctgagctgactcccagcacttctccaggtgcaggggcagcctggcagttgtctgaagaccccgggatgcacttaggagctcatcggtgaggcccggtaggtgccccgagcagaagattgagaagggacacctgcacccctgtgtggtgtgtgcaggggcgtcactggattctctggccccatgcctcacaccgcccgtggggggctggcttggtagagtggggggatactaagcaggtgacctcggagagcgtcttctgggtttggagcccccattccgcagaagggaagaggtgggggacccctgcagggttacgggtaacatcaggcctaggtcccttctctaggatggtgcagagagggccacaaaggcccaggagggcccccagaactctcttaagccctgagcctgtttcttactgaaaaatgggggcgatcgtgctgcagcaaggggcttctgtgcagggggcgggggattcatgggtttcgtgaggccaggaagggagtgggtcaggcagaggccattcctaggcctcgggacaaagcccttgcccgcttggggaccgggccagcctaggccgccacaccctcgggcccgcgtccccggccggctccggcccgggccgccatcccctccgccgcctgcaggggccgccgcctcttcaggaatgcgccgcctttgtctgggaccgcgcggcgccggtgcaccgggcgggctgagcgcctcctgcggcccggcctgcgcgccccggcccgccgcgccgcccacgccccaacccccgcgccgccgccgccctcgccctgtgcgccctgcgcgccctgcgcacccgcggcccgagcccagccagagccgggcggagcggagcgcgccgagcctcgtcccgcggccgggccg

SEQ ID NO: 27855 - DNA, 2300 bp, Homo sapien
cctcctgagctcaagccatcctcccacctcagccacttgagtagctgggtctacaggtgcatgccgccacacatggccaagtttttttttttttaatttttgtaaagaggaggtctcacagttgggcgtggtggctcatgcctgtaattccagcactttgggaggtgaggctggtggattgtctgaactcaggagttcaagaccagcccgggcaacagggtgaaatcctgtctctaataaaatacaaaacattagccaggcatggcggcaggtgcctgtaatcccagccactcgggaggctgagacagaattgcttgaacccgggaggcagaggttgcagtgagccgagatcactccactgcactccagcctgggtgacagagtgagactccgtctcaaaaaaaaaaaaaaaaaagaaaaaagatgaggtgtcactatgttaccctggttggcctggaactcctgggctcaagtgatccccccaccttggcctcccaaagtgctggaattacaggcgcacactaccacacccagctaattttcatattttttgtagagatggtatttcaccatgttgcccaggctggtatcaaactcgtggcctcaagtgaaccttccactttggcctcccaaagtgctgggatgacagggcataccactgcatctggcccttctgagcagtgcttggaagccacctcctgacgggggctgggggtcagagtggccagctgaatgctgggccatcagggtgaggggcgttttctcctcatccattgcctgttctcctggggcagatgtaaggggaaggccctgcactggggtggtgttaaacaagatgagatggtaagatctgctttcactttaaaggaacatttctggttgttgcttggaaagaagtgtcaggggcaagaatgctgcaggagggctggcctggagggcagggtgggactgcaggctggctgcacgggggcaggagcctgcgcttgcgtcagaggttcctgagagacttgggctctggggcagaggcctgagcaagggggcctcgctggggtgtctctgtcttagccacactcggtgtttctgggtcctgtgacccatgtgtgagcagcctgtggtgctggtggcacaggggaggaaaccgaggcagggagcctgtgggggctgctcggcaggggacaggcagctcctgtgcccactgctgtcccacacctgcatggaaacacaaaccccaccacggagccccctctcatctctacagggcctccagagcgccatgtgcaagaacttcatgggcggggtggggtggggtcaggagcctgctgtgggctggccaggcatgaacaccaagctggaggtggcggtgctgcaggtggggcagccttccccttccccactcctgtggcttgtgagggggtgggcaccgtgggggcgcacagggggcatggtgggcagtggtcggaggtggttttgggaactcacccagggcacgtggctcactctgcagctgctggggttggcctggtggggaggaggaggtcggagggactctgaacagagaggggagatgctggcaggagggctggagacccagccctgcagggcgtgggcgtgcatcagcagcggggtgggaatagacctgtctatgcagtagaaacaaaccagacatggatcctgttcttactaacgatgtaataaagccagaaacagcaccagaggccaatgggtggggggaagaataaaatgtgagcgaatggggctgatccaggccttctcacttctcaaggaaagtgtcgcaaagatgggcatcgcatccagggctgagattgaggactggttcacggcagagaccctgggagtgtctgggtgagagcagcccccaggctgagaggacacgagcatcagccatggttccagccaagccccagtgacgtctcccagtcctggctgccctgcctgagagggtgggccttgggatgacagtgctgaaggaactgcttttcacacagcaggacttgatggcctcaggagtccctgaggctggggctgggctgggcaggggagacacagggccagcacagaccccatagagggctctttatagaattatctgggtccagagcaaaggtggcactctcagccctccctggagtccacgccggcaggtgaaggatcagagccccatgccccatccttggggccaggggctgggacccaggtcaccaggagcctccagttgaagtggggaggtgactggggtggtgcagtagtgagccatcccctcacacactgccagccttgcc

SEQ ID NO: 27856 - DNA, 2300 bp, Homo sapien
ggggctcaccgcgcccccctacccgcagctctttccagcagcgcctgtcctacaccacgctcagcgacctggccctggcgcttctcgacggcaccgtgttcgaaatcgtgcaggggctactggagatccagcacctcaccgaaaagagcctgtacaaccagcgcctgcgcctacagaacgagcaccgaggtgcgcgggggcagcgggatgaggtgccgcctcctccgggtcggcgcctccgggcagctcttggtatctgtgcagatcagctccttccttggaagtgttcggaagaggtctctaagattgacaaaatcaacgggcgcagagactgagacagcgcctttttggtgatcagtgggtccaaccagttttgttttcagttgcgcagcacccaccttcttagcagaaactccctgttcgggcttccctgtgccccacgcgcttccagacaggatggccctaggcctcggtgcctgattggcctgcaggcagactctggtggtggcgctgactgcagcagcattgcccctcagtagttggaagtctgttgacagttgtgcagcaagcgtctttcagggtcagttccctctcaggcctcgcagggcctcattccagttgcacatcaaattcctaagcactgtctcctgtggcgccctcccaaacccgaagagcttcccacttgagccaggcctgcttggtgggcttgggagccctttcctgcaaattatatagggcaggtccccctgcaccatcagtttccacctttgttatttttcccaaacttcttattttagaagttaaaacatttagaaaagctgaaaagatagtatagtgcatacgcttgtgctcttcactaaagttcaatagttaacgttttgctctagttcttgacatcccaaaatatatacatgtgacagcatagcattcaccaagagtcttcagcattcctggagaccaggattttcaacccagccatgctgacatttgtggctgggtaagtctttttggtgagatgctgtcttgcgcattgcaggatggcaggggtaccctccctagtcctgaaaaccaagaatgcctccagacaacctgggtggtggggtcaaccttggccttggattgggagcaagtgctctagaacaaaactggtctcctacacagctgcagaaggtagccccctgagaaattaactgttccgggtgtctcctgactttcagtgcacggccacatcatggtacctaacttgtggcaaattgttgctttataagtaaggatccagtccaagttcatgtactacaattggttactttggtctctttgcttctgaaacagtccccaacatttattgtggcattgacttttttgtagagtccagggcattctaattttatagaatgccctgctcttgatctatcagacgaaatgcttcctcttgcatttaacctgcttctccactctctgggtttcctgtacactggactgctggtagaagcctgattagaagcaggtttaatgtggcaaaaatttctcctagcagtgcaaggcccccttccccagaaggcaggcagtgtccatctgctccaggattggtgtgtttttatcaagaatggatgttggattttggcagttcccttttcggcagctcttgagatgatcacgtggtgaatcattttctattactacagtgaattacagtcacttgaattccatcctactgggtcgtgctgtagtatcctttttatgtatgctggatttgatttgctaaaatcttaagaattttttggtctatgttcatgataaactgtggtctatagttttcatgtaatatctggtttgggtatcagggtttttgccagccttataggatgagtttcgaagtgttctctcctcttcagttttccagaagagtttgtgtagaattggcattacttcttcccctaaatgtctgggcgattgtctttttaaaattttttattgagctgtaagatgtatgtagtttactaatcccaagcgcatggctcattattccttaatgcccagactgtgccatgtgtggccagttgggggcgctccaggcacctttagatgccgccccatcattctgtgagcactttcttgctttctggttcaggtatgtgttcaggctcatcttttcttgttttctccgtgtctcagtcctggaatcggccatttttccacagagctatagttccttatagcaggatggggagttttagtaactgcctgggcccaatgctgtttgtgcttcagaaggtttgggccaggccctggttccacca

SEQ ID NO: 27857 - DNA, 2300 bp, Homo sapien
atttctcctaatgcgaaaggaacttttttatctgaggaatgtgagctccctttaattatctggcccagagaggcactggaatgaaacagcagtcacatcccactcctacttgagctaacgacctcttgaagccaattgctctgtgggttccagactgacaccaagtaggcataaaaagccatacgctggacaccataactcttacccagtagtccaacaccttatagccagtcactaagggttctctctggaaagcagtcagaattcctgctgacttcatatcagcccactccttgtccccttcagtctttaaaaacttgcttgtaataaggctgaatgaagcactcccagggcaacttggtgtgtcctgggcagctctctcagccttggcccagacaaactctctatatgaactgtggttcagtttgtttctttaggttgacatccacattaggggagcagtgttgctgggctggggaagctggttcaggtcagacgttgcaccaagggttggagaaggggccttcctgcatcagcacccggacaaggcagaggagcaggtgtccaaacccaggcctggcctgctcctgctgtggctcacagcccccaccccacctggcagaccccggagctggcgacagtgttgcccagctggccacagacatatcatcacgtggggctgccctatatcctcccagtctccacacagacactcttcatggactgggggactgagggcagggacactggtgaaacaggcaggcgtcttcacccagctaatcatcccactcaccacctccgggggaggtgacagtgaccaagcccagccccagctggctcctggtcactcactacagactcagctcccacaatctcgagtcccacctccagctcctgccattctgagggacctggaggccagggtgcccggcgcatgaccagctctgggttgtggaccgccctccacggcagtggcctgagcgcttgtcattattcactttattcatgcctggtttctgtctggaagggaccacaaggacatggcgtgcaggggagccaatcctgccagggactgaggaaacagatcctggagaaaaccagacactttgctggcacttcagggggaccccagttggttggctcaacgccccctcttccccatagccaattactaaccaatgttctctctggaaaccagtcataattcctaacctggtcaaagcagggtcatctcacacagcccagccacccagcaggcagctaaagagtgcctgatgaaatgcaagtctgatcgtgtctgcgtccccaagcccttccgtgccccctgctgctctatggacaagcccccagcagcctctgtaatgcacagcacccgcccttgtctcctgtgctggcttccgcagcctggccacactggtcctctcgcccacccacctgacctgactctggcagggcctttgcaggagccattcctccacccgagcccctcctattaaagcctgttcctagacggttcagccccagccaccagaagccccccagccccggcccagcagctggcctgtggagcggggagagcgcagtctgggctcacgggctgggggccacggaggcccagatggggactctggctccgactgtcctgacccagaggctctagggcggtcctgtctgtctcaccccgggggcggggaggacgcagacagaccccagcgccactgctcggccgcggatggtgccttagacccaggtcctgtgggctctggcccgagacccctgcctctggggaggccggtgaccgggacagtccacctcgcaggcgcgccggcgcggagcccggacctcggcccgcaatgactcagcaagggccggtgggattctccgtggtcctgcgatatccagacggcggagtctcgcctttaatgtcgcgcggggagcaggcaggtgcgagcctgggctgagcaaaaccctccttggagtctccgcagaggagcggggcgcgcctcctgaataagcaggcggcggggcgcggggcagggcggggcaggcggccaggccctctcgggactgtcgtaaaagggggcggagcgcgccgcgcgtgggacaatcgtaaaaggggcgggacgcgccgcgctcgggatgtcgtgaagctgggggagctcgtcgccgccgccggcggctagcgggcgtccgcgccatggagcgctacgcggccgccttggaggaggtggcggacggtgcccggcagcaggagcgacactaccagttgctgtcggcgctacagagcctggtgaaggagt

SEQ ID NO: 27858 - DNA, 2300 bp, Homo sapien
tagatgatatatcatctataagatatagatgatatatcatctataagatatagatgatatatcatctataagatatagatgatatatcatctataagatatagatgatatatcatacctgatataggtgatatatcatatatgatatagatgataaatcatatatgatatagatgatatatatcatatatgatatagatgatatatatcatatatgatatatcatatattatataataaatgatatatattatatataataaaagctatatattacataataaatgatatatattatgtaaaatatatgatatatattatatattatatctgatatatattatatattatatattatatattttatctgatatatattatatttgatatattatatattatattatatataattatattatattatattatattatatatattttatattatattatatataattatattatattatattatatattatatataatttatgatatatataatgtattatatataatttatgatatatattatatattataaatcatatatcatatatattatgctatattatatataatatagcataatatatcatatattatataatatataatataatataatataatataatgtaatcatatataatatataatatattatattataaaatatattatattatgatatactatatattacatattacattagataatattttatataatatataatatatattatatattatactttattatattacatatataattatacattatatttcatatataatttataattatatataattatatattatattatataatattatgtataatatattattaaatataatattatatattatattaaatataatattatatattatattaaatataatattatatattatattaaatataatattatatataaggatgcaggatgtaaaaggaaattatatatatgttatatattatatatattatattatatataattatatatatatttgggggtgccctatttcctatctcataacttattttaagaagcacagcataataatgtgtggacttgggattcagtttttgaaacgacacactgagccttccatgaccttcctgtacatgtgaaagcacacctgtctgcatggcagcatttggacctcacagtgtggattgtgccttcaccctggaatgtttatgccctatcgccatggtgatgtgattagggatctgctgcccttggtcctaagtgccactatctgtgctgagtttttcaaaggtcagagcagattgaacctttgtggttccattttccctgattttgatttttcttatggggaacctgtgtggctgcattcaaggtatgttcatactggcctgtcaaatgcgatcttttcaaattactagttaatgctttcaaaatatgttatttaaaaaattagcctctgtattttccatatgcagttataaatatgtttcatggttaggttttattcctcaatttatatatttgattcttataccaagcagagtacctttgaaatttttcttcatttaaaaaatatgtatcttggctcaagcctgtaatcccagcactttgggaggccaaggcaagaggatcacaaggtgaggagatcaagaccatcctggccaatacggtgaaaccctgtctctactaaaaatacaaaaaattagccaggcatgatggcagctggtgtagtcccagtgtgaattgggattcagtttattcccaaattcccaaaatatatatatatatataatatatattatattatatataattttatatataatatatattatattatatataattttatatatatatatttgtcggtgccctatttcccatctcataacttattttaagaagccagcataataatgtgtgggcttgggattcagtttttgaaacaaaacactgagcctttgatgaccttcctgtacttgtaaaagcccacctgtctgcatggcagcagttggacctcacagtgtggattgtgccttcaccctggaatgtttatgccctatcgccatggtgatgggattagggatctcctgcccttggtcctaagtgccactatctgtgctgagtttttcaaaggtcagagcagattgaaccattgtggtttcattttccctgattttgatttttcttatggggaacctgtcttgctgcattcaaggtatgttcatactggcctgtcaaatgcgatcttttcaaattactagttaatgctttcaa

SEQ ID NO: 27859 - DNA, 2300 bp, Homo sapien
cggatcacggggtcagtagatcgagaccaaaacttttagtagagacatggttgcactgtgttgcctaggctggtctcagactccagggctcaagcaattcacctgtctcagcctcccagagtgctgggattacaggtgtgagccactgtgcctggctgtaagaaactatctgatgaaaaggaccaggtggctttaagcaatggtaacaaaatgttaacttaaataataaaatctgggccaggtgtggtgactcacccctgaaatccccacattttgggaggctgaggcaggcagatcgcttgagcccaggagtttcagaccagcctgagcaacatggcaaaacttcatctctacaaaaaataaaaaaataaaaacataaaaagctgggcatggtggtgtgtgcctgtggtcccagctactagggaggctaaagtgggaggattacttagcccaggaagccaaggctgcagtgagccgtgaacataccactgtactctagcctgggtgatacagtgagaccctgtctcaaaaataaaaataaaaataaaatctggttgggcatggttgctcacaactgtaatcccaacactttgggagtctgaggtgggaggactgcttgaacccaagagttcaagaccagcctaggcaatatagtgagacctctacaaaaaaaaaaaaaaaaaatttaaattagccaggtgtggtgcggcattcctatagtcccagctactcaagaggttgaggcaggaagattgcttgagcccaggagtgtgaggctgaagtgagccgtgatcgtgccactgcactccagcctgggcaatgaatcatgaccgtgtcttaaaaagaaataggggctggatgcggtggctcactcctgtaatcccagcactttgggaggccgaggtgggtggatcccgaggtcaggagttcaagaccagcctggccaacacagtgaaaccctgtctctattaaaaatacaaaaattagccaggcgtggtggtgggcgcctatagtcccagctacttgggaggccgaggcaggagaatcgcttgaacccaggaggcagaggttgtagtgagccgggatcgtgccactgcactccagcctgggcaacaggttttcctaccttgtggggaggtgagaggtcagggtgagtgctgggtttgaggctcagctgtgctgtgtgaagattgagaggagcccacctcatcacatggacagaacgcacaggcttcttctctttctcccacccaggccatcatctcttgcctggttgatacccacagcctcccctttgggctttatccttatccccgtcatagctgccagagggaccctgtgaaaacactccccagcctgctcattcctctgtcctaagcctgcatggcacagagcaaaagccagttgttatgggacctaggaggtcttgtgggatgggccccagcctgcatcttcatcctcttctccccaccctactccattcactctctgcctatcgctcaccagcctatgccacctgcctcagggcctttgcactgaccatttaggccactttccaggctcttttcacacgttgcctcctctgagaagccctccctgaccactctgcccatacctcatgcctcttgattccccttacctggcctgtggtttcagcactttccctgtgtgtgtttgtttttcttggcatgagggcaggacctaagtgtctgttccctgttgattccccagtgccaggcatgcagtgcaaattgtagaaatattttttgcatgaaagaatgagtgattgaatgcggcaagggtctggaggctgaggaccaggcagacagacattcagagttgctggaacgcgacagagacagggagtcagactggtcatgcaaggtcttgggcctgcccttgggtcctggggagccacggaaggttgtgggtgccagagggttgcggtcagagtcacagtcaagggccttctgagacctgtgccccctccccaccctccctccccacctcctcaggccagctctggggtctcagcaggtggtccgcaacatgacctctgagttcttcgctgcccagctccggtcccagatctctgaccacaccactcacccgatctcctactacaagcccgagttctacacgccggatgacgggggcactgctcacctgtctgtcgtcgcagaggacggcagtgctgtgtccgccaccagcaccatcaacctctagtaggggctgctgggccgcctgggtgggaaagggccaggggcgggtggcccagggactgcccacttatccagtaa

SEQ ID NO: 27860 - DNA, 2300 bp, Homo sapien
ctggagtgcggtggcacgatctcggctcactgcaacctccgcctcctggttttatgcgattctcctgcctcagcctcctgagtagctgggattataggccaccatgcccagctaattttttgtatttttagtagaggtggggttttaccatgttggccaggctggtctcaaactccagacctcaggtgatccacccaccttggcctcccaaagtgctgggattacaggtgtgaaccactgtgcttggcctttactactacatttttttttttttttgagatggagcctccctctgtcaccaggctggagtgcagtggtgcaatctcggctcactgtaacctctgcctctcgggttcgattcccctgcctcggcctcccgagtagctgggactacaggcaagcaccaccatacccggctaacttttttttttgtatttttagtaaagacaagatttcaccatcttggccaagctggtcttgaactcctgatctcatgatccacccgcctcggcctcccaaagtgctgggattacaggcgtgagccaccgtgcccggccgtctactacttcttaaagggtgagaggcggaaggatcacttgagccctgaagtgtgcgactgcagttagcttttatcgtaccactgcactccagccagggtgacagcaggaccctgactctaaaaaaaaaaaaaaaaagcaaaaaaaagcatatactattaatacttcctccttactataatgtttactgtggcctttatcagactagagagtgcttttatctctcccttttgttagagcttttagaattatcaatagatggtcaggtgaggtggctcaggcctgtaatcccagcactttgggaggccgaggtgggtggatcacgaggtcaggagttgaagaccagcttggccaagatggtgaaaccctgtctctactaaaaatacaaaaaaattagctgggcgtggtggcgagtgcctgtaatgccagctactctggaggctggggcagagaattgcttgaacccagtaggcggaggttgcagtgagccaagattgtgccactgcactccagcctgggcaacagaatgagactctgtctcagaaaaaaaaaaaattattaatagatggtgaccctcatcttcatgttttctgcatctattgaagtgcgccattgagatcgtggagttcttccctgtttgtccatatggtgaacaacactgattttctgatgttgaacaatctctggaataaactctgtttggtttccatggatttctgtttccctttagattttgttagtaatgtattttggatttttgcatccaagttcataattgtaactggacaaataaaggcagattttaaaaggacaagttgggaggctaaggcggaaggatcacttgagcctgggagattgaagctgcagctagcctcgattgctccactgtactccagcctggtgacagcaggacctgcctctaaaataataatacttaaaaggacgagtttacctacagtctcaccaagcaatgaaagagcttatcttcctcctgtttcctttacggatcttgctcatgtattttatcttagttactttagcataaatgctaaatcaaattctttttcactagacatcatcatagctctaggcataccacataatacccaagcacattttaatcattaaaattgtttcctttttttgtggctactgtaaccacttcagcgaaccatttagtgtgtagtgggtttaaattattttttctcctttctgggataaatttcccaggagaaggataattgggtcaaaagctacgaacatatttatgggttcttttccacaagagatcgatcagtttgcaagtgccatctgcagtgtgggggaaccaatcttcaacttgcctgcatttggtattagtattttattaacctttcattgatccaattacggctctttgacacaattttcatcagtgatggactaagtgtgatccggcctgacccgcctccggccggcgtgagaaggggcatgtgtcgggctacgctcgggcttcccctgccgcccattgtgatccagcccgctaggcgctccctgccgcccattgtgacgcctgccagccgcaggctgggtccccgaggcgggcggcatttaggctcggtctccacagccatggccgcgacgcaggagctgctgctgcagttgcagaaggataaccgagatggtcgccagcggaagcaggagctagagaagctgatgcgcgggctcgaggccgagagcgagagcctcaaccagcgcctgcag

SEQ ID NO: 27861 - DNA, 2300 bp, Homo sapien
ttttatcgtaccactgcactccagccagggtgacagcaggaccctgactctaaaaaaaaaaaaaaaaagcaaaaaaaagcatatactattaatacttcctccttactataatgtttactgtggcctttatcagactagagagtgcttttatctctcccttttgttagagcttttagaattatcaatagatggtcaggtgaggtggctcaggcctgtaatcccagcactttgggaggccgaggtgggtggatcacgaggtcaggagttgaagaccagcttggccaagatggtgaaaccctgtctctactaaaaatacaaaaaaattagctgggcgtggtggcgagtgcctgtaatgccagctactctggaggctggggcagagaattgcttgaacccagtaggcggaggttgcagtgagccaagattgtgccactgcactccagcctgggcaacagaatgagactctgtctcagaaaaaaaaaaaattattaatagatggtgaccctcatcttcatgttttctgcatctattgaagtgcgccattgagatcgtggagttcttccctgtttgtccatatggtgaacaacactgattttctgatgttgaacaatctctggaataaactctgtttggtttccatggatttctgtttccctttagattttgttagtaatgtattttggatttttgcatccaagttcataattgtaactggacaaataaaggcagattttaaaaggacaagttgggaggctaaggcggaaggatcacttgagcctgggagattgaagctgcagctagcctcgattgctccactgtactccagcctggtgacagcaggacctgcctctaaaataataatacttaaaaggacgagtttacctacagtctcaccaagcaatgaaagagcttatcttcctcctgtttcctttacggatcttgctcatgtattttatcttagttactttagcataaatgctaaatcaaattctttttcactagacatcatcatagctctaggcataccacataatacccaagcacattttaatcattaaaattgtttcctttttttgtggctactgtaaccacttcagcgaaccatttagtgtgtagtgggtttaaattattttttctcctttctgggataaatttcccaggagaaggataattgggtcaaaagctacgaacatatttatgggttcttttccacaagagatcgatcagtttgcaagtgccatctgcagtgtgggggaaccaatcttcaacttgcctgcatttggtattagtattttattaacctttcattgatccaattacggctctttgacacaattttcatcagtgatggactaagtgtgatccggcctgacccgcctccggccggcgtgagaaggggcatgtgtcgggctacgctcgggcttcccctgccgcccattgtgatccagcccgctaggcgctccctgccgcccattgtgacgcctgccagccgcaggctgggtccccgaggcgggcggcatttaggctcggtctccacagccatggccgcgacgcaggagctgctgctgcagttgcagaaggataaccgagatggtcgccagcggaagcaggagctagagaagctgatgcgcgggctcgaggccgagagcgagagcctcaaccagcgcctgcaggacctgagcgagcgggagcggaggtgcgcggggaacgccgctcttctacctggcgggcgcgcgagggtcggtcccgcaggcagcgccgcgaggtgcttcgcagagtaccaggctgatccgcccgggcccgcatctctgctctaggcccttgggaacgggtgatccacccagcggacccaggtgggggactcggccaggacttcccagtcctcaatcatgagcctgcggctggtccttcctggcgactgcgggatcctgagcgacccagtccgccttgtagcgccaacctcagtttccctctgcagcctgctgcggaggcgaagccaggcagcgcagcctctgcaaggggaggcgcgcgaggcggcgcgggagcgcgcggagcgggtgcgcagaagactggaggaggcggagcgccacaaggaggacttggtgaggaagagtcctagaatggggctggacccagggtggggtgaggcagggcgggcggaagggggcgggatccgggggtggggtgaggtaggaccggcggagaggtcggcaccgccccaggaccccgtccgcaggagcagcacagcaggcagctgcaggagcagtgggaggagctgtcgagtcaggtacgtgcaggag

SEQ ID NO: 27862 - DNA, 2300 bp, Homo sapien
cactcccatctccgcctccctcttcacatgatgatctcccttgaaggacatcagtcattggattagggactgtcctaatccactgtgaccttgtcttaacctaattacatctgcaaagaccctgtttccaaataaggacacattctaaggtttggggtgaacatgaattttagggagacactcttcaacccagtacagacggtgtggccagctgtggagagggggctgccaccccttgcagggacctgcctcccatggccatgtctgcacactggccccgagccctcccaggaccccagtgtacagacacattcctcctgccccccagctcacagcacccaacactgactcaggcacacctgggtcttcactgcagatgaaatggggctctgtttttagttccatttaagcctaaatgttcttagactccaaccctggattccacctgctgttccaaggctttccttgggccctgctgggctcctccttggcctccttggggttttgaagaagtgatccccaagattgctggggttcctttcaggcatgtgagaggactcatccctggccccctcagagggcttctcactgcctacaggctaacagtggcctctctccctgcgggcaggtctgcggtgccgctcagactctgaggatgagtgcagcacgcaggaggccgacggccagaagatctcctggcaggcagccatcttcaaactgggagacgactgccggcaggtaagcagggtcaggcctcaagtaggcttggggactgggcttgctgctccccaaggctccaggcccaccagagtccaatctcatatgcagaaatgtgaatcttttccttctcttacatggttcaggtgccacggggtaaattagggcttctgcaaaacccagaggcctctccttccagcccctttcccactgtccctgccatgccagtgcccacctgagggaactgtccaggggttgggtgccttatctcacacaccccaccagacagctcagcctcatgctcagcccagggcctggtggtcccagcagcctgagtccagcccccggtggtcagaaaggaaggccttccagactcttgctcggctgtggtctccccacctcactccatctctgggttctcggcttttgccctgcatgagccagaagagctactggggtgcaaggacgccaactgaccgcatcctgcgcctcccggcttcccaggacatgctggccctgcagatcatcgacctcttcaagaacatcttccagctggtcggcctggacctctttgtttttccctaccgcgtggtggccactgcccctggggtaagttccctgagtggagccagtagggcagccctgggcacctcgcacccggcgggcctcagaactggcctttcctcctagtgcggggtgatcgagtgcatccccgactgcacctcccgggaccagctgggccgccagacagactttggcatgtacgactacttcacacgccagtacggggatgagtccactctggccttccagcaggtagccagggtggccacaggccggggaaagtcgtgtgcgctccaccctaccccagccacccatacccagcctctacccacaccctgctctcctcagtcatcctttgttaagggttaaaaccagggcacctgggctgggcacggtggctcacgcctgtaatcctagcactttgggaggccgaggcgggcagatcacgaggtcaagagatcaaaaccatcctggccaaaatggtgaacgctgtctctactaaaaatacaaaaattagctgggcatagtggcacgcgcctgcagtcccagctactcaggaagctgaggcaggagaatcgcttgaacccaggaggcagaggttgctgtgagccgagattgcaccactgcactccagcctgggcaacagagtgagactccatctgaaaaaaaaaaaaaaaaaaaaaaccagggcacctggccgggcgcagtgctcacgcctgtaatgccagcactttgggaggccaaggcgggcagatcatgaggtcaagagatcgagaccatcccgaccaacatggtgaaaccccatctctactaaaagtaaaaaaattaactgggcatggtggtgggcacctgtagtcccagctactcgggaggctgaggcaggagaatctcttgaacccaggaggcagaggttgcagtgagccaagatcatgccactgcactccagcctggcgacagagcgagactccatttaaaaaaaaaaacaccagggcatctgtaagccactttgggagtcaaaa

SEQ ID NO: 27863 - DNA, 2300 bp, Homo sapien
tagatgccagcgaggtccttctctctgctcagacatctttgactccctcttatgcacatcccactgatgactctcagcacatcccatcaccttcacctttgaggtttatccaggatctgacaagtcccagcatcccagctgctgccccctggcctggcctcctgctccccaaccccaggcatcttccccttctccacatgcggttggcgcaagccaggggggaatcagagcccccctacagactcgaaggtgggcttgtttctgtgacctgcaagcccccttcccacctgacttccatcctctctcttcccctcgcttgctgtgctgtggccatgctggggtcctgcttgcacttcccacggatgattctcagcacatcccatcagtttcacttttgaagctgccctcctgggctgctcccaccataggccgcgtcatgcattccctcttctcagatggccgtgccttgcgcctcactcctgcgtctcctccagggctcatctcagatgtcccctccttgccagggctctccctggccacctggccacacgctcactcgcactgctgtttcttagtgtttctcagtgtgtgtagcttatttcttgttgtctgtggtccccaccatagactgtgtggtcatgtttgtcttcattcagagcaccatgcccagagtccacgaggccctggcacagaggcagccaccaggatgtggttgtttaacaaatagatgggagtgtgtctcttcgatggcttcttgtccgtggcagttctggggtcccccccaccgccatttttttgctcccttgtctgcttccataagactaatcggtctgcaggaaacacaaagcaggctgtagtgcctcgtcccccaggagtcctcaccccatgggcagcttagagggaagcagcagacagagccccgccccaggctcctgtcggctcctggccatcctgggcttatgtggcctttgtctccaccctcacagcctccagatggcttctgtgcctcccagcaggaaggaagacaaggacagagtgcaaagggcagaggccagctgccttgaccttatgaagctcaccctggcatgtgttcccagggccttgcccagttcactctccctggctcattagagtggccggggagaacagtggccgcctcagccagcagggaccctggctgagagccctgtgactggccacgtggccaccctgatccacctcatgaggaagaagggaggggatgggtactggggagggagccgcggtgtgtgttctactcactaggcctcgttgccacctctgcacaggcgcttggagcccttgtagaagctggtgctgctgggacaacagagggatagaatcctctttggccagatgccaaatgctgtttgttggtctccttgtaaaaacacccagaaatcatgggggctttccatgtgtgagctgcacctcttactctctgcagcacccaggtgtctcccgggcaccatgctgctccctctgggcacccctcatgcccccccacggaatggggacctggctgagcatgactgggccatgggagcagcctgaccctgggctcccaggcctggccatggtggctgcaggctcgcctcggctccatgggccttcctaatctggttagcgggatgaaggtatcgggtagggtctgtgtggggtggagaggaggagccaggccctggatccagaaccctcttctgcccttgccagctcagcagcccacagaggggtcttcccgctcacagccacagagggttatcagggttatagagaagagtcacctacccagtgcctgtcagggcatcaggtacatcccgggtgctgccacctcacacctgcaatgtccacacggtgaaccgggttgaacagaatgcagcctcgagaggctggagaaaatacaccaagcactgacacagatgaccctgggatgtgggactataggcgatcttcatttttttcttcatacttttcttggtttctaaatcttattcagtgagcacgtgttcctttttttaattagagaaaacttgacagtagcccctttttgtgtttcacagaggagctaacattccttctgtacctgtagttcatgcgggagatggcaggggctggcacatgacagtggagcagaaatttggcctgttttctgctgagataaaggaagcagaccccctggctgcctcggaagcaagtcaacccaaaccctgtccccccgaagtgaccccccactacatctggatcgacgtacgtgcctgttccccgaccaaggctgtggggtg

SEQ ID NO: 27864 - DNA, 2300 bp, Homo sapien
cgtttcctggcggcagctgcccaaggctttggtgggccggtattgaaagcccaggcctgcagcttgggtgagcccttaggcagtgaaacctctggagagggaaggccatgtggtcaggccaggcgggctagggggctgggccctctgggcagggaggcggtgagagcagatcaggaagggaaggaacgggggagccaaaagcggttgagactggttcttataaatagcccttgcacaagtggctccaattttgaccttttgttatgtaaatgtggccagcttgggaagggccctgcccaggcctcctgctaccacacccgcaggccaagaattgtgtgtctgccaccagcgccccctggcctaggtggcccctgggtgtccttaatgtcctgtgttagaggggcaggtattgcacccaccgaactccctagacctgttcgctggtccttactcttcctggctgtcagatccaactaccaggctctgtggtcacagtctcctgctgggctgcccctggtgccccagccagagacccccaggtgcgtcccttcatcgcccttccctcccttcttcgctgatggctgtctgggtgactgtgttcgtcttctcttccccaggtgaccaggcattgatgcacccccaggaaggccacgggctcaggaggcccccccgccccgctggctgctgctcacatggtgtctgggcccttggcactctggtgaggcgcaggggaggggggaccgccactggcccctttccccggagtttctgggtggcacacagccccacagctcggcctctatctgtctgacccgtggtcctttgtgtgcacacagcactgggcagtgtggagggagcctggaggccactgccctcttccagtccccttgccagtctcggggtaccaggtgtctgggtgctggcagagccggcactgatgttttctggggtcaccagaaagccctggtttcaccacaaattgtgactgtcaggacacagtgctgctatggtcaggattcctttccatatgctgcttcagcctcagacctcggtgggccttaagagtaggggctgctcagccaggcgcagtggctcacgcctgtaatcccagcactttgggaggcagaggcgggtgggtcacctgaggtcgggagatcgagaccagcctgaccaatatggagaaaccctgtctctactaaatatacaaaattagccgggtgtggtggcatgtgcctgtaatcccagctacttaggaggctgaggcaggagaatcgcttgaacccaggaggcggaggttgcggtgagccaagatcgcaccattgcactccagcctgggcagcaagagcgaaactccgtctcaaaaaaaaaagaaaaagagtaggggctgtagccgttcccatttcacagggcactgggggtgctcctgaccacgtgtcagccctcacattgtacctggggctctggagcccagatctgtctctctcctctccacttccttagtccaggtgcccttgaacctctggcctctctgtctggtcctcagataggagtgggtcctcagataggagtgggttggttgacccctgggggcagggcagttggagtacagatatcactagcaggtcccagatggtaggaggacagatcagctcagggaaagctgctcacagcctccttcagagttctgggtcttgaaagcagctgttttgggagcctaactgcttttcccagggacttaaggcctttgtaatttttgtagccctttcatcctccagaataaagggaccttcttgagctcagggccttctcagtactggcatgccccagggctcctcctccctgcctggctactctggccagctccactgcttacccagcccagtcactcctagtccaggtggatcccttcagtggcttggcccacggcctgcatggtgaactgattagcagccccaactaatgggtccgacctcagctccagacaccgctgcactggtcgcccatccgccatcactgttgatgccagggtggttcttcccttcactgttgatgccagtggggcccctccctttactgtagatgccagtgtggcccctccctttactgtagatgtgagcgaggtccctcccgtcactgtagatgccagctaggtccctccctttactgtagatgccagcgtgacccttcccttcactatagatgccagcgaggtccctccattcactgtagatgccagcgaggtccctcccttcactgtagatgccagcgaggtccttctctctgctcagacatctttgact

SEQ ID NO: 27865 - DNA, 2300 bp, Homo sapien
ctcaatctcccaaagtgctcagattaaaggcatgaaccaccacacccgactttcctttcttttgagacttctgcacagagcaggctcagcttccttagtatacttagccattgaactctaagaagttatttacaaaggtgtaaataggccgggcgtggtggctcacccctgtaatcccagcactttgggaggccgaggcaggcggatcacttgaggtcaggagtttgagaccagcctggccaagatggtgaaaccctgtctctaccacaaaaatcagctgggtgtggtgatgggtgcctgtaatccccagctactcgggaggctgaggcaggacaatcgcttgaacccgggcagcagaggtcgcagtgagccgagattgtgccactgcactccagcctgggcgacagaggaatactcaaaaaaaaaaaaaaacaaaggtaaattacacgtatatatgtgtgtgcacaaatcttaaagaatagataagtagtggtaaacccactattggttgaatcgtgggtgtcccactaagcgtgacaccgttgttccctcatggccacataagaaatagcctcccaagttcctgggacaccccatgcacttctccctggcttattcccacttccctctagaagccaacagtcttctgaattgcgggtcagccattcgctggcttttgtcggtttcccacctttgtctggatcctgaaactgcgaatgattttggctcagttcgctgggagccgggtgtcctgcactcttgggacaccaggagcagcagttcctgcgttcccattctccatttcagtgtccaaggtggcgccatccacacataatcacctgtcctgctggcagtgagcatttgggtgggtttctgggttttgtttttgctgctttctaagtagctgacttttcacccccaagctatgcttcttgaggcagagaagtgccagtttattttgttttctgtctctaaatccagttccttaatgcaccactgagactcagtttagaagtacagtgaaactttgtgagcatttttctccctgagtttgaatggatccctctctcattctttgagttcttgggcacttgtctcttagacactttcaagttacctactggacaggagagacctcttctctataaagtatcacacttggaggcttttcaggcacaggaccatagattgtaatattttccatagcagttgcccaattttatctgtaaaaattgctttttaaggcctggcacagtggctcacacctgtaatcccaacattttggaaggctgaggcaggaggatcacttgagcccaggagtttgaggccagtctggaaaacatagtgagacctcatctctacaaaaaattttaaaaattggttgggcatcgtggcatgcacctttagttccagctactcaaaaggctgagacgggaggatcccttgagcccataaattagagctatgatcgcgccactgcactccagcctgggccacagagcaagaccctgtctccaaacaatcacaaaacttccaatggatgccgaatgtataactttttcttttttttttctttcttggagtaaaataacttgatccttgatctttggctgtagctcctgagccatttgaggcactggggggtttgtgtgttgattacctatgaaggagcaagtgggctgtttccttctcccagcggcttcctttgaccccaaatccctgagagtctcgcccattttcttcttggcttcctccctttgatatgcccagctggctcctgccctacctggctgccaccaggacctgctggaggcggttgctgggaattatttggtgtcctgtttgaaccttgcttgccgtgctcccagatttcctgtttctcctgggcttgcctttcaggatttgcagaaccccttctcctttagaagtgtcaactggggctgggtgtggtggctcacgcctataatcccagcacttttgggaggccgaggcgggcggatcacctgaggtcgggagttccaggccagcctgaccaacatggagaaaccccgtctctactaaaaatacaaaattagccaggtatggtggtgcacacttggaatcccagctactcgggaggctgaggcaggacagtcgcttgaacccgggaggcggaggttgcggtgagccgagattgcaccatggcactctagcctgggcaacaagaggaaaactctgtctcaaaaaaaaaaaaaaaaaaagtcaattggaccttaggacaacttaaaaacattatcaggtttttatcttttagatagcag

SEQ ID NO: 27866 - DNA, 2300 bp, Homo sapien
gcacccctagtcttttctagtaggagttgccaagcacatctggaaagctgtgttccccgaccccccactcccccaacagcaggaggggtgtaacccagggaagccacccctctgacatatgtgctggggggaggggcagagccttgcccctaggaatcctgtggcggtgggttgttgactgatgtgggattgctgtgtctcttgtgctgtcggagagctggcaggtagtggaggggccttgggagctcctaggctgaacttggggctgtcctccaaggatccaggatggagggatggagctgggtcactcaaacctaaggcctttctgggtctagcatttattgcttcctggcttctggcttggcttcttttcgtccattctcatctgccagtgtctggactccctgggccttcaggcaggcattttcaggagcacaggccatgtggttggtctggagccctgtgtcaaggagagtgtgcgtgcttggtggagcagggttgctggagtagtgtgaaaaaaagcagatgagctggcctctggagacaaagctgtgtggcaagactgctggtttagtgggctctgaacaccaagaacagggccgggagtctgatacttgggggctgaactgagtcctgtggcccaggattgttgcctggaagtgaacgttccgtcttgtgccattgagactgtgaagatctctgggtcccacaggacgagcagtagacttggaaggctgggaagaggctccccagctgcctgccttgggaggtcagagctctcaggtgggtcggcaggccagtgtcgggctgggggagggaggttgtagtagagtgcctgtggcccagcttctctggtcagttggctctgagtgctgctgtgtgcccagcaacctctccctgcggtgtttttctgccagttgttggaacttgtagattagtcactgagtttttacgaccgattcctgaaaagaaaaatctccctctggttgctgcctctgtgtagaggaagaagcagcccgagggagtcaggcctttaattaaagcaaaaccgaaatgattgtcgaagttgctggaaggagaagagaaggcgcaggtggggcaggggtgatgagtcctgttgtgctgcatgatacctgctctggggacaggtaggcacgatcccatcctcgatccttggtcttggccagcagcccagccttctccacaagctgcagtcgcggattaatcctcacgtagtgttttctttccgtagatcagatttctcattttgttaataagcgcagcctcccatccacttgaagtcagctgttgtggacgaggagcaacagggttttgcattattgagctgatagcctgccgcctcccctcaagtccttattgtttgcggggtcagatctgaggggtggggaagtgccatttaatcagcagccagcccctggagaagagctggcggggcagttctggagagtgagagccgtgaggaaggaataaagttcagtttacccaggggacttgtggttccaaccttattgcttggtctgttggcctggagcagtcagccccaccccataccttgtcctgcccgctgcccccagtacctgatccctgggagagtggggcacttcttctgggctgctcttgctggcctgggaggcagctttcaccgcgggaagaaagaacacattgggttcctcccttcttgtctcctccgagcctggcctaggacggacccctgtggggcagtgagaggggaactggacttggtcggtcgcaaagtctgtagtgcattgctggctctgccatttactcccgtcatgaccttgagcagtgattgactctcctgcctcgtttctacaatgggaacagaactggagtttacattcatgtatcgctgttttctggagctcagcctagggaaggcagacactcaacaaatgattataagatggggtgataagggctggcatctagcggagcgcagagggcatagcggtggcgtgggaggagccggccgtgggctggctgagaaccctggatgccatgtgggttggggttggcctggaggggaggggttttaaccaggaagtgactgctactgggttttaaaaggcagtggtagggtagagggtggcagtggagacagctggagagcactgaggacgcggacccacgggtactgtgtgagctgtgaagcccgcttgggagaccccactgccagccaggcatgtatgcggctctttttcaagctttttattcattccgccacattttctgagcgcaaagtcagtgcctggccccct

SEQ ID NO: 27867 - DNA, 2300 bp, Homo sapien
ccagaacagaatcctggaatactggtctgagagggtataattattttaaaatatttttggggccaggtgcgttggcttatgcctgtaatcccagcactttggaaggcaggaggatcacttgatcccaggagtttgaggctacactccagcctgggcaacagagtgagactccgagtctccaaaaaacaaaaaaagacaaaagaaccccaaaaaaacaacttttggctcataccgccaaactcatgtccaggaattttgaggtgatttatgtgcttccaaaagtatatgagagtgattacctatcagaccttgtgtttgaaggttatcacttgaaactgatttttaatttgtttaggagaaaacccagcttcttatagttttattttatttatttatttatttttttgagacggagtctcgctgtcgcgcaggttggagtgcagtggcacgatctcggctcactgcaggctccgccccccggggttcacgccattctcctgcctcagcctcccgagtagctgggactacaagcgcccgccacctcgcctggctaattttttgtatttttagtacagacggggtgtcaccgtgttagccaggatggtctcgatctcctgacctcgtgatccgcccgccttggcctcccaaagtgctgggattacaggcgtgagccaccgcgcccggcctatagttttaatttatatgtcttgggttagtagaatggttgactttttttttcagtcgttccttcaaatagtgagtcctctgctaggctctatttgtggaatattcttgttcttcttcagggatgtttgatagctcttttttttccacagatgtttgatatttcctttttcatctattgtgttcttaccatttctaggatgtttctaggctttctattctatttcctgttctgtaccacactgaaatgcctgcggtagctttacaatttgttttgatatctgttagggcaagtctaccctcatgcctgcttttgttcccaaggggggaaaaccatagctgttttcggctatttatttttccaggtgaacttagaattttgtgaagtctaagaaatgttgttaggatgacattaaacctatacatccattaggaaagaaaggttgcatcatcagcttggcgaagggttattgaaactggtttttgatcttgactggagctggggcacaacttccctgtaaggcagacctgggctcctcttggacttgggcgacctcgatagcggtgtgttcctttgtttggtgttcaaagtagagagaggtccattaactagctccctagagaagcagtggcggctcaggccagcccagcccctgggaaggctatctgcatggcggccgggagcccgggtcctggtgggccggctcgggcaggcgcttgacccctggggcctgcgaggggctgcggccaccggaaggggctggctgagcgcagcgtgctgggtcctccgcgccctcggagcaggtagggttcgcgggggtgcgcccgcgggggcccgaggggcgctggggtcacgggaggggcgccccttctcttttgcacccaaccagcccgggcttccccaggagcccagacccccgagcttgcagtcactgctggctgcgcctttgagcctcgggcaaccgcagggagcgtcgagcaggggtcgcaaaggggtcggggagggggcgcgtaggccgatagaggtccctaattcggggctcctaggggtcagggtagggctaaaagggggtaagtccaccagagtttgagggggtgggcgtcagcctgtcggggggggccagggtccctgtcccgggggccggtatgcggttcgggtatttcaggggcgaggtcgcggtcctgccctggcgcttgaggtcggagtccggttagatgtccggggtctgggtccccgtctcctcccgcgcaccccttccccacggcgccggaccccggcagcccgcccgcctagtgctgggaccgctgtccggcccggccccgcccccgaggccccgcccctgttcacaggccacgcccccagctgccccctgtccccgccccgccgctcgcccattcagatgtgggtcaggggtgagcgggcggcgccgacgtcacaagcttccaagatggcgctgggcgggcggctgtgagcggcgctcggggcgcgctaggcggggagccgagccgggctggcggcaggcggacggggcgggcgcgtgcggcgcgagccgggcgctgaggacaagggccgctggtagggccggccggccggcgggcggagcgccgccgccgac

SEQ ID NO: 27868 - DNA, 2300 bp, Homo sapien
aggagatcgagaccatctctactgaaaatacaaaaaaaattagccaggcatggtggcgggcacctgtagtcccagctacttgagaggctgaggcaggagaatggcgtgaactcaggaggcggagcttgcagtgagcagagattgcgccactgcattccagcctgggcgacagagcgagactccatctcaaaaaaaaaaaaaaaaaaaagaacatctggagccataattcccgatgttcttgttacttgacactgcctaaaggcatgttctgtgggttccggggaaactgatttgaaaaacttgagtgttgtaaaggagggccataagctgagtgaacacagcagttgtgagaggtcccaggtgcttcctggggacagggagacacgacagaccaagaagcaaaggggcctctgatgtgacttcaatatcaaggtcttgtcgggcacagtggctcatgcctgtaatcgcagcactttaagaggccgaggcgggtggatcacttgaggtcagaagttcaagaccatcctggccaacatactgaaaccctgtctctactaaaaagtacaaaaaattagctgggcatggtggctcaagcctgtaatcccagctacttgggaggctgaggcaggagaatctcttgaacgtggaaggtagaggttgcaatgagccaagattgcgccactgcactccagcctggcgacagagtggggccccatctcaaaaaaaaaaaaatcaatgtctcgatgcagactgccaggtatcaggtgtccatccatgtctcccaaaagccacttggcaccaggagcagacaggaagggcaaagaggagccagactgaagcagggcttcttagctcccaagccacacaggtggccaccagtcagagaggcagtgtgtgtgtgtgtgtgtgtgtgtgtgtgtatttcttcagttcagtgtgtgtatgtatgtttcttctgcagctcagtgtatgtgtgtattccttcagctcagtatgtgtgtgtgtgtatgtttcttctgcagctgtgtgtgtgtgtgtgtgtgtgtgtgtgtgtgtgtgtgtgtttcttctgcagctcaggatgcctccaacatttctgctgaagcctcaccctcactcctggcccatcctgaggcctctacctaagatgccaatgagtagcccagacactggggctccagtgtttgtcaccaggtggtacctggatgtgggaggtagacaggccagatggccagtttgggcagtgcccctcatgcctatctggccctgggtccctatgccaccttgctggggagggtcttttcgcttacacctcctctgagccgactctgcgcagtaacacaaatgtgtatcaggcacatcctttcctcaaaaggtggatgaccagttgggtgatcagggctgttagggggctgaagggtcctggggagtccaggtctagccaagttgaggcctatcctgctgcattttccagccacctgacccaaatacaccacctgaacccacgaccaggtatgcccacaccccatgggtggccttaacacacacaccctgcccctttctccaagtacaggagcagcagcccagacttccctcggggcaccgcggcctgcttgggactgcacagtgcctgggagggtgcctggggagggtcacaagggacttggtgctagaagcaggaaaagtgtagggaccggaaaagcccccgtgcatcctggaagggacatgggccagtttgagcaggggtgtgggagtccagccctggccttgccaggtggagaggcgcctgggccagacatccgcggcaggaggcgggggaacatgccaagaggcggaaggggcacgcggagacccccagggggcgccggaaggggcgcgccgggcggtcggcggcggccgttggcgagctgaggcctgccaggcgaagtctggagaccagccgggccgcggccgcaatggccaaggactcgcccagccccttgggcgcgtcgcccaagaagccgggctgctccagcccggcggcggcagtgctggagaaccagaggcgggagctggagaagctacgggcggagctggaggcggagcgggcaggctggcgggcggaacggcggcgcttcgctgcccgggagcgccagctgcgtgaggaggccgagcgggagcggcgacagctggctgaccgtctgcgctccaagtgggaggcacagcgcagccgggagttgcggcagctgcaagaggagatgcagcgggaacgcgaggccgagatccggcagctgctgcgctggaaggaggccgagcagcgg

SEQ ID NO: 27869 - DNA, 2300 bp, Homo sapien
gtttttagttttattgatgtgatgtatcacatttattgacttgcgtatgttaaaccatccctgcatccctagtatgaaacccacttgaatcatggtggattatctttttgatatgctgttggattcagttagcttggttgtagcatttcttattattccatctgtggaatgtattggttgaaataatgaaaacatgttctatcctcactgcttagcactttgtgtttctttaatagccttcccaacagggcaacataaaagcaggagccctgctagtctccccttaacccggaatccccccttctccacagctcgctcattggacaggatagactgggcgcccaggcttcaaggtaaggacgtgctctgtcacctagaggtgcagtgcttgggaaggccaaccttggagggttgcctgccagctttacagtgacagaggtgttgagagggactgaccaccagtgcagaaggctgtgctttgttggtgacataaaggattgtttcacagattgttggggagggacaatcccaaggcctcccctggccctggtgctggctctgcacaaaggcaataagagagggatgctggtaagggctgacctgttgctgtgctggggaggaaggtgctgggctgaaattcaggaggctgaggatgcagcagtcccataggaggtacatgaccttcaggatacattttcttcattgatgatcaatggaaatgagaaatcactgactattttttctatcattggaatctactctccactgctcatgctgttcctgtcttttggggaagatggaggatcaatcagtgtgcgctgcactgagtggaaggaaggagaactgtgacaaaaattaaggaaggatgagagacgggagggcccttcatccagctgcttgcagagtcctcctgaggaggaaagccccgtggctccctggcgaaggagcagtgagggctgcgtgactcccacagtgaagtgtgtggtatgtctgaggacacccaggctggtggtccatgaggagccagtggcagagtgagaagcagaaaggccaggagggtggctggaggccaggctctgagtcattctccatgtgatggaaacagccggagcccagtggacttggaggtacaggatgcggtggctgatgacagaacaatgtggagagaggcgtcatttgtcaaatccttactttgttctgggcattgtgctaaaaattctgatggctcatcccatttaggggctgaaagttgcagaggtttaggaagctcacccacgatactggagcccccatctcctgccctagtgctgtccaccttctcacccagccaccacctgtttcgggggaacacacagaagtggtaacctcttatggtgaggcaagtaaattctgctgtttttgttattcacagaaaaacactggctcgtgtgggttgggaaggtgaaataccagaagtatttcatctggttatttctacccatgcgactcctatagtattgaaatgcataggttagcatttttggccaatttactcagcattctgggttaaaggcttttatttattttatttatttatttatttatttatttttgagatggagtttcactcttgttgcccaagctggagtgcaatggtgcgatcctggttcattgcaacctccgcctcccaggttcaaactattctcctgtctcagcctcccaagtagctgagattataggcacatgccaccacactgggctaatttttttgtatttttagtagaaatgagatttcaccatgttggtcaggctggtttcgaactcctgacctcaggtgatctgccctcctcggcctcttaaagtgctgggattacaggtgtgagccaccacgcctgccctaaagtcttttaaaattcacttgtataagttgacttagttttctttaaccttgtagaaaaatacaaaaatagcaatctcttttatcacacaaataatgtctttttaatggagtgatttttttctaattgaggtattatgtacttttcatttactaattattgtttacatttgaagtgttttatgaattaatatttaattgcatagatgaagattactagttataggcattttactaaccaatactcattaagcatagcgtggattcctatgacatcaaggagctattttatttggtaaaacgaaaaagcacaagaatgaacgaacgcaagaactgaaacagtggagacacctagaatgacttgtctaagatctaaatcattttgttgtcttcccagcgtacttattatcctgatcattgtcat

SEQ ID NO: 27870 - DNA, 2300 bp, Homo sapien
atgtaatatatattatatattatatattattatcttgtatatataattatataattatatataattatatatattatatcatatgtaataattatatataattatatattatatcatatgtaataattatatctaattatatattatattatatgtaataattatatataattatatattatattatatgtaataattatatataatttatgtattatattatatgtaataaatacacataattatatatattttattatatataatattatatataattgtatattatattatatataataattatagattatattatagtaattatattttatattatttttaatattaattaatattaattaataataattaatttaaaatattaattattattttatatattatattatatattatattattttatattatatattatattatatataatattatatattatattataatgtatattatattatattatgttataatatataatatattataatatattattatattatattatatattacattatatacacttatatataatatattacattattatatatacttatatataatatatatataatattatatatacgtatatataatataatatattatatatacgtatatataatattatatatacgtatatataatataatatattatatatacgtatatataatatattatatatacgtatatataatatattatatatatgtttatataatatactatattatgtatacgtatatataatatattatgtatacttatatataatatagtatattatatatatttatatataatatatattatattatatagaattatatagaattacatattatattatataattatatatattcatatatattatattatatataataatacatattatattatacataatattatatataatataaggatgcaggatgtaaaaggaaattatatatatgttatatatattatatatattatattgtatataattatatatatatatatttgtgggtgccctatttcccatctcataacttattttaagaagccagcataataatgtgtgggcttgggattcagtttttgaaagaaaacactgagcctttgatgaccttcctgtacttgtaaaagccctcctgtctgcacggcagcagttggacctcacagtgtggattgtgccttcaccctggaatgtttatgccctatcgccatggtgatgggattagggatctcctgcccttgctcctaagtgccagtatctgtgctgagtttttcaaaggtcagagcagattgaaccattgtggtttcattttccctgattctgatttttcttatggggaacctgtgtggctgcattcaaggtatgttcatactggcctgtcaaatgcgatcttttcaaattactagttaatgctttcaaaatatgttatttaaaaaattagcctctgtattttccatatgcagttataaatatgtttcatgattatgttttattcctcaatttatatatttgattattgtaccaagcagagtaactttgaaatttttcttcatttaaaaaatatgtatcttgactcaggcctgtaatcccagcactttgggaggccaaggcaagaggatcacaaggagaggagatcaagaccatcctggccaatacagtgaaaccctgtctctactacaaatacaaacaattagccaggcatggtggcagctggtgtagtcccagtgtgaattgggattcagtttattcccaaattcccaaattatatatatatataatatattaaatatattatatatatactatatattatattatatataattatatatatatatatttgtgggtgccctacttcccatctcacaacttattttaagaagccagcataataatgtgtgggcttgggattcagtttttgaaacaaaacactgagcctttgatgaccttcctgtacttgtaaaagcccacctgtctgcatggcagcagttggacctcacagtgtggattgtgccttcaccctggaatgtttatgccctatcgccatggtgatgggattagggatctcctgcccttggtcgtaagtgccactacctgtgctgagtttttcaaaggtcagagcagattgaaccattgtggtttcattttccctgattttgatttttcttatggggaacctgtgtggctgcattcaaggtatgttcatactggcctgtcaaatgcgatcttttcaaattactagttaatgctttcaa

SEQ ID NO: 27871 - DNA, 2300 bp, Homo sapien
gggtaactctcagagggattacaaatcatttttacctttttttcttcatatgtctcttactttccaaatttcctgtaattaattaatatgcaattttaaaataagcaataattcatttagagaatagatttaacatctatattctctaattacttttgttggcagtagtgttcctattccaagttcaaaaacatgaataaattagggataaaaagaagtgttcaaatattttttcttaattcttttttttttttttttgagatggagttttgttcttttcacccagtctggactgcaatggcatgatcttggttcaccacaacctctgcctcctgggttcaagctattctcctgcctcagcctcccaagtagttgggattacaggcatgcaccaccacactcagcttatcttgtatttttagtagagacagggtttctccatgttggtcaggttggtcttgaactcccggcctcaggtgatctgcccacctcggcctcccaaagtgttgggaatacataccctaggccatgtgctttcctatgcgtcacctccatccatcctcaatagctctgtggcttcggcattgctacacccattgtgcatttttatgcgggaagtggggatttgaagtcatttttttctcccaagaaaacccatgctcttgtcatgaccccacatcagacagacttgggttcagattctgactgtgacactcattagctgtgcgaccttgggcacatcttttaacttctctgaagctcagctacttgtactaaaacaggggtaatgacagaaaaatgaggttattaagagaattggagagtacacctctggggctttttgattgtaaacaacagcaatatactctagggctaactttggagaaggatgaaaggcatttattagaagcatatgaattagctcatataactaaatgcaaagcaaacagccaggtcttggaaaggatgagagccaggccagctgaagagatctggagaatagggaggtaactgccttccttcttcaggggattcttgactgcatgaagcagctccagttgttttcggtgcctaagatgtaggcactgttacctggccctcccttacccctccaaaagcttgaaagagggtcccttcccatgagcgctgaggcccgaggcccagtagagtcagcagtggtatctctgcctttgccccaccaatgactgccagctgccagctgtcttctgccactcgctccttaggactttcattgtcaggaagtcaagcttttcaggaaataaaaagtaacctttttttttttgagacagagtcttgctctgtcatccaggattgagtgcagtggcatgattttgtcatgacaccatattccaagttcaaaaaaatcaataaattaggtccaatgattcttctgccttagcctcccaagaagctgggattatagacacctgccaccatgcctggctagcttttgtatttttagtagagacagggttttgccctgttgcccaggctggtcttgaactcctgacctcaggtgatctgcccaccttggcctttcaaagtgctaggattacaggtgtgaaacgccacaccctgctgtaagttctcttcttctttttttttttgatggagtttcactattgttgcccagaaaggagtgcaatggtgtgatctcggctcaccacaaccttcacctcctggtttcaaatgattctcctacctcagcctcccgagtagctgggattacaggcatgtgccaccatgcccagctagttttgtattttttagtagagacggggtttcaccatgttgatcaggctggtctcgaactcccgacctcaggtgatccacctgccttggcctcccaaagtgctgggattacaggcgtgagccaccgcacccggctgatttttggatttttttgtagagacacgttttaccatgttggccaggctggtctcgaactcccgacctcaggtgatccgcccacctcggcctcccaaagtactggaattgcaggcgtgagccaccatgcccagccttgtcaacttctttacctaggccttgccctcagcatttttttctcttccccttataggcctggttggtttacacaacattggacagacctgctgccttaactccttgattcaggtgtttgtaatgaatgtggacttcgccaggatattgaagaggtaagactgttcttcaggctgataagcgtttgtattatttctttttctttttttttgagatggagtcttgctctgttgcccaggctggagggcagtggcgcg

SEQ ID NO: 27872 - DNA, 2300 bp, Homo sapien
agagtgctgattggtgtgtttacaaaccttgagctagatacagagtgccgattggtgtattttcaaccccttagctagacataaaggttctccaagtccccagcagagtagctagatacagtgtcgattgatgcattcacaaaccctgagctagacacagggtgctgattggtgtgtttacaaaccttaagctagacacagagtgcccactggtgtatttacaatcccttagctagacataaaggttctccaagtccccaccagactcagaagcccagctggcttcacccagtggatcccgcaccggggccgcaggtggagctgccttccagtcccgcgccgtgcgcccgcactcctcagcccttgggtggtcgatgggactgggcgccgtggagcagggggcggcgcttgtcggggaggcttgggccgcgcaggagcccacggcggtgggtaggctcaggcatggcgggctgcaggtcccgagccctgccccgcggggaggcaacgaaggcccggcgagaagtcgagcacagcagctgctggcccaggtgctaagcccctcactgcccgggtccggctggcagctccgagtgcggggcccgctgagcccacgcccacccggaactcgtgctggcccgcaagcgctgcgcgcagtcccggttcccgcccgcgcctctccctccacacctctcggcaagctgagggagccggctccggccgcagccagcccaggaaggggctcccacagtgcagcggtgggctgaagggctcctcaagcgcggccagagtgggcgccaaggccgactaggcgccgagagcgagcaagggctgtgaggactgccagcacgctgtcccctctcactgggttgctattaaaaatgggcgctgaatataaaaattaaccgggcgtggtggtgcatgtctgtaagtcccagctactccggaggctgaggtgggagaatagtttgagcccgagagactgaggctacggtgagccgtgattgtgcaactgcactccagcctgggcgacagagtgagacccagtctcaaaacaaaatcaaacacgggcgctgccctgggcaggggaggtctgggcacagctgtgctgatgtgggcagtggacaggtgtcacgtgagagcctgtggccaagcctaagctgcggttaaggtgggaggctgaagggtttggagtgtgcaccaccccggaccacctctcagtaggaatgtggcaatgcacttcggtgctggattcctacttctggctgtgtgatttgcgacacgttaccccacgcacctgtaccacaacttcctcatctcccaaatgggatgacagtagttagcaaacctccctggactgctgtgagcattctgccagaaaaatgtactccaagctcttgaagtaggcctggcgtttggttggtgctcagtacatattcaatgtttctgtcgctggcgtcatcactgtgttcatggcagagctctgtgccgccaggactgggccgccacccagaccttcctttcccgccccaggggtgaactgtggacaggaccctctggggggactaggccaaggctctcccacctctggggacccgcgcccatgggcctcagatatgtggctcgagaagggggagtgggggcagggcccctggaaaacccctcgaggccagacccaccactcccaatatccgtaagaccaggggcttgagtctttcctgcagacagatgtgggcaggaacccacccgactcccagctacgtggggacgtggacgaactaacaggacaaattctagttcctggacaccgccctcccagtatcctcgcaattagacacccatgcagcggcactacactgatccgcacacggagatacacagcgacatccgcccgcaagagcatggtgggtgccggagctcccggctgtgggcccaggaactacatttcctagaaggatgtgctagatactcgttcgcgtcgggacgcaagcaccggcccgaactcgctctaggaaatggagtctgacgcctgcgcggcgcaaacgctcccgggaggtgtagtttgcgcctatttcgcgcaggcgcgctttcccgcagcggccgcctgctgctctttgtggcagtcgcagtccttttgtgggagtccggtctgtccacttgccggtccctcagaccgtcggcggtctctgtccgcttcgggacctgtccgctggtcgctccgcgtccgatggctcctggccgcggaaccttaggcctggccctggtctccgagcgcgggttcgccgggaggagcgtgtggcggg

SEQ ID NO: 27873 - DNA, 2300 bp, Homo sapien
acagttgtacaattttaagtatacaatttgatgaggttgagcaaacgtatacagttgtgtaaccagcaccacaatcatgatatgggacgtttccatgacccaaaaatgtcctcatgcccctgtgcattcagtggtctcccctctccccttggtaaccactatagttttgctgtagattttcctctttaaggatttcatatggaatttatattatgtggtcttttgtctctgctttatttcgcttagcatatgcttttgagtttatccatattgttgtgtgaatcagtagtttgttcctttttattggtgagtaatattccatttgtattagtctgctagggttgccatacaaagtatggcaggagggcttaaatgacagaaatgtatttcctcacagttccagaggcaagaaatctgaaatcaaggtgtcagcagggttgatttcttctgaggcttctccttggcttgtagatggccaccttttccccgcatcttcacatggtcttacctcttctatgtctgtgtccaaatttcctcttcttatgaggacaccagttatattggatcaaggcccactgcattgaattcattttaactgaattacttctttaaagaacctctctccaggccgggtgcagtggctcacgcctgtaaccccagcattttgggaggctgaggtgggtggaacacttgaggtcaggagttcaagaccagccggccaacatggtgaaaccctgtctctactaaaaatacaaaaatttagctgggcgttagttctcgcctgtagtcctagctactcaggaggctgaggcaggagaatctcttgaacccaggaggcagaggttgcagtgagctgagattgcaccactgtactccagcctgggtgacagagtgagaccatgtctcaaaaaaaaaaaaaaaaaaaaaaaacctctctcggagttaccaagcattgagacataagaatttgaggtgaggggtatacatttcatcccattgctccattggatggagcaaactgctccgcagtttgcttatccattcaccagccgatggacatttaggttactcataggcttttgctattacaaataaacccgctataaatatttgagtacacgtatggctgtgcattttaatttctcttgcataaatacctaggtgtgaaattgctgagccatatagtaaatatatgtttgtcaattttattgatcttttcaaaaaacaatttttttgttttattgatttttctctattttctgttttccatttcagagatttctgatccttattatctccttggtgtcttaagattgaaacttactttacttactttagtgtcttaagattgaaacatagatattgatttgataccttttttcctcatatagcattcagcgttgtaaatttctaagcactgcctcaactatatcctacaacttttgttatgtcacattttcacttttattcagctcaaaatagcttctaatttccctagtgatgtattcttcagccatatgttatttcagaatgtgttgtttcatttcctaatatttagggcattttccagataactttctattatggatttctgatttaattctattgtcatcaaagaatgaactttgtgtgatttaaagtctttcaagtctaccaagatttattttatttcccagagtgtggtttatcttggtaaatgttccacatgcccttgaaaaaatatgtattatgcctttgttggttagagtgttatgtaaatatcagttaagtcaagttgaatgatggtgttttttaattgttctgtcagtttttgcattatgtattttgaagctcttttagtagatacatttatatttaggattgctatgagttcttaatgaattaactgttttatcattatgtaatattctctttgtctctgatagtcctctctctgaaatctactttgctattactataggcacttgagctttttttttttaaattagtatttgcagggtttatctttttctatcctatcacttttaacctatctttgtatgtaaagtgggtttctgtagcttgctttttgaattcagtttgacaatctccaccttttaattggagtgtttaaactattcgcatttagtgtaattattaatatggttggatttacatgtcctttttttttttttcttttgacagagtttggctcttgtcacccaggctggagtgcagtggcgcaatcttggctcactgcaacctccacctcttgggttcaagcaattctcctgacctcaggtgatctgccaccttggcct

SEQ ID NO: 27874 - DNA, 2300 bp, Homo sapien
accagcgcaagggcgtgatgggcgcgggcgcgctgctcgtcctgctcgtctgcctgctgctctcgctgctcggctgctgctgcgcttgccgcggcaaggaccctacgcgccggtgagcccagatactgccccgctttcgcctgggttcaggccgcaccctctgggtgccaccggacccagatccaacccttccgcgcccctgccccggacgtggccccgccccttctgtgcttggctccggccgagatctaatcgcccctgggccccgccccggccccgcccctccgctcagaccccgcccccgcagggagctttcgcttgggaggaagaaggcgccgcaccgactatgcgggcgcttcagtcgcatcagcatgaagctgccccggatcccgctccggaggcagaaactacccaaagtcgtaggtaaggatgacagcgcggggtatctgggagaaacacctctcgacgcaggaagctgctgggaaatgggtgtgagggggtccagatctcagtgaggaaatgggggaccttgagtgttgatgtgcgtgggcgcgaggaggtgcgaccagagggaaggtaagaggtgtggcagctgctgagggcgaggcaaggtaggaaggcaggagtcctaggtgcgccggctgatgtgggcatatgtcagaaacgttggccctgagagtgatcgcatcaggggtgtgtggacatctgggtcccgcaggctcccccagtctgtaggagaatgctgtatatcccggccagagctgctgggggaatgcgtggccacgggagtgccctgccccacggagaggacccaccctcctgcctacatccccagcagtacccagagatcctcctggaaagtgggcaggctggtccccacccaccaacaggataggggggtggggtgtgccgcttctctccatgctgacttgcacctgggtggaccctctcttcctctctttcccacttatttctaaagatggaggggaagggggctcagactcttgggagatgaaggaaacagctgagaaaaccccttagccaagccgggcatggtggctcatgcctgtaatctcagcactttgggaggccgaggcaggtggatcacctgaggcctggagttcaagaccagcctgaccaacatggagaaacccggtctctactaaaaatacgaaagtagccgggtgtggtggcgcatgcctataatcccagctactctggaggctgaggcaagagaatcacttgaacctgggaggcagaggttgcagggaggcagaggttgcagtgagccgagatcgcaccattgcactccagcctgggcaacaagagcaaaactgtcaagaaaaaagagaagagaagagaggagaggagaggagaagagaagagaagagaaaagaagaaagagaaggaagggagggagggagggagggagggaggagaaaccccaaaactgtcgaaagaaaagaaaaagcaagcaagcaagagagagaaaaccccttggcccacctagcagcatggcatctggggacataggtgtggggagtggaccccacatccctctgtggaatggaggccaggctagccagcttctggggccccctgttgtggggtctgcatctctggaggccaggcctagggtgcagcttgctgagatgggctgagccaaagggcagccctgccactgcgcatttgggctcagaagtgctccaaggcttccttattcgcacaaggcagggcctaaaacagagcttggaggccttggtggcctgtcccagccaggtgtcttcttcagccccgtctcccacctttctggccttttctcaacacgtcagcccaaccttttccagctccctggatgcacacacttgccttgcaccttaacacatgttgtgcccatgtttcttttctgggttcacctctacccattctccagtcctggcccagtgtcactgtacctgttgagttgcctgtgccccctgcagtccaagaatagggctggtcttggtcaccccatcaacatttgtcacagcaggggctaatgagggcaccggctggggcagagtggacccctggcagctctgcctcatccttccccagtggcccaccacgacctggataacacactcaactgcagcttcctggagccaccctcagggctggagcagccctcaccatcctggtcctctcgggcctccttctcctcgtttgacaccactgatgaaggccctgtgtactgtgtaccccatgagggtaagtaaggccctacctgggcatcactccagcccagtgaaatgttccca

SEQ ID NO: 27875 - DNA, 2300 bp, Homo sapien
ggcagggcctccaaacctttgtgctcacacaccccatccacccagggttttagaggttgtgctctcctgaagtgctgcggtagcattgtgtactctgtaaagccaaatcaaatggaacaagtggaagacaatcagcataaacaggccgggcacgctggctcatgcctgtaatcccagcactttgggaggccgaggcgggcggatcacctgaggtcagagttcaagaccagcctggccaacatggcgaaaccctgtctctagtaaaaatacaaaaattagccatgtgtggtggcacgtgcctgtaattccagctacttgagaggtttgaggcaggagaattgcttgaacctgggaggtggaagttgcagtgagccgagatcgtgccactgcactccagcctgggcaacagagcgagactgtttcaaaaccaacaacaaaggcataaacagatgctctaatagctccttcctccaccctggtccctgagcccttttgccacagtttgactttcctcctgcacgtggaggactccccatgtgcctgctccttccctagtggctgggtgggcctcaccccacctccctccagaagcccctctgccaagtggtcacctcactgtgtctacatgccaccccccgtccccctgtccagaggctgcccctccccactggagctcaaccccaactgggcatctaggtgtgtccctgtggcccagctagtcctagtgccgtcctcatcatgtcacatcacatgacatctggatccatgacacccattaggctgggccctccacttggagggatgccctagaccctcacatttgggcaggtcctgaggcccatggtcttctccctggctgctgcctcactgctgtccttcctgggactccaaggccacttttctcaggcctaatggctgtgggaggaggacacaaaggagttaggtgagatggggtgggtggttctgggctggaaagttcttggcggtgaggtctgtttgtggcaatcctccaccgccagacgactgcctggcaggacctcattaaccacccccctaggacaggagcgcaactgcagaggcagggaggctgtgcggaggctgcggaggagcccggagcagatgggggctgggggaggggcatcgggcttagatgtcctccctctgctcgcagctcccaggtgcccacgtgctgcgctggctggaggcagcaaggggacgagtgtgggattggtgagtgggtcatcccggggacctggggcgggggagggggcggggctaggacgcgcagcagctctggcctgtctcgtccacagcggtgtgcgaaggcaactccacgtgctcagagaacgaggtgtgcgtgaggcctggcgagtgccgctgccgccacggctacttcggtgccaactgcgacaccagtgagcgtggggtcgggccggtattggtcggtggggcggaatcctggagagatggggcggggtccaaggtggggcggggtcggatccgccttcggggcgggtccccagaggtggcggctggagtgcgggacgcgggcaggttccggctggctgggggcacctactcaagcaccggggccttccaccccctccgctcctcccctgcagagtgcccgcgccagttctggggccccgactgcaaggagctgtgtagctgccacccacacgggcagtgcgaggacgtgacaggccagtgtacttgtcacgcgcggcgctggggcgcgcgctgcgagcatgcgtgccagtgccagcacggcacgtgccacccgcggagcggcgcgtgccgctgtgagcccggctggtggggcgcgcagtgcgccagcgcgtgctactgcagcgccacgtcgcgctgcgacccacagaccggcgcctgcctgtgccacgcaggctggtggggccgcagctgcaacaaccagtgcgcctgcaactcgtctccctgcgagcagcagagcggccgctgtcagtgccgcgagcgtacgttcggcgcgcgctgcgatcgctactgccagtgcttccgcggccgctgccaccctgtggacggcacgtgtgcctgcgagccgggctaccgcggcaagtactgtcgcgagccgtgccccgccggcttctacggcttgggctgtcgccgccggtaagcgcggtctctcggccagggagggaggaggtggaagggcgggccgccgatggggacaggggtgaggcgggtcccagccttccctagcctccgacccctcccccaggtgtggccagtgcaagggccagcagccgtgcacggtggccgagggccgc

SEQ ID NO: 27876 - DNA, 2300 bp, Homo sapien
acacctgcagaggctctccatccagtgaacatggttcagaagcagacacaagtgggtgggtgatggccagcagacctgggtctccctgcagatgggcaccttggtgccccctgggtcagggctgggtgggtggagacagtgggggcaggggccaggaaaagccaggcctttgtattcctgtctctggtttccagttttattgtggaaaatacactggaccaattccccaaagtttgagattttatggtcctgttcgccaggtcccatctttggcctgaaggagaaccaagccttgttcaggaggaggggcctcgaggcctaggtgctctgtacaaggggtggtattctgtctagctggggaatggctggggcatcctcggaagcctgggcaggagcatgccaggcatgtactatcctgaaatgcatggtgtagggccagtctatcccatcccgctagggtcttcaggcttcctcccaaactccgccccccaccaccttccggttctagattcagatactgaatccaagcctgcttgtgaagaagcgtgctccttttctctaaagtgcgaatggctgttacatgcctttaggatcgaggcgaagttctgggtcggctgggaacctaggatcccgcagccttggtggctcttccttctcagcctcctctgcccctgaatgtgggctaaccccagctcatcccctacgaaccctctctagccatcatggcttcactcaggcagggcctccaaacctttgtgctcacacaccccatccacccagggttttagaggttgtgctctcctgaagtgctgcggtagcattgtgtactctgtaaagccaaatcaaatggaacaagtggaagacaatcagcataaacaggccgggcacgctggctcatgcctgtaatcccagcactttgggaggccgaggcgggcggatcacctgaggtcagagttcaagaccagcctggccaacatggcgaaaccctgtctctagtaaaaatacaaaaattagccatgtgtggtggcacgtgcctgtaattccagctacttgagaggtttgaggcaggagaattgcttgaacctgggaggtggaagttgcagtgagccgagatcgtgccactgcactccagcctgggcaacagagcgagactgtttcaaaaccaacaacaaaggcataaacagatgctctaatagctccttcctccaccctggtccctgagcccttttgccacagtttgactttcctcctgcacgtggaggactccccatgtgcctgctccttccctagtggctgggtgggcctcaccccacctccctccagaagcccctctgccaagtggtcacctcactgtgtctacatgccaccccccgtccccctgtccagaggctgcccctccccactggagctcaaccccaactgggcatctaggtgtgtccctgtggcccagctagtcctagtgccgtcctcatcatgtcacatcacatgacatctggatccatgacacccattaggctgggccctccacttggagggatgccctagaccctcacatttgggcaggtcctgaggcccatggtcttctccctggctgctgcctcactgctgtccttcctgggactccaaggccacttttctcaggcctaatggctgtgggaggaggacacaaaggagttaggtgagatggggtgggtggttctgggctggaaagttcttggcggtgaggtctgtttgtggcaatcctccaccgccagacgactgcctggcaggacctcattaaccacccccctaggacaggagcgcaactgcagaggcagggaggctgtgcggaggctgcggaggagcccggagcagatgggggctgggggaggggcatcgggcttagatgtcctccctctgctcgcagctcccaggtgcccacgtgctgcgctggctggaggcagcaaggggacgagtgtgggattggtgagtgggtcatcccggggacctggggcgggggagggggcggggctaggacgcgcagcagctctggcctgtctcgtccacagcggtgtgcgaaggcaactccacgtgctcagagaacgaggtgtgcgtgaggcctggcgagtgccgctgccgccacggctacttcggtgccaactgcgacaccagtgagcgtggggtcgggccggtattggtcggtggggcggaatcctggagagatggggcggggtccaaggtggggcggggtcggatccgccttcggggcgggtccccagaggtggcggctggagtgcgggacgcgggcaggttccggctgg

SEQ ID NO: 27877 - DNA, 2300 bp, Homo sapien
cagtgtggctaggctcttggtccctgctttcatgcaaaaccctcctcagccttcaaagtccacttccttctggcagccatcctggccaaaaccagcaggccagggctccgggctccagcagtttgcctgcgtggtggtcaattgtctgtgggttccttctacatcctagtgccatgtggatgatccttcattcctcccatacttctcagtcttcccctaggggtgcagtggtggttgggagaaatgagggctctgcccatgacacccaaagttgccatctactgcaagggatgtatgtaccgggtcgtgaggtgagactggggatggtcctcatcctgagagcagtggtggatagccacatgtgagattaaaaagactactctgggtggcagacaggggtgggcagagatctaagacatttaggaggtcctgggggattggggggcaccatccaggtggtgccctccctggacaggtctgggggaaggagaaaggtgatggaatttgatatgcctattcatgacctccatccagctgaggtgagtgtcccctccagcccagggggtcagtgcctctaaagccaggagctgggctgggacagaccttgcagccactgggacctctgctggcctctattgggagccgcaatccggatcctccgtgggaggggccccagcactgggagggcattgctgaggtcagggctgtgcccaggctgagctgcccagaagtggttggcctgtttatttgtccccaggtagttgcattcgtgtccacactagttccacttctctttcagcccaccccacctccctcctgcaccagcatggctgagtgaggggcctgctcctccccatcccactctctgcctgtgccagcctggtgatgcccatggccttgggcctttcagtggctcctcctccaagccccctcctccagccccacccttcggggctatctggccacacctggacagagtctgcctgccctccctcagtgagcctgtgggccgcatgtggcctgctccccaaagaacggaggtgcccgctccctgcttaggccttctgccagctctcaagtccccaaaagacaaacatcctcactaggacctggctacacacgggacatttgtgctccctgcccaacttccagagtcggtctgccccagttgccccccggggacccgcaccctgctgcctcccagtccaagtccagcttccccgctggctccctagggcctgtccctctgtcttgctcccttcccacaccttccttctgctctgtgctgttacccaccttacctgatgcaggagttcccactctctagccccagcctctcctggaaatccgacagccagcagaatccaccgcccaggctcccccagcccccttcactcctcaactaggactgcagggtttccatcccgggggtctccttctgtctttacctctacttcctaccgcagtccacagcctggccattctacttcctctgtatctctcccatccgtccctacggagaccccttcccccaggcctctggtccggaccgagtctaccacaggcctcaagcatcctgctcggtccgccccttgcgagctctgagtgcgcaggagtgcgcagggggagctgaccgcacaccccagcactacaaggacttcgcggtggggtgctgtggagttggctttcggcctcgacctgggctgtctgcgggccccactcccttggccggttccgaggcgctgggagcgggggtgggcttgcggagtcgcgtccgtgtccccgatccgccttcccgtcccgggcctggcctacgcagtgggcgcgcaggggcggctgcttcggtagatgtctagggagcggagggaaaggcgcgggaaccggggattcctcgggcggaccctccctccaccagcgctcggcgggcctcctccaagttcgcccccaagtttgcgagcggccaaatgggggcgggggctgcgcggaggggcggtggctaggccggagggtggggtctggagcgcggggcgggcgctgccgcctggccggccgcggctggcccgggatcagggagccgatgtggaatttcctgcccggctcggcgcccctcctgccgccccccgcccggcctcgcactccgcttccggccgctctcgctgcggccgcacccgcgcccgtgcccgccccgcgcctgccccgcgcctcatggagggcgcagggccccggggggccgggccggcgcggcgccggggagccggggggccgccgtcaccgctgctgccgtcgctgctgctgctgct

SEQ ID NO: 27878 - DNA, 2300 bp, Homo sapien
ccaaggggggcctcatcttcccccagacctgctcttgctctggctcccctgtaggcagggtgggcctacttccccacccatctcctgggctcattcttcacacatcactgggcttatactggggaacctgcttccttcccaggtttctagcctgctccactctggtcttcactccctgcctgagaccacagcactgtggctggctccctactcagtcttcgtctctaccatattggcatctgcccaccctggctacagggtgccctcagggctaagtcaagcctccaaagggcagggtctgctctccaaccttcccttcaggctcagaaaattctggaaacctccacaccactcactttgaaggatctcacctccacgtttgctgacactgtcggcttcctggaatgcttttcttaatcccaaagtcctcctctgttacacagtaggggggtctcctccagaaagtctttctaggaggaagcccactcccatttggaacctctgcctctggaggccaatcccgttctcttgatccttgtctgggaccctcagttatctctctggactcagccaggacagcaattctcttccgtgtattttcctccttttacattccccttccaccaatttttttttttttttttttttttttttttgagacggagtctcgctctgtcaccaggctggagtgcagtggcgcgtgatctcggctcactgcaacctctgcctcccgggttcaagcgattctcctgcctcaggctcccgagtagctgggactacaggtgcgcgccaccacgaccggctagtttttttgtgtgtgttttggtagagatggggtttcaccatgttggccaggatggtttccatctcctgacctcgtgatccgcccgtctcggcctcccaaagtgttgggattacaggcgccagccaccaagcccggccccacctttctttttaaccatgagccatctccagccacatcctccccctaccactctctccacccttcacagtccctctcaaaaccacagtgtgggacactccaaccttatcccatcaggaggctctgtggctccaagctctgggcgcagccattacggatacgcctcggaggatgggacctgctcgaaggtgaggtggagaacaatgaatgccaagacccgcgcacggacctctgggaccaggctttaagactgggaattagatttactgcaaaatctcagtaaaggaacgggcacacaaactagcacctgttcactctggcggtgttaagcgattctccccgatatcccgcagggggcgcgctacggtcagcggcaccgaccgcggagggagcggggaaggagcaggccgcgggagggagggaatgagcgcgtgacgaagggaacaagtggaggagaggaggaaagaagggaatcaaagagggagggaggcaatgggagaagaggagagggagggagggaaagaaggggggaaatgagacagggagggaaggaatgagagagggaggagagaacgagagttaaggagggagggaaagggaatgagagagggaggggatgagagggggagacagggagggagtgaatgagtgagggaggaagggaatggtgggtaagataggaagggaaggaatgagagagtgaaggagggagggaatgagagggggggagtaagagaggagagaagagagtgaagaagggaatgaggaaaggagagggaggatatgagcggggagggagatagtgaggaagggcaggaggaagtgagtcgaggaatgagggtaggaccgaggcaaggaaagagtcaatggattcagacggggcgactctcggcaaattcgctcattcgttggttcggccccgccaagtgccaggtgccgcgctagtgcggggactcactgagccttggcgatcgctgctgtcctccgcagagcgccggagtggagccgccccctgtctccccgccccagggccgcccccgcgctgctacccggccaggccgggaacccccgggcctacgtctggcccgcccggcgcctgcgcggcgcacccacgtgacggcccaggcccccgccccgccggctcctctcgcccagcctcccgcctcgcgcctcccgcctcccgcctcccgcctccctccagctgcgagtgcggcctcggctggcggcggcaccaggtcagctgcgaggcgtgagccgaacgggccgggcggcagcgaacgcgggggtcgggcggcaagcaggcatcgctgggccggggacaagctagcggcgcggagtccgaggggcgcgggggcgg

SEQ ID NO: 27879 - DNA, 2300 bp, Homo sapien
cggaggatgcagtgagctgagattgcgccactgcactccagcttgggcgacagagtgagactctgtctcaaaaaaaaaaaaaaaaaaaaaaaaaaaaaaaccaagggccgggcgcggtggctcacgcctgtaatcccagcaatttgggaggccgaggcaggcggatcatgaggtcaggagatcgagaccatcctggctaacacggtgaaaccctgtctctactaaaaatacaaaaaaattagctgggcgtggtggcgggcgcctgtagtcccagctacttgggaggctgaggcaggagaatggcgtgaacccgggaggcggagcttgcagtgagccaagattgtgccactgcactccagcctgggcaacagagcaagactccatctcaaaaaacaaacaaacaaacaacaacaacaaaataaaacaaggaaaaaaacactaaaaccttggatgtcctgggcaaccccggtcaagatgatcactctagatagagtttttaaaaattagttttcagcctggccaagatggtgaaaccctgtctctactaaggatacaaaaaattagctgggcttcgtagcaggcacctgtaatcccagctacttgggaggctgaggcaggagaatcacttgaacccgggaggcagaggttgcagtgagccgagatgtcaccacagcactccagtctgggcaacagggcgagactccatctcaaaaaaaaaaaattagttttgccaccgggcacggtggctcatgcctgtaatcccagcactttgggaggccgaggtaggtggatcacctgaggtcaggagttcgagaccagcctggccaacgtggtgaaaccctgtctctactaaaaatacaaaaattagccaggcatggtggggtacgcttgtaatcccagctactggggaagctgaggtgggagaattgcgtgaacccgggagacagaggttgcagtgagccgagatggcaccactgcactccagcctggccaacaagggctaaattctatcccccccccctcaaaaaaaacaataacgattttgggagtattagagcagaaaacgtttgaaaacatgaacagctctcacatcaacacaagacatgaaactctgttggcaagagaggcctctttggggagagtgctcactcctctcccacccactctctaccaccttcaacctcctgtctggggcacagtaacaaggggtgtaaggggtgtacagtgcctagcaggggcctggcacttaggcttcagtaggtgccagtccacagtctcctgaggcccatgttggttggtgtccacctggtgcttattgaccacttgggctccagattttcctcacgtcacctccctccccagggtagcagataaaggccccatagttccaaggaggcagaacttttacattcctaaaagcattctcaggcccccataacccctcatcccaccttcagctcgctcaccttcacctatcaaattcgtttgacatctggcctccagcaactagctaggctgagttctccatgaaggggacgtggctgctggtcaaaagggaaagcccatgtctaaaaattaattaacgtggtttaggggcctcacattcccaacccccaaatacagccattgtgagatgtgagattcaaaaaatcgaagagtgaagcggtgatgagagtccatctggtcgctcttcggatgcggcgctagcaggcagttgcatgaaagcagatcccagatcacgttgcactggcacacagtaggtacccacacatatttgataaataaacactctctccctagcattactatagatagctggcagcttggcctggcatcccggaggggtctggatctcagggactagataaggccagcacactgaagagttgcagaaaatgcaggcggtcaggcgcaggtctgctgcgggagcacctgccgtgtccgacagctgcactggaagaggggcgtgtgtctcccagccgggcggaaccgagaccgcttcgtccccggcggggaacttcatttcccacaagcctgtgcgcgagactccatttcccacaagccctccttcacttccggctcggccgaggcactgcggacggcttccgggtttgggcctggctctgtgactgaggcggcggcggtggcggccaagcgggatacgggcggcgggagctggggaacaggcatggacgtttccgggcaagagaccgactggcggagcaccgccttccggcagaagctggtcagtcaaatgtgagtagtggtcggggcagggggctggattgtgggaccttcct

SEQ ID NO: 27880 - DNA, 2300 bp, Homo sapien
ctgcgaaggaaactggggccagcagctgctctgtgttttcagccaacaatggctcctgcccactgccgctgcataaccaccagaggcaggcttctcttgacacaggcctgtcgttggagcatgtgcctggcgagtcctatttctattcccctgtgggttagggacaggcagctgtaccttcagtgtgttgctgggtcaaagggagacattgagcactccagagcctggtaggttttgcttctttccacactaacttttcaccagaatggccagcaaagtgaacttcactgatctcactctctgtggtgttggaaagtcactgggatgtgtaagaggagaaggagcagcccagatgatctggcccagatgcgctggcagactccgcatgttctgctttcagggacagtggcctggctggtgcacacagtcctgtggggctcatgaggtcatgggaagcagccgagcaggaggctcagggccccatgactgctacagaagttctccgctgggcactggggtcagctggactggcttccagctggccgtggacagcctcagtttcctcatctaggtaacagagacactgcctcaccagagtgggctgcaaagggaggcagtgtcaagtcttggcaccactccagccccgccgtgggttcctgtagtgttctattatttgtttgctcagggctgagctgagactctggacctgggaaaaaggaaagccagagtaggcccagggtccccaaccccagagtgcttcagccttgggggcagctccctaaggccccaggttgaccctggagctactctgcaccctctgcccccaggtctcttgtggggtcagcgctgccaagagtagaaacacttcccccagtagtggggagtactaggagctccgtggggattaaggcttgggcaaatgcctacagaactgacctacccatggaaatatgtggttatataaaactatgtttactttcgtttttttgtttgtgttttcatatagataacaagaaatctcaagcttccgtcagtggtaagagttttcccttttgagttaaagtttctcccaactttggatttgaggtggcaagaatgacatagtgcatgcctcatgtgcctgggttaacctgtcactagaggagaatgcttgcggagagaactctggagggaggaggctgaccagctgtgccctgacctctccagccttcgtcttcctgcagactgtgaagtcgcatgatcctccccatcccgtttcacacaaatgctgcctttgcccagcaaaaagataaacactcacaaagctattaagacattatccaaaagtgttgagctctctggtagagaattattatgctgttttcagtgtaataatatgtagtagcatttctgagaaaatgctgtgaattcacttttttaagttacaaagtttctttgtaaatttagaaatctggctgggtgctgtggctcatgcctgtaatcccaacactgtgggaggctgaggcaggcagatcagttgaggtcaggagttcaagaccagcctggccaacatggtaaaaccccatctctactaaaaatacaaaaatagccgggtgtggtggcatgcgttgtagtcccaactactcaggaggctgaggcatgagaatcgcttgaacctgggaggctgaggttgcagtgagttgagatcgtgccactgcactccaacctggatgactgagtgagactccatctcaaaaaaaaagtttagaaatccatatttttaaatttcagcgtttatcacatgaggggaattctgtcaattcagccttggtctctgctgactaagctgcaagggaaggggtttaacagatccaggctggccaactgcattctgccattgggaagggagtgcactgacctcacaggctgcacgccactgtctgccctgccctagacagtagagctgtacatgccagctgtctctgcccatgtgggtctcacctctcagccaggacagggattcttggccaactggggctgagcggcagcaagggcatgtggccagaacatctgggccccttggcattggagcatggggtcctgggtaccacccagttgtgtggcatggcggtcctgccaggacatacctgtctgtgggtagctgtttgctgtgaagtccacactgttgtgacaatggcatccttgtccttggttgtggcattgctcactgagctgctgacctggtgggcttgggacatttctcctcagtgctctgtggagccctcctctgcacccctaagctgttctggcatggtggccct

SEQ ID NO: 27881 - DNA, 2300 bp, Homo sapien
gactctggacctgggaaaaaggaaagccagagtaggcccagggtccccaaccccagagtgcttcagccttgggggcagctccctaaggccccaggttgaccctggagctactctgcaccctctgcccccaggtctcttgtggggtcagcgctgccaagagtagaaacacttcccccagtagtggggagtactaggagctccgtggggattaaggcttgggcaaatgcctacagaactgacctacccatggaaatatgtggttatataaaactatgtttactttcgtttttttgtttgtgttttcatatagataacaagaaatctcaagcttccgtcagtggtaagagttttcccttttgagttaaagtttctcccaactttggatttgaggtggcaagaatgacatagtgcatgcctcatgtgcctgggttaacctgtcactagaggagaatgcttgcggagagaactctggagggaggaggctgaccagctgtgccctgacctctccagccttcgtcttcctgcagactgtgaagtcgcatgatcctccccatcccgtttcacacaaatgctgcctttgcccagcaaaaagataaacactcacaaagctattaagacattatccaaaagtgttgagctctctggtagagaattattatgctgttttcagtgtaataatatgtagtagcatttctgagaaaatgctgtgaattcacttttttaagttacaaagtttctttgtaaatttagaaatctggctgggtgctgtggctcatgcctgtaatcccaacactgtgggaggctgaggcaggcagatcagttgaggtcaggagttcaagaccagcctggccaacatggtaaaaccccatctctactaaaaatacaaaaatagccgggtgtggtggcatgcgttgtagtcccaactactcaggaggctgaggcatgagaatcgcttgaacctgggaggctgaggttgcagtgagttgagatcgtgccactgcactccaacctggatgactgagtgagactccatctcaaaaaaaaagtttagaaatccatatttttaaatttcagcgtttatcacatgaggggaattctgtcaattcagccttggtctctgctgactaagctgcaagggaaggggtttaacagatccaggctggccaactgcattctgccattgggaagggagtgcactgacctcacaggctgcacgccactgtctgccctgccctagacagtagagctgtacatgccagctgtctctgcccatgtgggtctcacctctcagccaggacagggattcttggccaactggggctgagcggcagcaagggcatgtggccagaacatctgggccccttggcattggagcatggggtcctgggtaccacccagttgtgtggcatggcggtcctgccaggacatacctgtctgtgggtagctgtttgctgtgaagtccacactgttgtgacaatggcatccttgtccttggttgtggcattgctcactgagctgctgacctggtgggcttgggacatttctcctcagtgctctgtggagccctcctctgcacccctaagctgttctggcatggtggccctgcacacaggggcccaggctgagttggactctgcaacagcacgagtggagctgtgtgtgcctgtggacttgtgccctccctgggagagcgtcccctggccactgtgttaccgcttgctcagaagggcccatcgtgctttgtacgctcacccagcaggagggctggacagccaggagaggcaggggttgccacctgccctcaaggcctcagcccatctttagtgtatctgcaggcatcagagaggtcatttgtcccttaacattaggactctggtccaggccaggctagaggtatgggtcatgcagtgaccaacacacctggcgtcctagccattcatatttgggagtctccaggagcctagtctcttactgcttggggctgtgaggggattgagcctgtaggtaggcgagatctgtgctctgtgagccttacgccctttgagccatggtcagtctggtaggccctttcctgagaagctctgcccttgtgttcccacagatcctatgaatgcactccagagcctgactggcggacctgctgcgggagccgctggaattggcatgcctcctcggggcccgggacagtctctgggcgggatgggtagccttggtgccatgggacagccaatgtctctctcagggcagccgcctcctgggacctcggggatggcccctcacagcatggctgtcgtgtctac

SEQ ID NO: 27882 - DNA, 2300 bp, Homo sapien
cagcagcaggcggcgctacagcagcagcagcagcagcagcaacagcagcagttccaggctcagcagagtgccatgcagcagcagttccaagcagtagtgcagcagcagcagcagctccagcagcagcagcagcagcagcagcatctaattaaattgcatcatcaaaatcagcaacaggtaccaggtcccctgttcctgctcttggcctccctcctgcagcgtgagccctgggctggcatcagccacaatgctgggtgcagtgcccggagccagccgagggttctcttgacacgtgtgcctgcccttttccatgggcttctcaaaaagtctgggacaaggccgggcccagtggctcatgcctgtaatcccagcactttgggaggccaaggcaggcggatcatcaggagttcaagaccagcctggccagcatggtgaaaccccatctctactaaaaatacaaaaaattagctggacatggtggcgtacacctataatcccagctatttgagaggctgaggcaggagaatcgctagaacctgggaggcggaggttgcagtgagccgagatcgcgccgctgcgctccagcctgggcagcagtgagactccgtctcaaaaaaaataaaaataaaaaaggaaaacaaaagtctgggacaggcaggagaaacaggccctgactcactaggaaggttctgtgatcgagcccttccatttgggcttgggcatctggcggtgggcctcctgtgtagttcaggggctgcgagggattcaaacaagagtgagctgaagcaagaagtgagacgaacactctgaggcttgggactacttgagccattgtgggccattttggctgaggacacatgtgcctcctgtttacctctgtgtcttgggttctgggctcagtgttagtcgacctccagctggtgttgcatgaggtgatggtgatgtcatgttagcagcactgcttctcagaagttgttcagcttcccatggtttccatagagagtctagacgtgttaaacatctgccctcacagcaggtcttggttgggagaggaaagccccaaagggccccaccaccctcccaccccttcaggcctcagctagctgggcttctctggatcttggcacccctctcccagagctgacagtgcatctgcagccacacttttccttctcctgctgacaagcagaccttgaccgtcaccgtgaggctcatgccactgacctataggggcaaagcaagcatcgttgcagaggcttcagaaatctgcagttgccccagcttttatcctagcttccatggagctgtacctattccttgtcatcttttgctgaagtttctaggtatgccctttgaaccatcctagtggaatggtagaccagagcccaggcacacacttggtgcctccccggtgtcaggaaggcagctggtgttggcctcggggggcccagagcctttctgtgggagatgtgcccctccccgtgtgagtgagaggtcagcctgtcagcccaggaaggccttttttttttttttttttttgagacttttttttgcctcttactctgttgcccaggctggagtgcagtggtgtgatctcggctcactgcaacctctgccccaccagtttaagtgattctcctgcctcagcctcccaagtagctgggattacaggtgtgagccaccatgcctggctaatttttgtattattagtagagacggggtttcgccaggttgtccaggctggtctcgaactcctgacctcaggtgatctgcccgcctcggcctcccaaagtgctgggattacaggcgtgagccactgcacccagccaggaaggctttcttgatggctctgcagatggccacctgggcttcctgaggcccagactgtcacagggaggagctggtgccacagaggcagatgagtgataaccgagtgctgcttgttctgtctctagatacagcagcagcaacagcagctgcagcgaatagcacagctgcagctccaacaacagcaacagcagcagcagcagcagcagcagcagcagcagcaggctttgcaggcccagccaccaattcagcagccaccgatgcagcagccacagcctccgccctcccaggctctgccccagcagctgcagcagatgcatcacacacagcaccaccagccgccaccacagccccagcagcctccagttgctcagaaccaaccatcacaactcccgccacagtcgcagacccagcctttggtgtcacaggcgcaagctctccctggacaaatgttgtatacccaaccaccactg

SEQ ID NO: 27883 - DNA, 2300 bp, Homo sapien
ttctctcagagcttggtcttgccttgttgcaagcagtgcagtttcttgggggctaattgggcaccctcactgccttgttccaccaatagcagcgccccctgctgggggatggggagggttgggcacagcaagccctctgaggggccatctggattcatgatcttcttttgaaacttgaattggcacagtgaccagctgaggctacggtactctgatctaaaaactttaaaagtatgtgtggtaactgtagaacccagaaagtggagaggaacagaagtaagagaaccattccatgagagagaaggtctggtgtcctttctggttgtttcccatagtcaaggtcatgctatcctggggttttttgtgcagcatcttccacatcaataggggatgaaatgttctcctttaattagaaagccctggtcggcacgaaggaactcttgtcatacccctctgtgaatgtctcttgccatcctcagttaccatcttgttcttggaccttgtaataatttccgattttttgctattaccagtgacacatatcttgatgtcttagattgttcctggagctgatggaggtgagtgaatggttcactttgagggccttcagatctgatcagccaccctctaaccaggaggtcagagatgcagattggagctccccttgtgttgttcacacagtggacatcaggacgtggtgaccacgtgttgcagctttgtatgtatgagctgccgcgtgctgcggaaacaggcctcttgagttcatgaatgaaattctgggattgggggcccccatgcaggcagccctccatgccctgtctctcaagcccatcttagagccgaagagaggcgccctgtcaggcccttgcagtactgtggtgttggatgtggtaaagggtagcctgggactgagtattctagaaaaattgctcagccttgtgctgtgcacacctggttctctttccagtgttatttatgtagctgagaagggcaatgtcacccacaaggggatttagcaggacacagcagacttctttttctcccctataaaaccaagacatgcaggcacagtggctcatgcctgtaatcccaacgttttgggaagccaaggtgagaggatcacttgagaccaggagttcaaaactatcctgggcaacacagcgagaccctgtctctacaaaaaaataaaaataaaaagttagctgggcggagtggtgcgtgtctgcagtccctgctactcgggaggccgagttgggaggatcgtgcaagcccaggggtttgaggctgcagtgagctgtgatgacagcattacactctagcctgggagacagagcaaaactcttgtctctttaaaaaagcaagaaacaggacagaatgcatctcattttctttttttttttttttttaaagacagagtctcttgctctgtcacccaggctggagtgcaatggtacagtctcagctcactgcagtctccacctcctgggttcaagggattctcctgcctcagcctcccaagtacctgggattacaggcatgtgccaccatgcctggctaattttgtatttttagtagagacggggttttgtcatgttggccaggctggtcttgaactcctcgccttaagagatgtgcccgctttggcctcccaaagtgctggaattacaggcgtaagccactgtgcctggccatgcatctcattttcaaacagtccctatacctttgtcatttaacgttctattcttttagtatgtgaaaaccaaactctaatttacaagtcacaaagaattatccaagacagactcccattgtggacatgtatgtggcattgctgattcacagctactgtactgaagccttggccaccctggaggaccctctctctttttgctggacccttctgcacagtgactgcagtagggagagtcagacctgggggtgggggagaggttttttggattcctctctgggtagatgtgtgttgggaagtagtgaaatgttgatagctgcctggctcatctgatccagtaaacataactggtgcgtttgggttgaaagaaattgggctttccttatcagttctcagttataagaacatcagtcagcagtacattagacttaagctttgcattccttgcgtttttttgtttgtttttctcttcctggaaaaaagtttgcttctctcataccatctgacttacttccaggcttttctcccttgtggaacgagtgccgttgagccctgctgcactctcagacgggctcctccgaagtgccgcaggtggtggtaaatcgactct

SEQ ID NO: 27884 - DNA, 2300 bp, Homo sapien
tgcaggcagccctccatgccctgtctctcaagcccatcttagagccgaagagaggcgccctgtcaggcccttgcagtactgtggtgttggatgtggtaaagggtagcctgggactgagtattctagaaaaattgctcagccttgtgctgtgcacacctggttctctttccagtgttatttatgtagctgagaagggcaatgtcacccacaaggggatttagcaggacacagcagacttctttttctcccctataaaaccaagacatgcaggcacagtggctcatgcctgtaatcccaacgttttgggaagccaaggtgagaggatcacttgagaccaggagttcaaaactatcctgggcaacacagcgagaccctgtctctacaaaaaaataaaaataaaaagttagctgggcggagtggtgcgtgtctgcagtccctgctactcgggaggccgagttgggaggatcgtgcaagcccaggggtttgaggctgcagtgagctgtgatgacagcattacactctagcctgggagacagagcaaaactcttgtctctttaaaaaagcaagaaacaggacagaatgcatctcattttctttttttttttttttttaaagacagagtctcttgctctgtcacccaggctggagtgcaatggtacagtctcagctcactgcagtctccacctcctgggttcaagggattctcctgcctcagcctcccaagtacctgggattacaggcatgtgccaccatgcctggctaattttgtatttttagtagagacggggttttgtcatgttggccaggctggtcttgaactcctcgccttaagagatgtgcccgctttggcctcccaaagtgctggaattacaggcgtaagccactgtgcctggccatgcatctcattttcaaacagtccctatacctttgtcatttaacgttctattcttttagtatgtgaaaaccaaactctaatttacaagtcacaaagaattatccaagacagactcccattgtggacatgtatgtggcattgctgattcacagctactgtactgaagccttggccaccctggaggaccctctctctttttgctggacccttctgcacagtgactgcagtagggagagtcagacctgggggtgggggagaggttttttggattcctctctgggtagatgtgtgttgggaagtagtgaaatgttgatagctgcctggctcatctgatccagtaaacataactggtgcgtttgggttgaaagaaattgggctttccttatcagttctcagttataagaacatcagtcagcagtacattagacttaagctttgcattccttgcgtttttttgtttgtttttctcttcctggaaaaaagtttgcttctctcataccatctgacttacttccaggcttttctcccttgtggaacgagtgccgttgagccctgctgcactctcagacgggctcctccgaagtgccgcaggtggtggtaaatcgactctcacccactggggtcgctccttcgtgtctccccccggtcggttcatctgttgctctggctgcaggaggaacgagtgagcttctggtcggcgtctgccatgccgtgtcaccccggcttctggcacctcctgtgcgtgcccaggattgtgaatgtgggccgtgtgtgtgaggccacgggtctccctgcagccactctcctgctggagctctgttactggcacctgtcgctgcctgcaccgaaggctggcagcacctcctggagcttgggacccagagcacagcctcccaccatgagatgtgttgtttttctgtggatcagtcctcctttctttctgagcctggcgtgttttgttctagtttgttaccgtcctaagtgcctgtaggccctgctctccagggacgagactcgggctctacccccaactcagaacccagagcaagagtggtcgggcccgggcccacaacagtgctcagctgtcctgctgcctttgtagttcaagaagtgtccattgatgaggggaatggtcctggctcatgctggagttcctgactcgcatccctgtggagatgaacttcctcgtcagggcggaggcctgccaagcagtccccccaggcttctcttgctcacctttgcccatttttattacgaaagaaaaccagttccttgatagataccaggaccatcagcctcaggcctggaggaggagaggaggatgatttgggttcgggctgtaagaggtgtgccactgagaaggagggatgctgtgagcaggcttaactgagctcatggttcagtg

SEQ ID NO: 27885 - DNA, 2300 bp, Homo sapien
ggattctcctgcctcagcctcccaagtacctgggattacaggcatgtgccaccatgcctggctaattttgtatttttagtagagacggggttttgtcatgttggccaggctggtcttgaactcctcgccttaagagatgtgcccgctttggcctcccaaagtgctggaattacaggcgtaagccactgtgcctggccatgcatctcattttcaaacagtccctatacctttgtcatttaacgttctattcttttagtatgtgaaaaccaaactctaatttacaagtcacaaagaattatccaagacagactcccattgtggacatgtatgtggcattgctgattcacagctactgtactgaagccttggccaccctggaggaccctctctctttttgctggacccttctgcacagtgactgcagtagggagagtcagacctgggggtgggggagaggttttttggattcctctctgggtagatgtgtgttgggaagtagtgaaatgttgatagctgcctggctcatctgatccagtaaacataactggtgcgtttgggttgaaagaaattgggctttccttatcagttctcagttataagaacatcagtcagcagtacattagacttaagctttgcattccttgcgtttttttgtttgtttttctcttcctggaaaaaagtttgcttctctcataccatctgacttacttccaggcttttctcccttgtggaacgagtgccgttgagccctgctgcactctcagacgggctcctccgaagtgccgcaggtggtggtaaatcgactctcacccactggggtcgctccttcgtgtctccccccggtcggttcatctgttgctctggctgcaggaggaacgagtgagcttctggtcggcgtctgccatgccgtgtcaccccggcttctggcacctcctgtgcgtgcccaggattgtgaatgtgggccgtgtgtgtgaggccacgggtctccctgcagccactctcctgctggagctctgttactggcacctgtcgctgcctgcaccgaaggctggcagcacctcctggagcttgggacccagagcacagcctcccaccatgagatgtgttgtttttctgtggatcagtcctcctttctttctgagcctggcgtgttttgttctagtttgttaccgtcctaagtgcctgtaggccctgctctccagggacgagactcgggctctacccccaactcagaacccagagcaagagtggtcgggcccgggcccacaacagtgctcagctgtcctgctgcctttgtagttcaagaagtgtccattgatgaggggaatggtcctggctcatgctggagttcctgactcgcatccctgtggagatgaacttcctcgtcagggcggaggcctgccaagcagtccccccaggcttctcttgctcacctttgcccatttttattacgaaagaaaaccagttccttgatagataccaggaccatcagcctcaggcctggaggaggagaggaggatgatttgggttcgggctgtaagaggtgtgccactgagaaggagggatgctgtgagcaggcttaactgagctcatggttcagtgggagttgagtgttctcatcacaggctttggtggaatgtactcttgacatctgtccccaggagcctggtctccagaaacaccagctcaggccctcaaggtctggctctgatggttctgtgggctataggattctgatctgttagcgaggtgtgttcagaagtgtgttgaggacaccagtgcaggagagcaaccagtagaacagaaaggtctggaagcagcattcttggcaaatcttctagattcccaatgcccagacagacctggaggtgctgtgggcttgaacatgtgggtggcctcccctcccaggctgccccgagctgcccaagctttccttgccctggtgctccttcttgcagaggctacacgtgccctctccacctgcccaggcactgagtttctttgttgcgatcaccttgtctgttgtccctctgtcctcaaagatgatcacggaagccttggcccaaggtgggatgcacataagagcccggttcccgcctaccaccgctgtgtccgccatcccgtcaagctccatccctttgggcagacagcccatggcacaggtatttacggggcagcgcccagggcacggctgggagctcggggcgtcctctgagcgcctttgtaaagcgcacctgtcattatcatcgccggtgacttcttttatggtggctttcagagtgccaaacccacagtccctt

SEQ ID NO: 27886 - DNA, 2300 bp, Homo sapien
ccctctgagctccctgttcccaacctgtgacacacaggtgacaggtggtgtgcactcagaaactccttccctaggatgtgtgacattcttgtcctggggcctttgctagctgtgacacaccggcgcccgacctctctggctgcctccctaatgccagttgtgtcttcagatgagtctttggggggctgcttctcatcccaggtgctggacttggactgtccaccactgacacctgggcacagggcctggctttctgctcttgtgctcttggaaatgaaagggtgcccctcgtttgtttttcttcccactagaaatctccctgtctcccatcctgtaggctctgctggccaccagctgccctgacctggggcagctgaagaactgagatagacctaagttctgggtgggtgcttggaggccccacgggcgtggctggtgagattgccgcttcagggccaaagtgggtgccgggcttcctgaggttcgagagcagatgagaactcttgagtggcaatgagggctgtgtggtggccttctctgcttggcagcctctgcccagcctgcagctgccttgctcctcagagaagcgctgagctttaggccacagaaaagagctgaccatcttctagaagggacagctgctcaggcacaggcgcctctctggaagaggcagtcaggtagaggcaaggggaggggccctgaccttcaagcaggaagagaggtgagcttgtgagacagctttctggggtgcaggtagagagtagcagcaagtcaagcatgggtcagaaaaggcagagttgggctgagcatggggcccagagtctttgcttcccactcctcggtgccgtctgtggttctctgtatggaattttctggccttgggattttgttgacacctggataagtctagaacatgtgttccggtgtctgggacatgcccttactcctcttcagctagggctctgtgcaccccagcaccgtgaatgcacaggactttggtgggagaaatctctgtacttgttcaactcagcatttagcaaatgaagtcacatcagtccccgtttctgaccttgctaacctttgcgagaatcaccgcgagccattttgctccattaggtagagtgatgaggcccggcaggccgaggctggggctcctgcactctgtccctcctctcccaggcagaggtgtcttgaccacaaagcagtgggaacagtccattccatcggttgatgtcccactgggccagtggctttggatagggacctctgacccagctgtgctggaagtaccctgttgtggtcacgctctgtgccttagccccccaccccctggtctcccagcacacgtggttcaggaacggcctgcacccagcatcccttgcagcactgtcaggcacagcccatggaacaggcaggacagaaagagcatttcgctccaggagcttggtccacgtggtgctgaaagggcagtgccaccctgccctctgctgcctggtggggtggtgaggagggcagcattctgtttgtgggctctgggcctggtccccaatttaaggagcttagaaagcagctgtcctatcccagtactcacagcactgtggtggaagtgcttggggggtggtgtgagccgtggcccgagacaggcgttcatggccagagtgccccaggagaagcactgagttggtctacagaaatggatggtccaggggcctggctcctaggcagactgtgaggggatgcttggcatgcagggggttgactagggtgtgggaaatgtagcagggccttcagggttcccccagtgtgacaaggcatccctctttgctgagagtccctctaggggaggccagacgcccagggctggcaggcagctgttctccccatcaaagcagccatctgtgctccaccccaggaaggtgtgggtgttttacatatgcttatccctgatgcctgggtggtgtggtttcatccctagagtttacggatgaagacagtggtgtccctggtgcagacactggggtgattgatcttatttgtgtcgtggccagcaaggcctggggagcagagcaacagccttgctttgcatacacacagggcctcagaggactcaggtgcacacctgcatggcagaaccaggctctgggcccaggtgtctgacactgagtagctcgcctctcccaggggcgctggtgtgggccgatgcaagtgccaccatgggtgtgtgtgtggctccctgggccacctcactccaattaagcaggtccaggtgggacagcctgggaccagccctgcagcagcat

SEQ ID NO: 27887 - DNA, 2300 bp, Homo sapien
atacacaaaatatataaagaagacaagaactactcaaaaacaaaaatgcaaataatctgatttaaaaatcagaaaaagatctacccaaaagctttctcccccatcattatttccctgccttcttttcctgaccgccttcggacccctccctctcgccatcctttttcttcctccatctaccccaaaacttcttccccatcattttttccccaccgtcttttcacaacaccttctctactctcccactcaccactcttttccccatctacccaaaaacttccccacagtttttacccaccctctttttcccccttccgctctcattagccttttgctcctccatcatcccaaaaacatttccctccatcttttcccaaagcctttttcctactcctgctactcaccaccctctttgccccctccatctacccaaaaactgtttccccatcgtcttttttcccctccttgctacgctcttttccatctatccaaaaacgtttccccactgtcttttcataaagccttctccccacttcggctcgccaccctcttcccccctccatctaccccccaaatttttccccactgtcttttcacaaagcccttcctccttcccgctcgccctcttctttcccctagcctgcttgccaccctctttttgccctccatctaccccaaaactattttccccatcatctttttcccaatcctcttccctacctccctctcgccaccctctcttctcctcccacttgccactttttcccctccatctgcccaaaagctttttacccacgttttttgtttctgcaccatctttcttttctgtcttccttcttttcgcagaaccttctctccctccctctcaccaccccttttccttctcccgcttgtcaccctcttttccccctccatctacccaaaaacattttcctccatggtctttttggaaaaccttgtctccctcgctcaccactcttgccccctcctactcaccaccctcttttccccctccatctacccaaaaacctttttcttgtctttcccccctcaccatcttttcacaaagccttctccccgctcctgctcaacaacctcttttccccactcccgcccctctcccacacgccaccctcttttcaccctccatctgccccccaaaactatttttccgtcgttttcccaaccctccttcccccctcctgcttgtcaccctcttttccccctccatctacccaaaaacttttcccccactcttttccccaccatcttttatggctcctgcttgccaccctcttttccccttctatctacccaaaaacttttctccccactctcttttcgcaaaacttcctctccctcttgctcgcccccgtgttttcccccctttactactctctctgtactccttccacctgccactctcttttctccctccatttacccaaaaactattttctccttcttaatgctcaggcggggctgcagtcttcattacagccaccaatcgcagagaggccagccgaggtgccaagagctccagcctccagcttgggacaggggtcttccccttctcttcctcctttaagccgggcactgagcagctcctgcactgtgggccaccctcctactactccggtggctcttcagtctccgtggcagcaaccaccaaccacagcagtgaggtgagccgtggtgccttaggccagagtgagggaggtgtctttcctttcgcctcttcctcctctaagccgggcaagagccgctgaggaggcaaacactaaagaatctgcaatggcctgacgtcccctcagcatactttatatagggaagttacaccactgggtcctgaactacatgttctgattggatgggagaaaaacctctaggcctactctgattggactttattatcatgttctgattggatgagagcaattcttaaggcaaccaatcagaacatgacaataaagtccaatcagagtaggcctagacgttttctctcatccaatcagaatatgtagtccaggcactcagttgcaaaacctccctatataaagccggctgagggggcaaggaatcaggccattaccgggctctcctgtgtctgcataccctgatgttcggtgcccagcttagagaaggagaagggtaagacgcctgctggatgcggtaggcttgagcgtgtggcaacgtgtttcgcttagctgaggttggtggtggccatggagactgcagcggggagagcggtaggagggcagcccacagtgggagtatggccagagtggtagaaaaggaag

SEQ ID NO: 27888 - DNA, 2300 bp, Homo sapien
ccaggatctcagcctctgctcatggatcagctctgagaccccgagtgagctgggggtgctctgtgcgcattggtttccccagctgtcaagtaaagggattggatgaggaagtcttgtcaaggtggaatgatctcagatttggggcagcagtgaaggatcccgctccctgggccatgccagtggcccggcctcggctgaacacagccccaacactctggaatggggatgagggggcagtcagctcttgctcctagtaagagagatgcaacagggctctgtggctgagctgggtgccttgcctcacacttgtaatcccaacctttgagaggccgaggcaggaggattgcttgaggccgggaattttgagaatagcctggacaacatagccagaccccatgtctacaaaataataagaaaacacacagctatagtccaagctacttggcaggctgaggcaggagggtcccttgagtccaggaattggaggctgcattgagctataatcgcaccactgcactccagcttgggtgacaaagtgagaccctgtctctaaaagaaaaaaaaaattggcctgtgagcatgggtttgatcttcaaacaggacctggagggtagggacagacagtgctgtcacccttaggtgctgaacactcagaaacgggccagcggcagcccttccctcacctgcagacaccagattgggcagaacagcacgtggcacttgcagctcttgcagtgagggcagaacccagtgtcaacccttctgcctgtgggaggggctgctgaggcctgcggagaggccagggtggaggctcgtccccttgtccagcccttggcgtggtctccaccaggtccccagcccaccagtgcagggcgcccctgagcctgctgctgccacgggccctgtctctacccaggacgtccccccaccctcgctgtgtcagggaaatgatcatggtggcggtgacactccgcaggcagggctgctgagagaagctgagaagggtcacactgcaggcagaggcccgtgtgacaagcccctctcaccccgagagagctgaccaggcagctcacgagcagagccacatcccgggagtccgagaaaggtcctggctgggctcagccacctcattggccacgggcagcctttgtcgtgtgagccttgctctcctggggaggctcaggctgacggctgatgtgggcattgccgagggtaacctgtggcccagtgtatatggccgggtctcctcaagctgcattcattcaagtaggacccagggtgcgtgcccatctccagcccagggcagctcccctgtaagctgggtgagctactgaagccaaggcaggaggcagctgacaacacccacggcccatgcagaggtggtggaaaggctggagtcagcagcaacaccaaatcccggaccaggcagaaaccacccaagactgaggggctcgtgccagagcggtggccacaggtaagaacccgggcccaggctgtgtggcaggaatcctccatgtcccagggcttagcatagcaaaggaagaccagccgggtcaccctggtggccatctgtccctgtcccacctgcagagtcagaacagcctctccccagtggggatcatctctctctgccaaagcaacagcggtccctgccccaaccagactaccccactcagtggagttacggatgctgctccagcatcctaacactgcccagctggtgcctgcctgtgctcacccgcaccccccaggccggccttccctgcagcctgggcttggccaccttggcctgattgagcactgaggcctcctgggcacccagccccatcactgcacctgctgcttccagccccaccccacaagctcaggggttcttcccagcggcgctgatcatgaagtcaacatgcacgcaagtcgtctcaggaaactttttaatgaaagtgttggccacggtggtgtgtaggtggctgagctcagattgcagctgctgagacaccagccacttaccaagagaaagccaggctgcttcaaacccagggcccgcggcaaaaaagcatcacttccggccggggagtctggaagccacgccttgtgggaggtcacactggcatctaggccttcgcctgcactgcagaaggagagccgggtccccctcctggagaacgctgcgttccccagccccacaccggctttgccaccacacaggctgttgaggcaggaggcgggtaagacgtagctgtagacccaaagcaaccaccagccctgggaccctgcgggagagaagcacttttagaacatgg

SEQ ID NO: 27889 - DNA, 2300 bp, Homo sapien
cctcagggagagagtgacctcgaccctggctatgagccaatgcgcccggcctctcactcttctttattcagcataatttattctgacgtatcttcagtgtaggtattctctttttattctcctattcctgttaaacccattgggctgaatgctgtttatttctagaatgtctacacctgtttttctgcaaggtcatttttttttctcgtttgctgttcgtcacatatactttcaagctcatcggttccctccgtgagtacaggtaagtggaggagcctcatggtctgcctcaggtctttgagatgttgagtctctggatctggtcctgctgctggccttttctgtccttgctcatggggcattgtttccgtgaatgtgtggttacttttgactgcattactcattgtcctggaaaaatgactttgtgggaatttttcagacctagggtaaagatgcttcctccaaactaggtttacgcttccttctgccaggtacctcagggcgctgtcagcctaaagccaatttaaactaaatccatcaactgtgaggttttggaatcttctcactggtgtgaatttgggccataagtcccaaattctgtggggtgctctgtggggtggggaccagccttagagttctcatcggaagcccggggtggctggatgggggcagatgttttcagggcaagagcggcttggctcgcctctctggtttctggtttccccagatggtgcctggcggctcctcactgtcttgtcagcccctggatgcctttaagaaaacatccttttattttgtcagcatttttggtacttctcagtgtgagggctggtccaagtatttggcttatcatagttttacaaaaagttggtttctatgaaatcttaagtcacctcttttttaaaaatgtaccttttagtccgggcacggtggctcactcctgtaatcccagcactttgggaagccggggcaggcagatcacttgaggccaggaatttgagaccagcctggacaacatggtgaaaccctgtctctactaaaactacaaaaatcagtcgggtgtagggccaggcgcaggggctcacgcctgtaatcccagcactttgggaggccaaagcaggtggatcacctcaggttgggagttcaagaccagcctgaccaacatggagaaaccccgtctctactaaaagtacaaaattagctgggcgtggtggcgcatgcttgtaatcccagctgctcatgaggctgagacaggagaatcacttgaacccgggaggtggaggttgtggtgagccaagatcatgcgattccccctgcctcagcctcccaagtaggtgggactacaggcaagcaccaccatacccggctaacttttttttggtatttttagtagagacaggattttaccatcttggccaagctggtcttgaactcctcacctcgtgatccacccacctcggcctcccaaagtgctggattacaggcgtgagctaccgcgcccagactaaaagcgcgcccggccgtctactacttcttatagggtgagaggcgggaggatcgcttgagccctgaagtttgcggctgctgcagttggctttgatcgtaccactgcactccagccagggtgacagcaggaccctgactctaaaaaaagaaaaagaaaaaaaagcatatactattaatacttcctccttactataatatttaccgtggcctttatcagactagagagtgcttttatctctcccttttgtaagaaagagcttttagaattatcaatagatggtcaggtgaggtggctcaggcctgtaattccagcactttgggaggccgaggtgggtggatcacgaggtcaggagttcaaaaccagcttggccaagatggtgaaaccctgtctctactaaaaatacaaaaaaattagctgggtgtggtggcgagtgcctgtaatgccagctactccggaggctggggcagagaattgcttgaacccagtaggcggaggttgcagtgagccaagattgtgccactgcactccagcctgggcaacagagtgagactctgtctcagaaaaaaaaaaaaaattattaatagatggtgaccctcatcttcacgttttctgcatctattgaagtgcgccactgagatcgtggagttcttccctgtttgtccatatgatgaacaacactgattttctgatgttgaacaatccctggaataaactctgtttggtttccatggatttctgtttccctttagattttgttagtaatttattttggatttttgcatccaagttcata

SEQ ID NO: 27890 - DNA, 2300 bp, Homo sapien
tcccagcactttgggaggctgaggcgggcggatcacgaggtcaggagatcgagaccatactggctaacagagtgaaaccccgtctctactaaaaatgcaaaaaattagccaggtgtgatggcgggagcccgtagtcccagctacttgggaggctgaggcaggagaatggcatgaacccgggaggcagagcttgcagtgagccaagatcatgccactgctctccagcctgggctatacagtgagactccgtctcaaaaaaataataaatatttatttatttattgagatagagtctttgttgcccaggctggagtgcagtggcacgatcacggctcactgcaacctccacctcccaggttcaagtgattttcctgccccagcctcccgagtagctaggattacaagcgtgtaccaccacgcctggctaatttttatatttttaatagagacagggtttcaccatgtttgccaggctggtctcgaactcctaacctcaggtgatccacctgccttggcctcccaaagtgctgggattacgggcgtgagccaccacacccagcctatttttgtatttaatagacatgaggtttccccatgttggtcaggctggtgtcaaactcctgacctcaggtgatccacctgcctcggcctcccaaaatgctgggattacaggcgtgtgccaccacacccagcctggaatattttttaagtttaaaaaaatttatatcactatggcaatacaaatgtatatacatatttgtttatacttttacaaaaaaagggaacagtaggccgggcgcggtggctcacgcttgtaatcccagcactttgggaagccgaggcgggtggatcacgaggtcaggagatcgagaccatcctggctaacacggtgaaaccccgtctctactaaaaatacaaaaaaagattagccaggcttggtgggcacctgtagtcccagctactcgggaggctgaggcaggagaatggcgtgaacccgggaggcggagcttgcagtgagctgagattgcactccagcctgggagacagagcgagactctgtctcaaaaaaaaaaaggaacagtaaatcaaaagttaataaaaatggccaaagagggagagatcaggatggaactgacagatatgtaccatatttaataattttgactttggaactctgtcagtgtttacataattaaaaagcaaacttatatttaaaaacactacacattgaacattcatagtttgtctttagatccatttgccgggttagaattgggaaacccaaagtgaagacttctgcctgtgtggtaagaccacccccgactcacccaggtcaaaaatgtccatccaagggacacttcaccagatcagtggccacagactccaggaggctgcccagaaaggccagctcacctttttaaacctagggcatggaattaaaactggagtttcaaaacttatggctctaggaacaaaaaaaatttttttaattaaaaagaaaaactggagttactactatgagtggcggaaaatgaccaagaaggaagaggaggataggtccttaggatggtgaccacagttgtgtatattagtccattttcacactgctataaagaacttcctggccaggtgcggtggctcataactgtaattccagcactttgggaggttgaggtgggtggatcacctgaggtgaggagttcaagaccagcctgaacaacatggcgaaaccctgtctctactaaaaatacaaaaattagccagatgtggtggtgtgcgcctgtaatcccagctactcgggaggctgaggcaagagaattgcttgaacctgggaggtggaggttgcagtgagctgagattgtaccactgcactacagcctgggtgacagaccgagactctgtctcaaaaacaaacaaacaaacaaaaaaacttcccgagactgggtaatttataaaggaggcttaattgactcacagttccacgtggctggggaggcctcaggaaacagaatcatggtggaaggggaagtaggtccgtcttacctggcagcaagcgaaagagagcaagtgtgtgtgtaggaggaactgtcaaacatttataaaaccatcagatctcctgagaactcattcgctgtcatgagatcaacaagggggaaccgtccccatgatccagtcacctcccaccaggtctcttcctcaacacctgaggattacaattcaagatgacatttgggtggggacacaaaacctaatcatatcagtgtgtcagtttgtgaaggaggtatctctgcatgtttctg

SEQ ID NO: 27891 - DNA, 2300 bp, Homo sapien
tcattctttctatttgtttgtacccaagccgtcacttggtattgatgtgaatccctccagttcagtgtttccccctggctcccctcactccagtgtggtgggagagtgcaggttccctggcgaggcagcaccacccataccctctgtgcactgtaggtttaagaacacagaagccattgggaacgaagtgacccgtctcgttcggttggacccgggagccgttagtgatgtgcctgaagcaatcaaggtagtgtagcccacgtaccagggcctgagttcaaactgcacaaaatagcacactgcacccagaaatgcctgaaactagaaatgagacaaaaacagccgcttggcaacttcagtgctattcatggtttttctgatttcctgtgttttctatttcttgtctgtagcatttattttgttcacagtagaaaaaaatgtaatgcacttcaccctaattgcagttacgttgttttccataacacatcagaagcatcttccccatggttaccgatgcttagaaacatcacttctcatggccgtccttgtgtggcccgtggaccaggtatttccagaggtcccgggactgcccaagccacagcatctccccaccttctctgcagttcctggtcacctggcacaccatcgacgccgatgctccagagctcagccatgtgctgtgctgggcgcccacggacccacccacaggcctctcctacttctccagcatgtacccgccgcaccctctcacggcgcagtacggggtgaaagtcctgcggtccttccctccggtgagcccagggccctgctgagctggcctctggtaggactgttgggaggggtcttacctggtgagaggcacaggccccaccattggccatgaggtcgccccgttacatactggtcctttccctgttttttgctcaagtagttgtagaagatggatttagttctaattcaaatgtgttctctagttacatttgttttttaatctagtgaggcgtttgagttaaagacataaagttaacttgagtttgattacgaggcggcgcggcagctgtgcacaccccacacagcagtgcagctagctgtgccttggaaccccacagtgacctcacccgtggagggtccctcactccttgtgggagcccagggagcccacgagatagccatgatgatggtggagaagggtctctggaatattctagagtctgacccacagcagaccattccctgaggcaggctccctagtgaggagcacgaggccctcgcccgctgtagagcgggagccttgctccttttacctgtttcctccattcctgtgttctgagccatcggtcattttgcctgccatcctctgggctttccccagttctcagccctgctgtgggcagagcagaagcagaggcagggcctgggccgtagggttgggtggctctgctctcagaagtcatggccaactctgctccacctccacaggacgccatcctcttctacatcccccagattgtgcaggccctcaggtacgacaaggtaagcctgcacctgcatggccgtcctcttcactcacagagtgtgttccacaccagcttgtgcccggtctgtccccagccctcacaggctcctcagagcctcctcaggggcagggctgcccagcagtccccttgctccccctaccccaggccctgtgattgtcccttgatacccatgttcacccactgcctcaccctgaggcccaagcatgctctgtggagcgagccggttctggggctgttgccagcctggctaggcagcctggccaggcttccctctcatcggtggggtcccctcaaatccctgaatcctgccctcttcagccggaagtggtgaggaaaattaacgagatgacatatgcattagtctgccagggctgcatagcgaagcaccacagactgggcagcttaaacgacagaaatgtctattctcattctcagaattgtggaggccaaaaaacaaaacaaacaaacaaacaaaaaacatgaattctggaggccagaagtccaaggtcattgttcgaacagggttgtttccttctgaggcctgtctccctggctttttttttttttttaagagacagggtctcgctctgtcactcaggctagagtgcagtggcgtgatctcagctcactgcagcctcaacctctcgggctcaagctatcctcccacctcagcaccttccccgctacccctcccaagtaactgggatgacaggcgtgtgcgaccacgcccagctaatttttgtattttttgtagagatggag

SEQ ID NO: 27892 - DNA, 2300 bp, Homo sapien
cggaactggaactagaccaggccggagagaacagcgtggccaactggagatctaagtacatcagcctgagtgagaagcagtggaaggacaacgtgaacctcgcctggagcatctctccctacctagccgtgcagctgcctgccaggtgggcccccgggcaccacagcctgacacaggcctcaccagaggtccagcgcagggtgcttgccagctgggtcatgagttctcaggagtgccctgcagcccctttcaaggatagtcaggaagtagtctagtcctcgagccccaggacactccccgagcccttctgtgcagagataacccagcaaccctcgtgatcttttcagatgcctgcctggggtgctgcagcagctggagcctagggaggtagcagcagggtgaattcagagccaagatctgattcctgccggataggaagcatgtggaggctgtcactcctggcaggtggctgccggaaccgccttggggagggtttgggtttgttcctggatgtcacctttcagtggcagagtatttggaggaggcacatgctgcagacagcagtgacattcctgtgatctctctgtggcagctcttatggggacagaacttcagaccgatggtggctgagagggactgcagagtccctgtttagaatcccaccagatggtccacagcctcctgtgaatgtgtccagggtgggtgattctccattgtgagcccagacttgccaatgtactgcatcctctctccagccctactttgatcctctggaataggatcgcagcgcagctctgcattgtctcaaagcacagtgctcatgggacatccgccttgcattagcctgaggtgggaacacctggaaaccagtagctgccccttcatggaccaggtgccttgtggcccctggactgttgactgagacactgactcactggatgagcagctgtggagagtcaggagaggatatggtaggaaaaggagtaagaggcaggggttttaagacaaggatggtgaaaggaagccctttaaacagttaagtgtagaaaaattcctgtttctttaagaaagttccagcatttcatcacagcagattataatcctctttttaaaaaacactaatgttcagacctactagttagtggcataatagaacatttagccgtcacctggctaaacatttttttatttaaactttttttttaaatttctgtgcatatgtagtagatgtctgtatttatgaggtgcatgagatgttttgatacaggcatgcaacgtgaaataagcacatcttggagaatggggtatccatcccctcaagcatttgtccttggagttacaaacaatccagttacactcttttaaagttatttttcaatatacaattaagttattattggctgtagtccccctgttgtgctatcaaatagcaggtcttcattctttctatttgtttgtacccaagccgtcacttggtattgatgtgaatccctccagttcagtgtttccccctggctcccctcactccagtgtggtgggagagtgcaggttccctggcgaggcagcaccacccataccctctgtgcactgtaggtttaagaacacagaagccattgggaacgaagtgacccgtctcgttcggttggacccgggagccgttagtgatgtgcctgaagcaatcaaggtagtgtagcccacgtaccagggcctgagttcaaactgcacaaaatagcacactgcacccagaaatgcctgaaactagaaatgagacaaaaacagccgcttggcaacttcagtgctattcatggtttttctgatttcctgtgttttctatttcttgtctgtagcatttattttgttcacagtagaaaaaaatgtaatgcacttcaccctaattgcagttacgttgttttccataacacatcagaagcatcttccccatggttaccgatgcttagaaacatcacttctcatggccgtccttgtgtggcccgtggaccaggtatttccagaggtcccgggactgcccaagccacagcatctccccaccttctctgcagttcctggtcacctggcacaccatcgacgccgatgctccagagctcagccatgtgctgtgctgggcgcccacggacccacccacaggcctctcctacttctccagcatgtacccgccgcaccctctcacggcgcagtacggggtgaaagtcctgcggtccttccctccggtgagcccagggccctgctgagctggcctctggtaggactgttgggaggggtcttacctggtgagaggcaca

SEQ ID NO: 27893 - DNA, 2300 bp, Homo sapien
cgaggtccctccattcactgtagatgccagcgaggtccctccctttactgtagatgccagcaaggtccctcccttcactgtagatgccagcatggcccttcccttcactgtagatgccagcgaggtccttctgtctgctcagacgtctttgactccctcttatgcacatcccacagatgactctcagcacatcccatcaccttcacctttgaggtttatccaggatctgacaagtcccagcatcccagctgctgccctctggcctggcctcctgctccccaaccccaggcatcttccccttctccacatgcggttggcgcaagccaggggggaatcagagcccccctacagactcgaaggtgggcttgtttctgtgacctgcaagcccccttcccacctgacttccatcctctctcttccccttgcttgctgtgctgtggccatgctggggtcctgcttgcacttcccacggatgattctcagcacatcccatcagtttcacttttgaagctgccctcctgggctgctcccaccataggccgcgtcatgcattccctcttctcagatggccgtgccttgcgcctcactcctgcgtctcctccagggctcatctcagatatcccctccttgccagggctctccctggccacctggtctgtcacacgctcactcgcactgctgtttcttagtgtttctcagtgtgtgtagcttatttcttgttgtctgtggtccccaccatagactgtgtggtcatgtttgtcttcattcagagcaccatgcccagagtccacgaggccctggcacagaggcagccaccaggatgtggttgtgtaacaaataggtgggagtgtgtctcttccatggcttcttgtccatggcagttctggggtcccccccatttttttctcccttgtctgcttccataagactaatcggtctgcaggaaacagaaagcaggctctagtgcctcgtcccccaggagtcctcaccccatgggcagcttagagggaagcagcagacagagccccgccccgggctcccgtcggctcctggccatcctgggcttatgtggcctttgtctccaccctcacagcctccagatggcttctgtgcctcccagcaggaaggaagacaaggacagagtgcaaaaggcagaggccagctgccttgaccttatgaagctcaccctggcatgtgttcccagggccttgcccagttcactctccctggctcattagagtggccggggagaacagtggccgcctcagccagcagggaccctggctgagagccctgtgactggccacgtggccaccctgatccacctcatgaggaagaagggaggggatggtactggggagggagccgcggtgtgtgttctactcactaggcctcgttgccacctctgcacaggcgcttggagcccttgtagaagctggtgctgctgggacaacagagggatagaatcctctttggccagatgccaaatgctgtttgttggtctccttgtaaaaacacccagaaatcatgggggctttccatgtgtgagctgcacctcttactctctgcagcacccaggtgtctcccgggcaccatgctgctccctctgggcacccctcatgcccccccacggaatggggacctggctgagcatgactgggccatgggagcagcctgaccctgggctcccaggcctggccatggtggctgcaggctcgcctcggctccatgggcctttcctaatctggttagcgggatgaaggcatcaggtagggtctgtgtggggtggagaggaggagccaggctctggatccagaaccctcttctgcccttgccagctcagcatcccacagaggggtcttcccgctcacagccacagagggttatcagggttatagagaagagtcacctacccagtgcctgtcagggcatcaggtacatcccgggtgctgccacctcacacctgcaatgtccacacggtgaaccgggttgaacagaaggcagcctcgagaggctggagaaaatacaccaagcactgacacagatgaccctgggatgtgggactataggcgatcttcatttttttcttcatacttttcttggtttctaaatcttattcagtgagcacgtgttcctttttttaattagagaaaacttgacagtagcccctttttgtgtttcacagaggagctaacattccttctgtacctgtagttcatgcgggagatggcaggggcctggcacatgacggtggagcagaaatttggcctgttttctgctgagataaaggaagcagaccc

SEQ ID NO: 27894 - DNA, 2300 bp, Homo sapien
gtaggcaactcagctgagcgagcgcccggcctgtgtgaagaaagactactccaacttcatggcatccctgaatctgcgcaaccgctacgcgggcgaggtgcttctcttgtccttgcgccctagggcctttaacgtgtcctcttgttttgaggcctgttggccgcttcctagtggaaaatgaacaaagcgtcccggtgatgtggaattaacatattttaggaggatttaaagagcacattttaggaggattcttggcacattccagagtgttaatgaccagttacttgttttttccacaagagggtaactctgtgtacactttggctacactgaatgaaggtttttaatttttttggcttttttttacagcagtaacaaacacttacatgccataggctcttgggcactcggtaagatgtatgtattattattccagttttatagataaacggaggttcccaagattaagtaacttgccaaagtcgcacaagtggagtggggtctggaaccacatcttccaactccacatcgtgggctttcacccaccacaccacagtttattccagcctcaccagtgccatcacatctgtgggcctccatttcctgctccataaactcagaagctaatctataccatttctttttgtttgtttgtttttgtttttgtttttgagacagagtctcgttctgttgcccaggctggagtgcagtggcacaatcttggctcactgcaagctctgcctcctgggttcacgccattctcctgcctcagcctcccgagtagctgggactacaggcacccaccaccacgcccggctaattttttgtatttttagtggagacggggtttcactgtgttagccaggacggtcttgatctcctgacctcatgatctgcccgcctcggcctcccaaactgctgggattacaggcgtgagccaccgcgcccagcctagtctatgccatttctaagctccctggtgactctgaaagtctatcagtggcctggtctgagtgggagttcactccttcttagcactctgtcacttgtatgttcttctctctggaaaaaaaagttatatttgtctttaaaaatagataggttggccaagcacagtggctcacgccagtaatcccagcactttgggaggctgagacaggaggatcacctgagcccaggagttcgaggatgcagtgaactatgatcgcaccactgcactccagcctgggcaacagagcaagactctgtctcaaagaaaaaattattaataatagtaaggagggctgggtgtggccgctcacgcctgtaatcccagcacttagggaggccaaggtgggcggattatttgaggtcaggagttcaagaccagcctggccaacatggtgaaaccctgtctctactaaaatagaaaaattagccaggcgtggtggcgcatgcctgtaatccagctacttgggaggctgaggtgggaggatcacttgaacccaggaggcggaggttgcactgagtcgagatcacgccactgcactccaacctgagcatcagagcgagactccctctctcaaaaaataataatgaggctgatattgttgtttgagtcattaattgagtttgaggaaatgtatttatccagctcacattcatgcagtcccaccatgggtcagaccccgggctcactgctgggtacaatgatgagggacaaggttcccacccttggggaacatctgcagtggtggcactgccaacatgcatttctagaggagctgttctttaaaaaaaaaaaaagctgtgatcagtggtagcatcattgaaatgagcctgtctctctgcatgcatgagctccactttggggcagcgaggcacccaccagtgccaccacaagtgtggtctggtggcttccagaaccttacccacattgcctggattatatgcttagttgctgatgagaatgtttttgcaggtgtatggaatgattcggttctcaggcaccacaggccagatgtctgacctgaacaaaatgatggtccaggatctacattcagctttagaccgcagtcatcctcagcactacacgcaggccatgttcaagctgaccgcaatgctcattagcagtaaaggtaactcactgaagcactgtggaattctgggctcgtttctaaatgaatgctggccttgatgacccatagccagctggagtactggccggagaaagagcaggagctcccccagtagaggagtatctctcatgagtggaaagtcaataaaaggccatcactggccccagctggtcaactcttgtt

SEQ ID NO: 27895 - DNA, 2300 bp, Homo sapien
atatgtaataccatgaaatgatgaggactaacattttctgaatgccaggcaccactctatgtgctttccacacattcattaacctcatttaattttctcatttaattaatgagataaattaatgtatctcatttaattttcacaacaacctcatgcagtaggtgtaactgtcaccctcatttcagagagcagaatactgagagctggaggccaaggggcaatttcagccagggtggctggtgacgcctcggtgaaaccaagagcgaacagtgagagcagcggccacctgctggtctgcagggatggtgtcctgggcagaaagaatagcaagtgccagggctgtgctggggccgggctttgcatgtgtgagaacaagacagagaatgagggaggtgggcccacgaggagtgtgggcacagacagcagcctctgcctgtggtgccacgctgaagactcagtattgtatgtgacagatgaaggctctaagaagacagctctgacaaaagctagagtgcaaaatcagactcagacacaaccaccggtctgtgtcctgaacacaatggacctttacactctggaatttctcaaacggagcaatgcacagacacccccatgggccccttgcacacccgcagattctcctaggagtcacattctctcttcagatagactctgggtgccgacactcccaaacatgctcttgaggagcagtctctgtgataagctgatcttccagacaatccagaatattcttaaaactttttagatcataaaatttaaaacacaaattaaaaaacaaattatcataaggccgggcacagtgactcatgcctgtaatcccagcactttgcaaggctgaagcaggaggatcacttgagcccaagagttcaagaccagcctaggcaacatagtgagaccctgtctctacaaaaaagtcaaaagttagctagacatggtggtgtgcacctgtattcccagctacttgcagggctgaggtgaggaggattgcttcagctcgggaggttgaggctgcagtgagccaagatcacgccactgcactccagcctgggtaacagagtgagaccctgtctcaaaaaacacatagggccaggcgtggtggctcacgcatgtaatcccagcactttgggaggccgagacgggaggatcacttcactccaggagttcaacaccagcctggccaacatagtgaaaccccgtctctactaaaaatacaaaaaattagttggacatggtggtgtgcgcctgtaatctcagccactcaggaggctgaggcaggagaacgcttgaacttgggagacagaggttgcagtgagctgagatcgcaccactgcactccagcatgggcagcagcgcgaaactctgtctcaaaacaaacaaacaaacaaacaaacacccataaacacaaaatgtatcacagcctcagagatccccacgaatgcctaagtggccctgaatttgggaggcactgctcagtaatagtcctatctgtcccacaacagacaggagtgctgggctgcacctactggcaacaaacacagcaacccttgactgaagaaaggtccatgccacaatccccttattctgtaagccactaattttgtcctctctcctccacctttcactgaggaacgagctcttggaaggacagggacacccgcctagtagctgagccagccacatcagtcctggagagcaggtggagggcagatgctgtgatcatcccagaagagaggacacagttggaggcagatgcatggtctctactttcagctaccctcaatgcagcctggtccccagaggcctgaagagcgccttgtttatgtggtgacctcaagaggggctgctcctgcaccaaggctatgtgtgcatgctaacacagtaaccgtcatatactcaaagtgtcagctctaagaactggagatgaggagctgcaagccactctacagttatcaaaggcacagctgagggggtttgtgctgaccaagctggttgcctggtgtttggattgggacttatttactttggaaaatatgcagcaacagcccagcaccaaagttcacatcaaaatcccactgatgaccttggctgctttcatctctgaagcgccacttctcagaaacacagaggtaagttgggtttctaatgtttctgctgattataaattatttttggtgtttacggataggcaactggttcatttttctagcaaactaagaattcagaagctttctacactgttttagaagtgggaaatggtttcatttttcagtgtgcctatt

SEQ ID NO: 27896 - DNA, 2300 bp, Homo sapien
aaactcctgggctcaagtgatcctcctgcctcggccttccaaagtgctgggattacaggcatgagccttgcacctggcctggatactttctagtgtggtaaagaggcaactaaagtaatctctcccatatcctgtccatcatcaagtcctcttaactcttccttcaaaacacatcctgaactggtctgtttctgtctctactcgttgattgctaccatgctaacatcttcgcctcagctgctgcaggagtctcctcagctgctgcaggagtctcctcacctgtctctgttttcactcttgtcctccaaaatccattttctgtgtatcagccagagggattcttctagacttcagttctaaacttgatgccctaaggcctctatgtgtttgttattaggatacaattcaggcttctgacctggcctgtggggccctctggggaccttctctgtctggacctgaactcctgggcctccttgcttcttcttttccactgtgctgctgcagcagcagcctttcctgatttgtcctggcttccttcttgatcagatcccaatttaaggaaccatcttagagaggccctccctgatcacattatcaaaagttgtctttcaggcactattgttggagaaataatgatgttatgccaattttgatgagttttcaagtcttcgtgctgtcttctagcacattagtttcatctgccaggtttgtagtggaatgtatcttctgtgttttagtgcagggtattgataaagtattgcataggacagagcaaagtacataggctttgatagggccagttcttccctgtgcttcagtgattgactcattaatcagcattctttgaatctcattgtctgcttttgccttccactagccactattatagtatatccaataacaatagataatgtttattgagcatttactatatgctgtgctcagtcccaactgcttcacacatttgatttttttttttgagacggagtcttgctctgtcgcccaggctggagagtgcagtggtgccatctcggctctctgcaacctccgccttccgggttcaagcaattctcctgcctcagcctcctgagtagctgggattacagccgctcgccaccatgcctggctacattttgtatttctagtagagacggggtttcaccgtattggccaagctggtctcaaacttctgacctcgtgatccgcctgcctcggcctaccaaagtgctgggattacaggcgtgagccaccgctcctggccatgcatttgattttttaaaagagtcagtgaggcattgttaatgcaggttggtttgggtaacctgttcgtggtcaaggggtggggacacccacttagactgtcctaacaccaaaatgcaaactttagccattgtgtcttaccccctctgagtatacacagttttaaccttcagctcatattactcagagtttatgtgttttgaggggcacgtgtacaattgtttcagcagctggagatgtcctgtgatcttttaactgaaaaaaaactatgacttattggttacatggactctttggggtttatggtagtggttttgtttgtttgtttgtttttgagacagagtcttgttgtgtcacccaggctggagtgcagtggcacgatcttggctcactacaacctctgtctcctgggttcaagtgatacttctgcctcagcctcccaagtagctgggacgataggtgtgcgccaccacgcctggctaatttttgtatttttagtagagatggggtttcaccatgttggccaggctggtcttgaactcctgacctcaggtgatccacctgtattggcctcccaaagggttgggattacaggtgtgagccactgcacctggcctattttttatttttatttatttaagagatagggtctcactatgttggccaggctagtctcaaactcccaactcaagttatcctcccacctcagcctcctgaatagctggtactgcaggcatatgacactgcactcagcttgctttattttgaatgtggttttctattttgtagagctgtttttgggggggtctcattttctaggtccaaaagcttctttgcatgtgtccagtggatttccatgggatcttccagttagatgaaagacggagagatgcagtgattgcattgggcatttttctgattgaatctgatcttcaggtaagtcttcatgaaattaaaagtttcttcattgtaaaagggggtgtagtgagcgtttaagtttgtatctgcttatatttacctaaagcaatagtagaaga

SEQ ID NO: 27897 - DNA, 2300 bp, Homo sapien
ccagcttcttaaagatcatccaattcactgcattctcttctctctcctcccagaatccagcaatcagtcataagatatatttgttggctctcctgctaagaagcgaatgtgctgactagctagcatgagtttgattcaataaaacagcactacactccattagtcagactatctaatgataacagtgctcatacattaggtacccacgtgcctttttgttgctcttcacaatactcctatgaagtactaccttgtatttgacagaagatagcaaagtatcagagaagggaactgacctgtctagagtcacactagtgaaagcaagtgatacaggatttaaattcagaggttccattttccaaactcatgtcctttccattgcattgtactccctctttagctagaagtcaggttagcaccaatctgccgggaccttctcaccccgaaggtgcatgataaaatcaaatatgagaaccgacaaggccaaggaccaggtcactctgccaaaagtgcctaaaacagcctttcagcttcatccatcagcagacagccacaaaaccactcccaactgcagcaggctggtctccggtcaccactgtcttatcttgtcggaaaacatcctctctccatgtgccaaaaagttgagtgggaaaataattccatcctttcagagctaaacactgtgctgagtctcatcgcacacgggtgggcaaagaaagttgacatttactgctcacccactctgtgccttgacctgtgcaagatgctttatgctagaactcatttaattctcaagaacaacctcattttacagataaggatacagaggctctaagagttaaatttacccaagaggacatggtaagtaagtgccagtgcagggaacaaattcaggtcccactctaaaatctgtctctttccagatctcaaggcacaccactgagttgcctttcacctttctcccaagatgaggattgctctggcatgacttcacctttctcttctgaagcaattccaagttcacttctctgcccactgacagttcactctcctttccctgccactgtcccttctgcaaacgcacaatcttttacccaacctaacgcccccagcctcgtagaataacactgcgcagttggtttacagtcacaaagcactttcaagacagtgtttcgtctcctggtcaccacagtccggtgaagccggcaaagcagataaaagcatccccattttacaagaaagccatcttcccaaggtcgcggaataaaaagcaggtgaaatcggaagcagaaccccaggtcttgacccctggtcctcggctcatcccactgctccgcacagccgcccacgatccagcctccacctccgcgatgtcacaagatgctccctgggccagcagctcacatcccccacccccatcccacaaccacccacctgcagcggccctgcaggccccgccgacccttcccccacggtccctctctcttcaccagcccctcccactagggcctccttcccccgctagatccctccgctcaggcgccccctcccgcacaggctgccggcgagcccagcctcggcctcccacagaccctcgtcccgcctccacgcttcgtcaccccagcccctcctcctgtcagcccgcggcccagcccgccgacgttaccttctccaaggatgctggtctctgcaccgccagggagcgggccagtgacaggaccgtgttgaaatagaagccccgcgaggcgctggagccggagccggagcagccgccgccgcctccgcctccgcctccgcctccccgggccggggccgccgccatcacctcacgagccgcggcgctgcccgccggctccccgctcctggcccgcgagcgcccgacctcagggcgcaggcgtaggtgcatccggctttcccgccacgtgacctctcagttgctgacactagatagggcgtggctgcggggcgggcccaccgctgcaggggagagaggggatggacagtaggctgcggttgcgcgcgccggatgtgggccccccccagccgacctgcgcgatggtcggctccgagggcggggccacctgcgcgcgacgcgcggaaggagttcgcgcgacgaccgcggggtcggcgggcggggcgaggccctggacggcggcggcagtggggctcctccttctgtttcccagaccgagagccgcgccggcaccatgtcagcttaccctaaaagctacaatccgttcgacgacgacggggaggacgaaggcgcccggccggccccttggagggacgcccgagacctc

SEQ ID NO: 27898 - DNA, 2300 bp, Homo sapien
tgtgtgtgccaccatgcctggctaatttttcaaattttgtagagacgcagttacccctgctggtctcaaactcctgggctaaaatgatctgcctacctcagccttacaaattgttgggattacagaagtacaaccgcgcctggcttatacatttttttaaacctttttttttctctgtccaaacaaaactgtttcattagcaggctgaagagagactgtggtgtacaataaagaatcattctcgaccggtatggtggctcacgcctgtaatcccagccctttgggaggccaaagcgggcggactgcctgaggtcaggagttccagaccagcctggccaacggggcaaaaccctgtctccactacaaatacaaaaaaaattagccgggtgtggcggcgcacctgtagtcccagctactcgggaggctgaggcaggagaatcgtctgaatcccggaggcggaagttgcagtgagcccagatcatgccactgtacccaagcaagggcgacagagcgagattccatctcaaaaaaaaaaaaaaaagaaaaagaaaaagaccctccaggatctcggtctgttgcccatgctggagtgcagcagcacgatctcagctaactgcaacctctgcctcccgggtacaagcgattctcctacctcagcctcctgagtagctgcgactacaggcgcaccgccacacccggctagtttttttttttttttaattttagtggagacagggtttcaccatgttgcccaggcgggtctcgaactcctgagctcaggcgatccgacgcctaggcctcccaaagtgctgggattacaggcgtgagtcactgcgctcggccagaataattgttattgaaggtactactctctgaaatctaaggatgggaagaactgatgaagatgagttggagcaacaaactcttaacccgcacactatttgtctaggatttgggaagtaaaggtaagaccctggactcaatcaaacccaggctttggtcaactaggcagctgtctgggctgaagggacttcaatacctctattggttggttaggtggagatgtcaatgatgcgggaagaactcgtggaccacctgccctgatgcttcagggtatcacctgacactcgcaggcacatagtcctctctttctggctcactccggaaggaatggccaaaaccctgtgccagattttgcacaggaaataatgtcgaagaaacggactctccatttcccaaacctaggacctgctgttcagaatttttactcacctggacagaaaataatctggcgtttccccgtgagctaggcgtaagaaaaaaaaaatcaacgaagcagactaatagctaaggaagatttctggggtaaactgccctcttcaagtactccagatgcacatacctttacatagttaacagattgttaccaccatcgagtcactaaggtgcaagaatctatgctaggcaacttgagaattctcaaaagattgtgagcaaaacatttctcgtctccgtttgacagcacagagaccggcgagtccacaccagccctgccccaggctcacctcggaagaggcgaccccaaccttctcggactcgtacatgagggccagggacctgctggtgctggcggccgtggcctcagccctgcggaggacctcctgccgcaagtactgctgcctgtccgcgggcgcgtcgggcccgtcggggaggtctcgggcgtccctccaaggggccggccgggcgccttcgtcctccccgtcgtcgtcgaacggattgtagcttttagggtaagctgacatggtgccggcgcggctctcggtctgggaaacagaaggaggagccccactgccgccgccgtccagggcctcgccccgcccgccgaccccgcggtcgtcgcgcgaactccttccgcgcgtcgcgcgcaggtggccccgccctcggagccgaccatcgcgcaggtcggctggggggggcccacatccggcgcgcgcaaccgcagcctactgtccatcccctctctcccctgcagcggtgggcccgccccgcagccacgccctatctagtgtcagcaactgagaggtcacgtggcgggaaagccggatgcacctacgcctgcgccctgaggtcgggcgctcgcgggccaggagcggggagccggcgggcagcgccgcggctcgtgaggtgatggcggcggccccggcccggggaggcggaggcggaggcggaggcggcggcggctgctccggctccggctccagcgcctcgcggggcttctatttcaacacggtcctgtcact

SEQ ID NO: 27899 - DNA, 2300 bp, Homo sapien
gagaacaaggaagtgagggcctgcattccattgaaaatgagcctgcccggccagcctggtgcagtaacacacgcctgtaatcccagcactttgggaggccaagctgggtgaatcacctgaggtcaggagtttgtgaccagccttactaataacgtggtgaaaccctgtctctactaaatacaaaaaaattagccaaatgtggtggcacatgcctctaatccaagctacttgggaggcttggacaggagaatcacttgtatctgggaggcggaggttgcagtgagctgagatcacgccactgcactatagcctgggcaacaagagtgaaactctgtctcaaaaaagaaaatgagcgtgcccatcattggttcctgcctgtgtcattctcaattgttccagcagtaaaaagccaactgcagaaaaaccccttggtaaatagaatactggcccctcaaagctgtccacgtcctaatccccagaccccgtgagtgtgttaggttatatggcaaaggtggaattacagttgcagatggagttacaattgctaatcagcaagatggggagattatcctgggttgtccagttgggtccagtgtcatcacaaaggtcccttttaagtggaaagagaagcaggagagagagcagcagagtcagagatctgaagatgctgctggccttgaagatagagaaaggggcccacctgccaaggtacacgggtgaactgtagaaactgcaaaaggcgaggaattagattcttcccaagagctccagaaggagtgcaaccctgaggacaccccgactcagcccagtgagacccatgttggacttctgacctccagaaccgtaagacaagtttgtggtcatttgtcacagcatcagtgagggactaatacagcctccagcccaagcagaaggagcagcagccacatggacaaggtgtgcaagacagtgttgatcgaatcattccacttctatcaagtgataggcccagaaacatcccttatctggaaaggaatttagggctcctggggcctcctccataggcccccacaatagccaggtacattgaaattggtgctagaaaccaaaggcttactgtgctgccttcaagaaaacgatacaccatggaagctctggaacccaccatggttgtggttgatgcagctgaggagagcccagatggaggaagagcggggagcaggagagactaacatcatcagcacagttcattctggaaaggcaagtggaggaagtgagtgtaaattgaaaggcaagggctgggaaaaccggcctcatcacaccctggagaaggggcacaggacactgcacccaagacacaattttaaggaattaaagagagtttttatttgtgcagtatatattaacttaaaagactgaagaaaaaatcgacacagtttgcagaatggtttcagttggttggtgctggaggaaatgtgctaagtctagaaagtgaagtttccctgaaagagataaaccgggatgacagggcttttccgtgtgcgtttagaaactgaagttcattcaagccaagaaagataattttaaaaaagaagaaactaaaagttcaaggaagatttcttgtggcaaatgtgcattatttaacatttcttttttttttttttgcgtatttgtttcaagtgcaaagatagtgtagaaataaatttcagaaagaaacgaaattacccataattccatttatgtaacgtaacaatttgtatttttatactttgtccacagactgtgtagttttgcattattgcagttccacttctgtattgtcacttgtgtgactctgtctttcctgagcttgtgcaccaggagttaggtgacccttaatttgagggtgtttgatctcccaagtactgagggaaagtgagaaccctctcctaccccgtggaagcgtctcttcttctggcccatgagcctgcgctgtgctcctccctcatccctctggatagcctcagaaccaaccccttcgttccttccacccattttccagatgaaattgttttgggtgtgtgaagcagcatttgaaggaatgtcaattaaccgctctcctggtgtttccttctaaacttagaccctgtccccagaggggctggttctgccatgagtactgatgcttacccaaagaacccacaccttcgagcctatcaccagaagatcgacagcaacctaggtaagactgagcaccacaccagcttctgtaagccactgtccttcaggcagcttacgccaagcatagcccctgcatgagcatcctccagcttcagttccct

SEQ ID NO: 27900 - DNA, 2300 bp, Homo sapien
aggcagaggttgcagtgagctgagatcacgccactgcactcctccagcctgggctacagagctagagtccgtatcagaataaaaaaaaaaaaaaagggctgggcaaggagcaggtgattatgaagtggtaaatctgacagtgaaaagtagttagaaaacaaagtggagatttttctctccaccctcacccacccactgagggtgtatgctcagggttttagggtatagaggtagaggcccagggaatgactgaataataataatggaagactcatatgatgcttactatgtgccaggtactattctaagcactttgcatatattaacttgtttcatacatagctgggcggggtggctcacatcttggctgagggggaggattgtttgagctcaaaagtctgagacgagcctgggcaacatggtgagatttcgtctctattaaaaatcaaaggccgggcgcggtggctcacgcctgtaatcccagcactttgggaggccgaggcgggcggatcacgaggtcaggagatcgagaccatcccggctaaaacggtgaaaccccgtctctactaaaaatacaaaaaattagccgggcgtagtggcgggcgcctgtagtcccagctacttgggaggctgaggcaggagaatggcgtgaacccgggaggcggagcttgcagtgagccgagatcccgccactgcactccagcctgggcgacagagcgagactccgtctcaaaaaaaaaaaaaaaaaaaaaaaaatcaaaaaaattagctgggcatggcagcgcgagcctgtagtcccaactactcggaaggctgaggtgggaggatcccttgagatggggaaatcaaggctgcagtgagccatgatagttccactgcactccagcctgggtgacagaaggagaacctgtctcaaaaacaaacaaaataaaacaaacaggctgggcacggtggctcacgcctgtaatcctagcactttgggaagctgaggcaggcagatcacctgaggtcaggagtttgagaccagcctggccaacatggtgaaaccccgtttctactaaaaatacaaaaattagcagggcatggcggcggacagctgtaatcccagctactcgggaggctgaggcaggagaatcgcttgaacccgggaggcggaggttgcagtgagccgagatcgcgcccctgcactccaacctggtgacagagcgagactccgtcgaaagaaggaaaggaaagggaaagggaaaggaaagggaaagggaaaggaaaggaagagagagagagagagaaagaaaagaaaagaaaaaagaaaagaaagaaagaaagaaagaaagaaagaaagaaagaaagaaagaaagaaaacaaacaaaaacaaatagggattaataaataggcagaagcaggcataatccggggcaggggaagcctcggggccacgcccgagaggcatttgtattttactttcagcagttcagagcccatgatagccaggttacccacttgtggacttccttgaccacttaattgagtcaatctaaccctcaccttctctctcctctcactccatttagcgggtcacgtagccactagggcttccttagcctatcaggccacctggggactgagtcattcagtcagtcacctatctggtggtcacatctgcccctgggctcatccttttactgggccacctcggcccatcgggacctgtcagtccttgacctccctcaggcccctaggctggccaggtcgcctcagtgccacgcctccctggcccgcgattcagcctgcacgttacgctttgttcccagaagcaggttttcgaaacgcggttccctctcggctccagctgttttcctgccagcgctgggagacccggcagccgcagcgcccccagcggcgcgcagcggcccaggaagagagtgcctaccgccggcgcctcttcagcctcctcctggaacgcgggagcgggcgcgaccagcgcccaccctgatcgtcgcgacggtgctcctgattggctgcgctgtgtgacgtaacgggagggccccggcggccgccgggagccggggcccagcgcgtgcgcagacggagcgcgctgagcggagggggaggtggctgccgcttctcccgcgtccgccattttgttgctgtggctattgggaacaagctgggcaaaagcaccccggaggcgcgacgctccttcgagttcggtgcctcgtgtgacggcgggggtcggtgaagacccgtcgagctgcggcgccggcgcgttccaggccgggagtcactggaggcacccctgg

SEQ ID NO: 27901 - DNA, 2300 bp, Homo sapien
ttagctgggcatggtggcgggcacctgtaatcccacctacttgggaggctgaggcaggagaattgcttgaacccaggaggtggaggttgcagtgagctgagatcgcgccactgcattccagcctgggcgaaggagcgggactctgtctaaaaaaaaaacaaaaaacaaaatgaaacaaaaacaaaaacaaacaaacaaacaaacaaaaccagctgtctcagtccacacagtggaatattattctgccgtgaaaaagtttttttattacaaacattttattatttttaattataaacagtgttttgtaattgtgttaaaaatacatattttttttttgatacagggtcctgctctgtggcacagactggagtgcagtggcgtgatgacagctcactgcagcctccacctcccaggctcaggggatcctcccacctcagcctccggagtagctgggactacaggcatttgtcaccatgcctagctaatttttgtattttcttggtagagacagggtttcaccatgttgcccaggctgatctcgaactcctgagctcaagcaatctgcctgcctcggcctcccaaagtgctgggattacaagcatgagccaccatgctgggcctaaatattttaaatattttcttttttttttcttttgagacagggtctcgctctgttgcccaggctggagtgcagtggtgcgattacggctcactgcaaccttcacttcccgggctcaggtgaccctcccacctcattctcctgagtagctgggactacaggagtgggcgtgccaccatggctggctaattttaaaaattttttcgtagaggcaggttttcgccatgctgcccaggctggtcttgaactcctggactcaagcaattcgctcacctcggcctcccaaagtgctgggaatacaggcatgagccaccgcacctggcctttctttctttctttctttctttcttttttgagactgagtcttgctttgttgcccaggctggagtgcaatggtgcgatctcagctcactgcaacctccgcctcccaggttaaagcaattctccggcctcagcctcctgagtagctgggattacaggcgtgggccaccacacccagctaatttttgtatttttagtagagatggggtttcaccatgattagccaggctggtctcaaactcctaacctcaagtaattcacctgcctcagtctcccaaagtgatggggttacaggcatgagccaccacacctgggccaactcccaggttcaaaccatcctcccacctcagcctgtggagtagctgggactataggtatgccaccaagcccagctaattttttcatttttatttttttgtagactcactatattgcccaggctggtcttgaaccctggggctcacatgatcctctccgcctcagcttcccaaattgctggggttagaggtgtgagccaccgcgccctgcctacgggtcttttgaatgctgcatcctatagctatttttttccttcaacccagaagccaaagcataattccctaaattcttcagagctgtcttggtgagctcaggtggtctgcaaaccgctgtttccagaaggctggcatgggggcctgtgtcttcctccttgcagccctgtccaggcccctcctcttcttggctcccaccctctaggcagttactggttatctactccgtccttcccggacttgactgttgggcatctcgagggcttcccccttgttagtcttctcttcctcagaccccttagcctgaaagtgtgttcccccagggctttccttggcgggcgggcgagcgggcggaggctgtcctcttggggcccccaccctggccatcccatgcggccgtccctcctccacacggtcctgcttccatcttagggagggcagagctcagtgatcctgcgcctccctcagggactctgggacacaggttacttagggccgagagcccaggaagccctgagagggcaaatgcaacggctccgaagagccatacggagaagggcggcgcagccggccgttgggccccatgccccgccttctgcaaccccacgccacccaaccccaccacacgccaccctccgccccgcagctgccccggcccacagcccccagtctctgcagtcgctgaatgcgcccccctcccctccccgccatccgtggacgccagaagccatgggcactggaggatgtcagggaaaggtcaagttcttccttgggatccgagagcgaggacggagctcccggaagcaccaggggccacgagagttgggccg

SEQ ID NO: 27902 - DNA, 2300 bp, Homo sapien
gggacctcccagctgctctaggtcatctcaccgcagccatgtgccccatttggtactgtcaaagctgctggaatattatcgtctttccagaactatccctggggcaatatcaggacctcaggctgcccggggctcagagccctcctgggtcttcctggggcccctggtccacatgcatctccactaagcctgagggcccttcgggagaggcagcacttttagcctgcccttggttttagcttttgctctacgaagatcttgtgatttctgccccaccatggggcagcaggaacctcaagcacagtgcctgcggcaaagggagccacaatggacttgccccaggtcaggcctgcacttgccttgtgtcagggtatctccccaagttgctggcctcagtccctacactgacctgtttccccagctttatctctggcaccccaaactcagcagccccgaccccacttcccaagcaccccctgtgcctggctctgtgcctgtcatggtgtcctggcagcagtctgggagagtatttcagttacctgcggtgtcctgggaaggctggagcagaggggtccactcactgattgccaaggtcacagaacaggacttgcattgtgcactggaggccctgtggtcttgcatgagcctggtaggcctctcccctcctgcttccagccctccatctgggaggccagcctgcccagggctgctctgccacttagcagctgtgtggccctggagagtccctaacctcactgaacctcagtttctccgtttgtgaaatggagataatacaaagagaactttccttctcaggctgttgtgatgggtaaggaaataaatgcatgcaaaatcacagctgtagttactatgaggcacactgtcttcctggctagaggagattctgaaggtgggtggggcagcaagatcaccacgtgtatgaaatgggggcaggctggttggagactgagggcaccagccccaagcactgccatctgccctgtgatgggactctcctgtggcagtggcaacggtcccactgtggaagcaacacatgagctgagaggacttgcctgaactgagccacatgtgccctctgggcctggtcaccccaccacctgcccccagtgtgacccatgcagggcctgttcctgaccctgaacgagaccaggactccctgggctgcatttcctatctgtaaaattgtaggagggtggtggtggtgggggctcgaacttgccccctgggtggggtggggcataaatagtcccagaggatggcctgggaaggctggctgggcctggcacaggggactttactgctgtcattattgtcctccttacaggagaggagagcaaggcccagaccggggaggaacccacacagcctctgtgctccagcctgcttgaaagacaaggtctacctacaacgcagagatgcacacattaaggacaatgaaacacccaagtgttaggaaccagaataatcagccctaatagaggggaggctgatcagggagggcctcctggaggaggaggcacaacatcagggtgcactgtgatttctggagacccaaggagttctggtaaatgacaggtgagaaaaagaaaatgtaataaaatataattgaaaacagaccctggtatgtgtggagagagggccgggaggaacctaggacaccggggaacctgaactcccccaaccagtgaagggagctgtgggcagcaaggtttgattggggttttctttcttgtggaggtttctcagagtgattcaagttcccccaccccgcccacagatggttctgagactttggaaagaaagaaaaggaaaaaagaccctgcccgcgccccagctgggcatccctgggaggtcgcgaggatccccggagacccagactcgggcccggggcgcccccggccagagcggcccctggctgcctccctacgccccgcgactccggtccggacgccgagggcctcggcctgcccctgtcccccggccgccccccacctgctccggcccggcggggcggtgctgggcccgcgggctccccggccgcagtgcaaacgcagcgccagacacgccccgcccgcgcctccccgcccccccgcgcccgcggccccaagcggttcccgagcccaggcccgcgccgagcccaggtgagcgcccgccccggggaccctggtccccggaaccccggtccccgcccgccgccccgcctcttcgccccggcgccgggggccagcgcttgcgctcccaagtctcggaccccggcccggcacgttaggggctggggg

SEQ ID NO: 27903 - DNA, 2300 bp, Homo sapien
cccgcgcccgcggccccaagcggttcccgagcccaggcccgcgccgagcccaggtgagcgcccgccccggggaccctggtccccggaaccccggtccccgcccgccgccccgcctcttcgccccggcgccgggggccagcgcttgcgctcccaagtctcggaccccggcccggcacgttaggggctgggggttggcaagcggggccagaggcactggccggggtccgaagctcacctcgtccttctctcgtcccacaacggccccttcccggctcgccgcggggccccactgtgtgccagtcccccttctcgggctgcaaggtctggcgggggcaacgggacggagccggcgaggctgctggcatcggcttcccagagagagggaactgcacgtgcagaggcggggagagtggacagaggcttgccctgagctccgtgggggaggggagagcgcggagcccccacactcgaaggcaggactgggatcagatgccacccctaggacgcctggaagccactgggagtccgatctgggcaggagcccttgggatgaggcagtgggggcaggtggcgagaggtggaggagtggggagaggaccctgcccagcctgcaccctgggggcgccaggagccctgggagggtcaggtggagcaggggccgctctgtgagatgggagtaatccagtcccgcctcacaggtcctggggtccctgggacagacacagactcctgctgggtggttagcactgggctctgctagaacttttctgcagtgggcagctcatgggcaaggaatagcactcgggcgctctgcactctgggggtccctcctgccctgcccctggcaaggacctttgcctttgagtggggtgactgggctccaagccgatctagcacacagtaggccgaaggcacaggggccccacccagtctccttcctggcccaggccctgggggattcaggtccctgggtactcgggaagggacagcacagcctgggcaggtccccagtggcaagaccaggtctgaccttttctgggatctgtggcccatcaggtgaggcctgaggtcagccaggaaggaagcgggcagggctgaaccagggctgaaaccaggacccaggaagggacagcctagtgcccagggaaggggcaggtggggcaggtggcagttgagttttacagaccttctttgatgacaagtgggggaaagagccaaggcacgccccagtggctgtgggagccaccgcctcctcccctgtaatgggcacctcgaggaccgacaggcgcaggggccaggcaccaagggtccctctccaacctggccttttgtttccaccccttgctctcaggcacccacccacggcccttcctggtatctggaccagaccaggtgggtctcagccccacctcaagtgagacttcaggaagaacttccagaggaaactggaggatggcagtgggatggactgtggggaggtcatttgcaaacaaggcagcttatgcctgtgccctgggccttccaaagtccacctgtaggctgcatcttccggaaggcccaccctgtagcctggaaggcacctggctacagtgatctctctgctgtgcaggtgtcccctcccccagggcaccttgcagggccttagggtgatatgggggctttctgggcccctgcccaccttaaaactgatcaaggtgggagggtggggtgggaggccacagggatgcccctgctgcttgaccttgatgggaccttgaccccttgctttccccatatgctgttgggcatgactgcccacaggcctggtgggcgtttgtgaagggctggagtcgggggtagggggagcttatggctgctgggcacaggcgtggcagggctgtgtgcctggcttccctttcccctaaccccatcaggcccgggctggccgcccacttctgttcaccacagagcagggtttccctggggaccagtggactggcccagccccacaccgccccccagcccctcctggccacagcttgagctgggaggagggtggaggctgggccgcctcctggacccctgccctccctgcccggccttccaaggcccggcagcctcagtccactgctgggcctggaacacggagcagtggctgccctgcgaggaggtgggtgtccggagtgctagccagggtggggctgggctagggggagcctgatgtcacccccattgtaggagggagaagaccaaggatgagaagggctttggcttccccaaggtgaccccctctttgagcctaggcatagtggtctcccggg

SEQ ID NO: 27904 - DNA, 2300 bp, Homo sapien
cgctagaccggcaccttccctacgaccgtcccaagctcagcaaggtacagggggtggggcaagtagggaccctatccctctgggtcccagttaagcccacttcaagccttgcttgtcaccccattggggtctggccggctgccctccctgcttatgccaggcctgtccgtggtacccccaaaagatctagatttgttgttgttgttttgagacagggtctcactctgtcgcccaggctgggatgcagtggcgccttctcggctcactgcaacttccacctcctgggttcaagcgattctcatgcttcagccttccgagtagctgggattacaggtgtgcaccaccaccatgcctggctaattttttgtatttttagtagagatggggtttcaccatgttgcccagaccagtcttgaactcctgagctcagcccatccgcccacctcagcctcccaaggtgctaggattacaggtgtgagccactgcacctggcttttctttttttgagacagagtcttgctctgtcactcaggctggagagcagtgcctgtctcacggctcactgcagcgtcgacctccacctcccgggctcaaacgatcctcccacctctgcctcccgggtagctaggactacaggcgcgcaccaccatgcctggctaatattttgtattttttgtagaaatgaggtcatttttgtcatgctgcccaggctggtcttgaactcctggttcaagcgatcctcctgtctcagcctcccaaagtgttgggatcacaggcatgagtcactgcgcctggccagatctgggtttgctgagttctgtcctgcagcccctatgtgactggggctggccccaccttccctgggccccagtgtcttctgctgtaaactggctcctctcaagctggctctcccctgcagtccctggacacacagcctgagcagctggccctgaggcccaaggagtttttccgagcctatggcatcgaggtgctcaccgaggctcaggtacagggtcaagggtgggaaacaggcccgaggagggaaggtgggaaccgtgaggttgtgtgggcccctggggtggggtcttggtgctctaccttcctggccccacagcccaggcacctgggaggtgctccaggcttgggagacagcaaggagctttttcctgatgggtcataggcacacacagagccccacggtgtgtggagatgaacgatcagggctggataggagatactggtgggacttgggagggtaaggagaggtttgaggggaaggtgatgtctgaagcgtaaagaatgaagcccaggtggcaggatctgttttaatgggagcttctcagaggctgtggctgggctgtgggtgtactgcaggaccggggagtgggcggcgaggcccagccccatgcccaagctcatgctctgcctggtggggattgcaggtggtcacagtggacgtgagaactaagaaggtcgtgttcaaggatggcttcaagctggagtacagcaagctgctgctggcaccagggagcaggtgggagggtctcctttttacccatcggacactaggcagggcactggcctggacggggctggggctgccaggaggccctcactgacacggccatgtctcagccccaagactctgagctgcaaaggcaaagaagtggagaacgtgttcactatccggacgccagaggatgccaatcgcgtggtgaggctggcccgaggccgcaacgtggtcgtcgtgggagccggcttcctgggtgagaggtagtgggcagtggagatggtggtcaggtcgtcatggccagtcccagggaagttctggtcgaggaaggtgcaggtgccagcctgccaccccctgcccatcaccagggatggaggtggccgcttacctgacggagaaggcccactctgtgtctgtggtggagctggaggagacgcccttcaggaggttcctgggggagcgcgtgggtcgagccctcatgaaggtgagcccaccccagcacccagtgccttggagccctggggcccagcccggcccctggctgggctctcatccaccgcccacctgcccacttgccctgacagatgtttgagaacaaccgggtgaagttctacatgcagacggaggtgtctgagctgcggggccaggagggaaaggtgggcccttctcccttctccctgctgctttctgtcctctgtcccctgagcctgggagctgggtccacctgtttatccacccactccccacagctgaaggaggttgtgctgaagagcagcaaggtcgtgcgggc

SEQ ID NO: 27905 - DNA, 2300 bp, Homo sapien
ctcgaactggcttctgctccagctgaagtgccaatttgggtaggggccaagatgggaggtggtagcacctgcaggggctgaggaggtatggcatgctgtccctccacttaagggcctcatggagcacttcttggagaaggtgatatctgaggtcttgcgggaggcaccgggtctgtgggagaccgggtagtggggaccagggtgcatgaaggcctcaggtagacagcccctggaggatcagtctggggctggcacatcaagcgcatgctgtagggtgtggagagtgactacgcagaaggcagggacaggggagtggacacaggcttccgtcctgtcaggtgcagtgcccgccacaggcttcctgaggcaaagcggcatcggtttggattcccgaggcttcatccctgtcaacaaggtggggtggatggcactgggtggggaggacccggtgctgggctgggagtggcaggaggttcaggtcagggcccctgtcacacccatggagctctgggccctctctctacagatgatgcagaccaatgtcccaggcgtgtttgcagctggcgatgctgtcaccttcccccttgcctggaggaacaaccgcaaagtgaacattccacattggcagatggctcatgctcagggtatggccagtcccgaggcacatggaggggtgggagggagtctcagggtctcagtgtccccatgcccatgcctcagttgctgaccttgggtcctggacactgttaggcatcaaagctctgatgtggattctctggccagcctcatctcggcgatccagccaacacagagagcgacaccccactgagccagccatagctcctcaatctcagttttccttctggtagtctctcccttttttgtcttcaaggacatatattctgcagaattcctgatcaacctgtgcattaccctggggagggagggagggatttagtggatcaccttcccatttatgcctctgtttcccttgggccactcaagtatctctgtgaactcagttcagcctcatgcaggtccccgaggtgccatctgagcccagagacgtgggctcagtggaggcactgtgctttctgaggaatagctttcccctcctgatgtttgctggccaccaagtcccccaagcctcatccactgtgcacatctggtctgggcccctaagctgcaggtgccatcacattagttgcctcactgcctcagagagaggactgccagactcccagcctgggacaaaggacttctctgcacccatctcccctttcctctgcctttacacctgagggtctgctgcttgaaaccccacttctggtaccaatttctattcaagtccaaagtcgaaagttgttgctaggttgtaagtaaccaaggcaacttatcagccaagtataattaggatttaactgagagagtttaggggactttgaagtacatccaactacaggggtctactggggcctcataggaactggggagccatccacactggtctctttggggccttgtgtgtggctgtcatctgtgcttccctgtgtacttgtgccccattttcctccctcttcagacctgatacgtctgattaggtgtctgtgtgcacagctgaaatggtggcgtactcccccaaccccaagaagcagaccttccagagtcagggcactttattcagattctttaaggaagcaatcaagtggctagctttgaggcaggtgttcccctgcaccagtcagctgcaggtgcaagtgagcagtgggctgaacaatgatgtctcttgacctctggggagaccaggaggagtagccacacgtgtcaggggtccccagggcatcaggagcaggtagtgtgggagtggtaagagcgagagttagggttctcacggccctgggtcccgcagggcgcgtggcagcccagaacatgttggcgcaggaggcggagatgagcactgtgccctacctctggaccgccatgtttggcaagagcctgcgctacgcgggtaaccccggggcctcggatgggggcggggccgagggcgtttaggggcggggcttgggtgtggggcggggctgggagcctaggggcagggctatgaccgcactaggaagaggccggtaagaactcgctggcggcaaggctacgaactacctaaaaggacgtatggagcagggcctgggcggggttaggaggggatcctgtgacgtctcgttccctcccccggctcacgtgggtgccacccacctgcccggcccacaggctacggagaaggcttcgacgacgtcatcatccag

SEQ ID NO: 27906 - DNA, 2300 bp, Homo sapien
gagcgtgggaccttctggggagcgtttcaggctatgtactggcgctgcgttgtcccttccagtgaatgcagtgtgtcgtccctagccccgtcgcgactgctcttcccggcgcctcccaggcccacgcagcccgaagacccgcggccggctcgcagttcccggcatgccctgggtctgcgcgtggctccggcctggatcgtctgccgctgccgggatcccccatggagggttccgggctcgcagcggcctctgcaggcggctcaacgctccctttcctgctagcgccctcagccctgacccccagcaactcccctctccccttggctttcttactgactgagaggcagcccggcgaggagcctctggattctcattcctacttagcagggcctcagctccttcacctccgacatggggattgagaatgctccggctatgaaaagcatggggtctgtctcaggacacagctcccacagccctaagtgggcaaatgccccaaagtgtcaagcatgagccacctctgaaggagcatttactatctcaagacctttgggcatgttgtcccttctacctggaatacccttccttcaaaactcagagccaaaagcaaaaagcgttcgctgatcgcagagggggagagggatgtgggagggcttggggcgcagaattagttgctacctcctctgggcgttcacaggccaaatttccttggtgtggcacctggcattctgtgattgtgcctgtttccctgtggtctggtcctgtgcctattggcccaattacactgggagtcatacagatctgcaaatttgtgcgttttaattttacggtaatgtttaacgtgttgcagggttcttcaggggaccagtcccaatagagggagaagaggcagggcttgtcctgcctccagtgccagctgtcagtggcagcagaggccttgagggttgagcatcttctggatccagcagaggcctcccaggaggggagccaggtggctgaaggcaagcactgggagggctcaggttctgccctgggggatcctgggactggagattggcacctgcccccaaggcttggcctgtgcccttggtgccccctttgcctgcccaagtctactgcatgtgagctcaggatcctttccccgtaagccaggacatgtcgccagtcctgcaggagtgaggggaggaggggtcaagacagaagaaaacaggctctccactctgggcaccctgaacagctggcccttgaggacagcagggggtctgttctgtgccagaccctagtgcccagcagggaggtgtacttggacagagggagataagaccattgggtggagggtctgggctgacatgggaaaggctcagaacggtcaacatgaaggacacacgtacttgctgtgcagcacaaacagccttcacgaaggcaagagagagaaacggagagaaggccaaggagagagcatgtcatttatcatgtccccttctggtcctccattgtttccagcctgaagcctgcccctgtctcatagcctcccagtggcctccaggctgtccccagtccctgggagctctctcccagagggtgaatctcattgacaccacaccaggataagggaactggctggtgttgagtgaaacctagaaccacccccaccatctatgtggagggcatacccagggcatcagtagctgcatttcccacctagcttctgccaggctcagcacaactatgtccagttaggtgtcccacgcctggtgattgcccatgcattgggccctgaccccttcccacagcactggccctgcctggtgacacacatctctatcccttccatccaccatgaacacataaccagcctgctctcaaaccatgatccttgccccacacctccctgtagtcctgtaagcctcaggcgatgcaaaccaagaggggaaaggccctggagggttgtgggggcggctggctgtcataggcaccttagccagtactccagggaactactcccacccccaggcttcccacacccacactcactccacctcccgcttccggatggcacggcctgaggccagcacctcagcgaccttggacacaatgggatcgtagttcatgctggccacggcgatcacctcgtcgcctctgcaaggagaggatggccaagcctgaggactgcgaggcagcagcccctttttgaaaaccctgatgcactgctgtccatctggggcccagggaaggacctaccccagggcaacaagaatggcctgagcacccagccctccctgctttgcacatcgcggctt

SEQ ID NO: 27907 - DNA, 2300 bp, Homo sapien
gggaggtgtggggcaaggatcatggtttgagagcaggctggttatgtgttcatggtggatggaagggatagagatgtgtgtcaccaggcagggccagtgctgtgggaaggggtcagggcccaatgcatgggcaatcaccaggcgtgggacacctaactggacatagttgtgctgagcctggcagaagctaggtgggaaatgcagctactgatgccctgggtatgccctccacatagatggtgggggtggttctaggtttcactcaacaccagccagttcccttatcctggtgtggtgtcaatgagattcaccctctgggagagagctcccagggactggggacagcctggaggccactgggaggctatgagacaggggcaggcttcaggctggaaacaatggaggaccagaaggggacatgataaatgacatgctctctccttggccttctctccgtttctctctcttgccttcgtgaaggctgtttgtgctgcacagcaagtacgtgtgtccttcatgttgaccgttctgagcctttcccatgtcagcccagaccctccacccaatggtcttatctccctctgtccaagtacacctccctgctgggcactagggtctggcacagaacagaccccctgctgtcctcaagggccagctgttcagggtgcccagagtggagagcctgttttcttctgtcttgacccctcctcccctcactcctgcaggactggcgacatgtcctggcttacggggaaaggatcctgagctcacatgcagtagacttgggcaggcaaagggggcaccaagggcacaggccaagccttgggggcaggtgccaatctccagtcccaggatcccccagggcagaacctgagccctcccagtgcttgccttcagccacctggctcccctcctgggaggcctctgctggatccagaagatgctcaaccctcaaggcctctgctgccactgacagctggcactggaggcaggacaagccctgcctcttctccctctattgggactggtcccctgaagaaccctgcaacacgttaaacattaccgtaaaattaaaacgcacaaatttgcagatctgtatgactcccagtgtaattgggccaataggcacaggaccagaccacagggaaacaggcacaatcacagaatgccaggtgccacaccaaggaaatttggcctgtgaacgcccagaggaggtagcaactaattctgcgccccaagccctcccacatccctctccccctctgcgatcagcgaacgctttttgcttttggctctgagttttgaaggaagggtattccaggtagaagggacaacatgcccaaaggtcttgagatagtaaatgctccttcagaggtggctcatgcttgacactttggggcatttgcccacttagggctgtgggagctgtgtcctgagacagaccccatgcttttcatagccggagcattctcaatccccatgtcggaggtgaaggagctgaggccctgctaagtaggaatgagaatccagaggctcctcgccgggctgcctctcagtcagtaagaaagccaaggggagaggggagttgctgggggtcagggctgagggcgctagcaggaaagggagcgttgagccgcctgcagaggccgctgcgagcccggaaccctccatgggggatcccggcagcggcagacgatccaggccggagccacgcgcagacccagggcatgccgggaactgcgagccggccgcgggtcttcgggctgcgtgggcctgggaggcgccgggaagagcagtcgcgacggggctagggacgacacactgcattcactggaagggacaacgcagcgccagtacatagcctgaaacgctccccagaaggtcccacgctcgccgcgcggtcgacaaccgcatcctgcgctcgcccgcggtgtctcggcaagcggtaggcttgtcgggaagagctggagggcgcaagtgcggcgctggccggacgtgccgcaccgtcagcgcagggctcgccgggaaatgtggtttctccagccggcccggggcggtggccgcaagttgggcttacagcgcggccgatccggcgtggacccgggatggctggaccgggcagcacgggggggcagatcggggctgcggccctggcaggcggcgcgcggtccaaggtagccccgagcgtggacttcgaccatagctgctcggacagtgtcgagtacctgacgctcaacttcgggcccttcgaaacagtgcatcgctggcggcgcctcccgccctgcgacgagttcgtgggt

SEQ ID NO: 27908 - DNA, 2300 bp, Homo sapien
cgctttattatggcacctggtgggtctggtgggatctgagggaggaagaggctgcagtcttgctgggcagcccctcggtcagtccagcagcccctcaggccatgctgctgctcagctgcatggcaaagtcctgcacatgctccttcagagtctggcgggcatctgcctgtgcccgcttctcccgtgcccgctcctgctgcagcttggtcagtctcaaccgcagccgctgctcccgccgcttgcaggcctgcagctggcgctgggccttgtcaagggcatcaagggctgcctcggctcgccgcttccagagtaaggcgctgcccacctggtagctgtgttcattctggatgtaggctccggcgggtgggggcaggcgcagcatatacgctgagggggagactggccgtggttcgagaggggagggctgccgctctggtgaaggctgggcgctgcagcctgcttcatctgcctgggcacccaaggggcccagtaggtctgaaaaggggctgctaaggccaggctccagcctcccagctggggaggccggcaaagtggcaggtgctgaggcctcttccacaggaaagcaggtgacatcagcaggtggaggtggagaaaatggagttgtgggccctcggccctcggagcagctggtaagggggaagagagagactgatgggctaggctgagggcttgccagacccccctccaccagcccacctgatccacccttaacacccaaacccgatccacaggttctgtgtagcaagaaccctgtccagcgagactgctggcagacacccctagggcccagtccctcagcctaggggtgggagtggggcatcccccacccatatcacataccgcttcctgcatcgtctgagccggctgacttcagcggggccaggtgggtaactgtgtcctttggtcttggttgtccggcgcaacttggagaaagactcaaatatggtggggactgccccctcctttagcctgtgatatccactgcggggaaaagcaacccagatgagctggagagcaagtgctgcctccccaggccaatctgcccccagcagcagcgccgtgggatgctggaaggcatcgtgcaaacaatacgtctggggaacgccaagttacagctacaccaatcgcttccccgcaggactcctcacagtccaggtgtgtggaaagcctgcataagccgagctgggctgaccagccagaaagaattctttgatttgtggacttgctggcaagactggggctctgaaagatactctctggaaaggctcctgttttccccttgtgtcacaggcacagtgatcctgggggtgggtttcactgtgcagagctgggaacaggaaacagcccccttggacgcaggctgctcaagggacttccatgacctgcagctgtcccagtccgccgggagccccacatcctaccccagcgtcggccggcagggaggcccacctgattcccaccagctcaaagcagtcctcctcaaagtgtttggagcagaagtagatgtactcggatgccgggtcccacaggccctggccgctggggtccagccgctggcagttggccagccacaagcctcgcctcgggttgtccttcttgggaagtctgtggagccacaaacccgtgagcaccaggctgtccacagccctgggctcatgctgcccaagcaccccagaggggaaacgcagacccaacacgcgccgccacgagacctccctgcgaccccgccgggtaagcaccaccgcccgggcacagacgaggcaacggaggcctcgagaagaaaagcagtttcctcagcgtcatctggcaggtaacagagtggggcgggtccaagccggctagacttcccgtcctccccttcccgactgcattcagtcccgccgggaccgttccgcttcacctcccacccacaggttcaagcctcctcagtatctgagaaaggcgcgaagcctctacgcagttgcgacccgaggcgagcaacaactagcgcatgcgcacgtgagcccgcggcgcacgcgcgctgacctgtggaaggagatgccgcggttgcgcgtctcgcgcgtgtcccgtgtgcagcagccggcggcggagcagtgacgcggcatctgggaaagaggcgggagttaagtcgcaagcggctctccgggcatccggaggagcctcgcgcctccagccgccgctcctccccaaggggctctggcctgtcgggtcccccccggcccgttgtcgccccaaccccgtcccagccgattctcttgacttctgtcagcggcactcac

SEQ ID NO: 27909 - DNA, 2300 bp, Homo sapien
accctgtccagcgagactgctggcagacacccctagggcccagtccctcagcctaggggtgggagtggggcatcccccacccatatcacataccgcttcctgcatcgtctgagccggctgacttcagcggggccaggtgggtaactgtgtcctttggtcttggttgtccggcgcaacttggagaaagactcaaatatggtggggactgccccctcctttagcctgtgatatccactgcggggaaaagcaacccagatgagctggagagcaagtgctgcctccccaggccaatctgcccccagcagcagcgccgtgggatgctggaaggcatcgtgcaaacaatacgtctggggaacgccaagttacagctacaccaatcgcttccccgcaggactcctcacagtccaggtgtgtggaaagcctgcataagccgagctgggctgaccagccagaaagaattctttgatttgtggacttgctggcaagactggggctctgaaagatactctctggaaaggctcctgttttccccttgtgtcacaggcacagtgatcctgggggtgggtttcactgtgcagagctgggaacaggaaacagcccccttggacgcaggctgctcaagggacttccatgacctgcagctgtcccagtccgccgggagccccacatcctaccccagcgtcggccggcagggaggcccacctgattcccaccagctcaaagcagtcctcctcaaagtgtttggagcagaagtagatgtactcggatgccgggtcccacaggccctggccgctggggtccagccgctggcagttggccagccacaagcctcgcctcgggttgtccttcttgggaagtctgtggagccacaaacccgtgagcaccaggctgtccacagccctgggctcatgctgcccaagcaccccagaggggaaacgcagacccaacacgcgccgccacgagacctccctgcgaccccgccgggtaagcaccaccgcccgggcacagacgaggcaacggaggcctcgagaagaaaagcagtttcctcagcgtcatctggcaggtaacagagtggggcgggtccaagccggctagacttcccgtcctccccttcccgactgcattcagtcccgccgggaccgttccgcttcacctcccacccacaggttcaagcctcctcagtatctgagaaaggcgcgaagcctctacgcagttgcgacccgaggcgagcaacaactagcgcatgcgcacgtgagcccgcggcgcacgcgcgctgacctgtggaaggagatgccgcggttgcgcgtctcgcgcgtgtcccgtgtgcagcagccggcggcggagcagtgacgcggcatctgggaaagaggcgggagttaagtcgcaagcggctctccgggcatccggaggagcctcgcgcctccagccgccgctcctccccaaggggctctggcctgtcgggtcccccccggcccgttgtcgccccaaccccgtcccagccgattctcttgacttctgtcagcggcactcacgctctggccattgctgcgccgccgaagtctcgcgaggggtagcgcgcgccggaagttggtaccatagagactggagagccggaggtgcccccgccaccggggcggggcggggcgaggtcctagctagctgggttagtaagcggcgcgagcgtgcgagtttctgacgcgcccgcgtcgtcccagctccctggactaccagtattgtcgcccacgtgggcttctctttcgtccgctcaggcctcacttttctccgtaaacaccccggcacgatggagcggccccagcgttcgggagcggcccgggagcggaaagcggcagtgtcctgggagcctcgaaagccgcaggggcggcagctcgcctcggaatgacctctgacggaagaaataaaacggggcctgggacgcttgcacgaaagaacccgacaaaaaccagagcccgcactcactctcgtactggggaggtggacttcagggagggttatctggaggaggaatctctcaaagtacaacacaggagaaagacagtatcgcaatacagaaattttattttttattttattattattttcctgagaccggagtctcgctctgtcgcccaggctggagtgcagtggcgcgatctcggctcactgcaaactccgcctcccgggttcacgccattcggctgcctcaccctccacagtagctgggactacaagcgcccgccaccacgcccggctaatttgcaatacggaaattttaataggtaattagctctcctagcgttatg

SEQ ID NO: 27910 - DNA, 2300 bp, Homo sapien
tactgtatgggtaatatgggtaataatttttttttttttctgagacagagtctcgctctgtagcccaggctggagtgcagtggcgaaatctcagctcactgaaatctccgtcttccgggctccatcttacatgcccataatcccagctactcaggacgctgaggtaggagaattgcttgaacctgggagacaaaggttgcagtgagccgagattgcaccactgcactccagcctgggcaacagagctagaccctgtctcaacaacaacaacaaagaaggaggagaaggaggaagaaggagaagaaaagaaaaaaaaaagtcgtcaaaggatattaattgtcgatagataacagataatgccaaaaaatatagaagcaattcttaaaacacagtgttggaactggtccacagctctgatttttaatgagctcccatttctgaggccaatataaacttcattctatgctgcccatctctgacaggtgggcattaactaccagccccccacggtggtccctgtgggagacctggccaaagtgcagcgggcggtgtgcatgctgagcaacaccacggccatcacggaggcctgggcctgcctggaccataagttcggccaagtgcgccttagtgcactggtacgtgggggagggcatggcagtgggggaattctccgaggcccgcgaggatctggcagctctggaggattatgaagatgtgggcatggattccgtggaagctgaggctgaagaaggcgaagaatagtgaggggagggtgcggcaggcaaccatccctctgtattccccaccataacgctaggagagctaattacctattaaaatttccgtattgcaaattagccgggcgtggtggcgggcgcttgtagtcccagctactgtggagggtgaggcagccgaatggcgtgaacccgggaggcggagtttgcagtgagccgagatcgcgccactgcactccagcctgggcgacagagcgagactccggtctcaggaaaataataataaaataaaaaataaaatttctgtattgcgatactgtctttctcctgtgttgtactttgagagattcctcctccagataaccctccctgaagtccacctccccagtacgagagtgagtgcgggctctggtttttgtcgggttctttcgtgcaagcgtcccaggccccgttttatttcttccgtcagaggtcattccgaggcgagctgccgcccctgcggctttcgaggctcccaggacactgccgctttccgctcccgggccgctcccgaacgctggggccgctccatcgtgccggggtgtttacggagaaaagtgaggcctgagcggacgaaagagaagcccacgtgggcgacaatactggtagtccagggagctgggacgacgcgggcgcgtcagaaactcgcacgctcgcgccgcttactaacccagctagctaggacctcgccccgccccgccccggtggcgggggcacctccggctctccagtctctatggtaccaacttccggcgcgcgctacccctcgcgagacttcggcggcgcagcaatggccagagcgtgagtgccgctgacagaagtcaagagaatcggctgggacggggttggggcgacaacgggccgggggggacccgacaggccagagccccttggggaggagcggcggctggaggcgcgaggctcctccggatgcccggagagccgcttgcgacttaactcccgcctctttcccagatgccgcgtcactgctccgccgccggctgctgcacacgggacacgcgcgagacgcgcaaccgcggcatctccttccacaggtcagcgcgcgtgcgccgcgggctcacgtgcgcatgcgctagttgttgctcgcctcgggtcgcaactgcgtagaggcttcgcgcctttctcagatactgaggaggcttgaacctgtgggtgggaggtgaagcggaacggtcccggcgggactgaatgcagtcgggaaggggaggacgggaagtctagccggcttggacccgccccactctgttacctgccagatgacgctgaggaaactgcttttcttctcgaggcctccgttgcctcgtctgtgcccgggcggtggtgcttacccggcggggtcgcagggaggtctcgtggcggcgcgtgttgggtctgcgtttcccctctggggtgcttgggcagcatgagcccagggctgtggacagcctggtgctcacgggtttgtggctccacagacttcccaagaaggacaacccgaggcgaggcttgtggctggccaactgccag

SEQ ID NO: 27911 - DNA, 2300 bp, Homo sapien
gaaaagctgaagtcctcttcttccccagagctgcttctgtcctttgaaaaacattctgtacatattcaaggcatattaatctcttgttatacaggtgatgttgacagtggccagcagatatgtatgtccctttcctgtaggtgacagacccaattgctgcacacaggtggtcacagtaaacagaaagctggcagcactcccacttggaagggctgataggcttggccttagagttgtgggaggacactccctgatcagggtacgaacccttctctctgccccttccaactcctgtggagtatgtctgtatctagttggtgctaactgctacgtgcttggcagggcaaggcagggtcaccacctcagcaggcgtttgtcctcctccggcatgatgctaccctagctgcccaaggttctagcctgtgtatgttattacatggatttttttacacataaatacatagacttcaactcacttttctttttacaaagtatacaatataccttggatgtatttatatcccaagacagggttctcattctttttcatgtgttttactgtatgggtaatatgggtaataatttttttttttttctgagacagagtctcgctctgtagcccaggctggagtgcagtggcgaaatctcagctcactgaaatctccgtcttccgggctccatcttacatgcccataatcccagctactcaggacgctgaggtaggagaattgcttgaacctgggagacaaaggttgcagtgagccgagattgcaccactgcactccagcctgggcaacagagctagaccctgtctcaacaacaacaacaaagaaggaggagaaggaggaagaaggagaagaaaagaaaaaaaaaagtcgtcaaaggatattaattgtcgatagataacagataatgccaaaaaatatagaagcaattcttaaaacacagtgttggaactggtccacagctctgatttttaatgagctcccatttctgaggccaatataaacttcattctatgctgcccatctctgacaggtgggcattaactaccagccccccacggtggtccctgtgggagacctggccaaagtgcagcgggcggtgtgcatgctgagcaacaccacggccatcacggaggcctgggcctgcctggaccataagttcggccaagtgcgccttagtgcactggtacgtgggggagggcatggcagtgggggaattctccgaggcccgcgaggatctggcagctctggaggattatgaagatgtgggcatggattccgtggaagctgaggctgaagaaggcgaagaatagtgaggggagggtgcggcaggcaaccatccctctgtattccccaccataacgctaggagagctaattacctattaaaatttccgtattgcaaattagccgggcgtggtggcgggcgcttgtagtcccagctactgtggagggtgaggcagccgaatggcgtgaacccgggaggcggagtttgcagtgagccgagatcgcgccactgcactccagcctgggcgacagagcgagactccggtctcaggaaaataataataaaataaaaaataaaatttctgtattgcgatactgtctttctcctgtgttgtactttgagagattcctcctccagataaccctccctgaagtccacctccccagtacgagagtgagtgcgggctctggtttttgtcgggttctttcgtgcaagcgtcccaggccccgttttatttcttccgtcagaggtcattccgaggcgagctgccgcccctgcggctttcgaggctcccaggacactgccgctttccgctcccgggccgctcccgaacgctggggccgctccatcgtgccggggtgtttacggagaaaagtgaggcctgagcggacgaaagagaagcccacgtgggcgacaatactggtagtccagggagctgggacgacgcgggcgcgtcagaaactcgcacgctcgcgccgcttactaacccagctagctaggacctcgccccgccccgccccggtggcgggggcacctccggctctccagtctctatggtaccaacttccggcgcgcgctacccctcgcgagacttcggcggcgcagcaatggccagagcgtgagtgccgctgacagaagtcaagagaatcggctgggacggggttggggcgacaacgggccgggggggacccgacaggccagagccccttggggaggagcggcggctggaggcgcgaggctcctccggatgcccggagagccgcttgcgacttaactcccgcctctttc

SEQ ID NO: 27912 - DNA, 2300 bp, Homo sapien
ggccaccgtgcagcaggttcagctctggggcactcccttggcacagaaagcagaagatgggcacaatgctatggatccagcaagacctcaggtacagggtgtccccgaccagttctccaagtccatgggtgcctggtaggagacagggggatgaatgtgaacccctgcatggctatagccacctgcctcctcccctgccctgcatcactacctggcctattttttgcctctagaagcactgcttcctatgctccttaggaccactgcccgcatatgacagataagaacatcgaggctaaggcaacgcaaatcttttccttaaagtcatacagctgtcaaaagaaagctggacaacctgggcaacatagcgagataaaaaattatttaaattagccagatgtggtagccccctgtagtctcagcgactcaggaggctgaggcaggaggctcaccagagtgcagagttcaaggatgcagtgagctatgatcctgccactgcactgaaagctgggtgacagagcaagaccctggctctaataaatgaatacataaagtctcacagctagtggtagctaatcctgccagagtcaggcctctacctgtctgatgacaaatggcacactatgtcttttaacctgattgcagaccacaaatgttttgtgaatattttccccagggaaaaaaccggaagtagttctaaattctatacatccattatattagttttacctgtggattgggaaaacccagctctgattgcatttcagggcgggacagcctttggtgcactgtctggcgggattttccattttaacctccttctagaagcgccttctcatggtaaagttcctgatgccgccaggagcgccgaggagagggcagggggctggagacgccccgcagagggctacgtgccctgctggacagaggtctcctgcctcctcggcggcgccagcccacctcccacaacccctgcgggagaagcccccaaggggaggagacgggcctggcccctgccccgagcaccttccgtctctaggtcggagtctgaatcggccttgggaccctgcttggcttcggggacccctgcaagacgtccacaggccgccgtcgcctcttcctcctgctttttatcctccccagacctctggcaggaaccgctcatcgttacgcccctttcgcagcctcagaccctgaggcggagaccgcttggcgcctcacttagagcgcgacccggggatgtgggcggagtctgcggctgcgctgaccaatcgagtgtggcgtccatcgactggcgtctgccacggcaattagcgacgcgctcccccgcggcggtcgccccggcaacccagtgctgtaggttgccgtagaaaccgtggctctcctgcgctgaggctcctcgcctgagaggataaactgcacgcgccacgggctatgcactgggctgggcgccttgtgggcatcctccctgccttcctagggggttccagcatcgcccccctttcgtggactgggaaacacgcctgactccaggacttgtgttgtcctcactgcactggggaaggtggcgggggcagcttttcaggagggcctggggaacttcgcagagccaggtcaccctctcactctgtgcctcttagttatcttgcatgctctggtctttgcatacgctgctccctgcaccaggaacctccatccccatctttgtctgcttgtcgaacttcagaaatctgcaagggtcagcttagaggtcacttcttccggaagctttcctcaacaccctccccgccctgctgctgctgccctcaggccctcctctcacagcactgataacagctgtccgtctccaccctcccaccacctccactcccaccccaggaagtgaggccagagggcagggacagagctgctgctgttctctgtgtgccagggcccagcaaagggaatgtagggagggtgggaggtgcagggcagctgggattaggggttgagggctgggtgttggaggctggatctggatcctgctttagtggaagtgtccctttaacagcaactggcctggcctggctcgggccctgctttgcctcctgttcagctgcggctgcagctgccatgctgactcatgtgcccgcagctagcaggagctggcagcatgggctccccaggggctacgacaggctgggggcttctggattataagacggagaagtatgtgatgaccaggaactggcgggtgggcgccctgcagaggctgctgcagtttgggatcgtggtctatgtggtagggtaagagagaagag

SEQ ID NO: 27913 - DNA, 2300 bp, Homo sapien
tactctcaatctcgtgatccacctgccttggcctcccaaagtgctgggattacaggcgtgagccagcacgtccaaccctggcctggcttcttgagtggcccctttttccaccccaaaacctcctacacatccctgaaagtcctgtccaggtgccactcctctgtgaagcccttcctgagaacccgcagccgtctctggcatcacatgcttctctctcgcacacactggctgcatggcgggtgttcaggctgtcagtggggaaaggacttgcgcccccgtcagcaacatcagggcccccacctgaggtggcttcacgaagtcggccacatcccacagccggtttccaagctccttgatctgagtgacggaaacccctttgagtttggtgatgatggaaaactggggttccaggtcccgctcctggtagccttttttggcgaggagagcccacctggggaggagaagtcgggcagtgtggtgtgtccccagcgtgtagtgacaggggcggagctgagccctacatgctcagttctccccccacaccctacaggctcccggcccaacatcgaaggccccacctcctctctggccccacttcccactccagaccccctgaatgagacagaagctccagccatgcatcagagagccaatgccctcagacaatcaccttcactagccagcacccacccccagcctgactagatccagcttcccccttacagactctcctgacccgagatacagctggtggtctctctgggggcctagtgctccagctctcacagatgttaaggactatgtcatgtgccccctgggtggggcctgggtgggggcctgggaaggaggcaagtggacacacaggacaaacacacagcttgttcttgctctcctgtcttgtatcgcctagctctccccaaccccgtcccaatctgcccccttccactccagcccctaaacagcccaaccctcaacttcaacccagcaggaccaagccccaccccccacctcttcccttgcccctccagcctggccaaaagctcttctctcttaccctaccacatagaccacgatcccaaactgcagcagcctctgcagggcgcccacccgccagttcctggtcatcacatacttctccgtcttataatccagaagcccccagcctgtcgtagcccctggggagcccatgctgccagctcctgctagctgcgggcacatgagtcagcatggcagctgcagccgcagctgaacaggaggcaaagcagggcccgagccaggccaggccagttgctgttaaagggacacttccactaaagcaggatccagatccagcctccaacacccagccctcaacccctaatcccagctgccctgcacctcccaccctccctacattccctttgctgggccctggcacacagagaacagcagcagctctgtccctgccctctggcctcacttcctggggtgggagtggaggtggtgggagggtggagacggacagctgttatcagtgctgtgagaggagggcctgagggcagcagcagcagggcggggagggtgttgaggaaagcttccggaagaagtgacctctaagctgacccttgcagatttctgaagttcgacaagcagacaaagatggggatggaggttcctggtgcagggagcagcgtatgcaaagaccagagcatgcaagataactaagaggcacagagtgagagggtgacctggctctgcgaagttccccaggccctcctgaaaagctgcccccgccaccttccccagtgcagtgaggacaacacaagtcctggagtcaggcgtgtttcccagtccacgaaaggggggcgatgctggaaccccctaggaaggcagggaggatgcccacaaggcgcccagcccagtgcatagcccgtggcgcgtgcagtttatcctctcaggcgaggagcctcagcgcaggagagccacggtttctacggcaacctacagcactgggttgccggggcgaccgccgcgggggagcgcgtcgctaattgccgtggcagacgccagtcgatggacgccacactcgattggtcagcgcagccgcagactccgcccacatccccgggtcgcgctctaagtgaggcgccaagcggtctccgcctcagggtctgaggctgcgaaaggggcgtaacgatgagcggttcctgccagaggtctggggaggataaaaagcaggaggaagaggcgacggcggcctgtggacgtcttgcaggggtccccgaagccaagcagggtcccaaggccgattcagactccga

SEQ ID NO: 27914 - DNA, 2300 bp, Homo sapien
caaaatacccaagtattttggctattctggatcccttgcatttccatatgaattttttgttttttgttttttatttttttttgagacagagtcttgctctgtcacccacgctggagtgcaatggcgccatctcagctcattgcaacctctgcctcccgggttcaagcgattctcctgcctcagcctcccaagtagctgcgattacaggcacccaccacttattttaatttatttatttagtagttttggagacagggtcttgctttgccacctaggctgaagtgcagtgacaggatcatagctcactgcagcctcagactcctgggttcaagtgatcctctcacctcagcctcccaaagtgatgggattaccggtgtgagccactgggcctagccaaatactgtatttttgatcgacatttggttgaaaaatatctatgtattagtaaacctgtgttgttcaagagtccactgtgttttgctggggatttctacatctatattcataagggattttggtctgtggttttcttttcttgtgatgtctttgttgagtttagtgtcagggtaatcctggccttgcagaatgagttagaaagtttttgtttcctggtggtttgtcttcactgcatcactgtggggttgctctgtgtagctgtctcactcagtagtgagggaaatatctctggaaatgtacaatttactgcatcagccctgcttagtctcacatatccgttgtatgttggtgcctgtggcagagggtgtggtgtcacaccttctccaggtagataaaaagtcaacactccaaaacactggacaccagcaataaggcagtcattggtaaggcctttggggagctcccattacaaatctgcctaaccctctggcctgaagtgcctagacttttgtggtgacatttcaggacaagggacgtctgctcaggcaacacagggatggggtaaggaagctaccatcccaccggaagtgggagccatctgagaagttcctcaagacaataccagccaaatattagaaggtattggcattctggccgaggcagaatgttccaaattggcaccatcttgtctgggagtccatcatcctgtcaccagcccaataggctggataggctgcagatgctcctaagattccattccacaaaccacatgtaagcctgaacacatgtctagtatagcgttctggggaggccaggagccatggttcatgaatgtaatcacagccttttgggaggccaagagttcgagaccagcccgggcagcatagtgagacccagtctctaaaaaaattaaaattaaaaaattagccaggtgtattgttgcatagctgcctgcctggggcgtggggcactggaatgcagtactcaggacacagtggctgtcgctgataaacacaagtggggatctgctattggggtcccatagggccctcccggcctgccagaggtgcctaggctaggaagggctgccactggggtctgaggagctctactcccccacaggagggctgcaggctggtcccagaagctgcttgcttccttgcaggacgtggtagctgcaggctcaaaacagccagaatgcattccctcaattcgcagaactctctcaaaaggctgcagtctcttccattgtaagagtagaggtcagggaccgccccaggccactctgccagacccatgtcttcatctaactcactgtgcctgaagctcacatgacggtgctgtggggcctgtctggggcccagctgggtggggttcatgtactggggtgagggatcaagaagggtgtccgctgcagtagaaagaaggtgggctgcggactttcagacgtggcccttaacctccccgaactgacctaggctagtcagtcagccggcggtctgaccttctccatctgtgactgagtcacagtcacagggcttccctagaccccggtgagctccggtaacgaccttgcgaggtcgggcagagtgggcagggtgaaatatctgggtgtgtggcagcgggtggggccgcgcggggggcctgggatgggggcgggccctgcgctcggcgccggcgaactgggcgggctcagtgctcagagcggaggcagcggctgcggcagcagcaggtgggttgcagcagatcctgcggggacggggactgggacgggctcaggcccaagaacaggcgaaggcgcaggtgtccggggacgggggcgcggcggagcaggctctagcagcagcggcgtgtcggacatggggaggtgtgcgggcccagggcgcccctgcattccgcctggc

SEQ ID NO: 27915 - DNA, 2300 bp, Homo sapien
aagctcaagccattagtctcaaacactcccttcttttctgttggcagccttcggaaatgcagtttctctggcctggtttctcaacccatccctttttctaccagaaacctcctacacatccctgaaagtcctgttcaggtgccactcctctgtgaagcccttcctgagaacctgcagccacctttggcatcacatgcttctctctcgcacacactggctgcatggcgggtgttcaagctgtcagtggggaaaggacttgcgcccccgtcagcaacatcagggcccccacctgaggtggcttcacgaagtcggccacatcccacagccggtttccaagctccttgatctgagtcacggaaacccctttgagtttggttgtgatggaaatctggggttccaggtcccgctcctggtagccttttttggcgaggagcgcccacctgggaaggagaagatgggcagtgtggtgtccccccagcgtgtagtgacggggcagagctgggccctacatgctcagttctctccccacaccctacaggctcccagtccagcatcctctctggccccacttcccactgtagactccctgaacgagacagaagctccagccatgcatcagagagccagtgccctcagacaatcaccttcactagccagcacccacccccagcctcagtagacccagctccgagcttatagactcccctgaccggagatatagctggtggtctctctgggggcctagtgctccagctctcacagatgttaaggacaatgtcttgtgccccctgggtggggccgtggggagggactgggaagcaggcaggtggacacacaggacaaacacacagcttgttcttgctctcctgtcttgtattgcctacctcccaccccgtcccattatggccccttcccctccagcccctaaacagcccaaccctcaacttcaacccagcaggaccaagccccacccccgacctcttcccttgcccctccagcctggccaaaagctcttctctcttaccctaccacatagacgacgatcccaaactgcagcagcctctgcagggcgcccccccaccagttcctggtcatcacatacttctccgttttataatccagaagcccctagtctgctgtggcccctggggagcccatgctgccagctcctgctagctgcgggcacatgagtcagcatggcagctgcagccgcagctgaacaggaggcaaagcagggcccgagccaggccacgccagccgctgttaaagggacacttccactaaagcaggatccagcctccaacacccagccttcagcccctaaccccagctgccctgcacctcccaccctccctacattctctttgctgggccctggtggcacacagaaaacagcagctctgtccctgccctctggcctcacttcctccggtgggagtggacgtggtgagaggatggggaaggacagctgttatcagtgctgtgagaagacggcctgagggcagcaacagccccgggggggctctgagtaaagcttcaggaataagtgacttctgagctgacgcttgcagattctgaagttcaacaagcagacaaagatggggatggaggttcccaggggagcgaacagcgtatgcaaaggccagcgcatgcaagagaactgagagccacagagtgagagggtgacctggctctgcgaagttccccaggccctcctgaaaagccattcccaagtgcagtgaagaaaacacaagctctggagtcaggcatgtttcccattccatgaaaggggggcgatgctggaaccgcctaggggaggcagggggataaacgcagcaaggcgcccaatccggtgcatggtctgtggcgcatgcagtgtatcagcccgggcgaggagcctcagcacaagccggccacagtttctacggcaaccgacaacaccgggttgccggggcgaccgccgcgggagagcgcgtcgctattggctgtggggggtgcctgttgctggacggcacattcggttggtcagcgcagccgcagactccgcccacaatcccgggccgcgctctgggcgcggggtcaagctgtctccgactcagtgtctgagactgcgagagggtcgtaaccatgaggggttcctgtgagaggtctggggaggatgaagagcagaaagaagaggctatggtggcctgtgggcgtctttcaggggtccccgaggccgagcagggtcccgaggccaattgggactccgacctggagacggaaggtgctcgggggagggggcaggcccgactcctccc

SEQ ID NO: 27916 - DNA, 2300 bp, Homo sapien
ctctgatttcatttcagggtgggacagcccttggtgcactgtctggcgggattttgcattttatcctgatgcttccaggagcaatgaagggaaggcagggggctggaggcgccccgcaggcgggtacgttccctgctggccttagccccagcccgcctcccccaacccctgcgggagaagacccccaaaggggaggagtcgggcctgccccctcccccgagcaccttccgtctccaggtcggagtcccaattggcctcgggaccctgctcggcctcggggacccctgaaagacgcccacaggccaccatagcctcttctttctgctcttcatcctccccagacctctcacaggaacccctcatggttacgaccctctcgcagtctcagacactgagtcggagacagcttgaccccgcgcccagagcgcggcccgggattgtgggcggagtctgcggctgcgctgaccaaccgaatgtgccgtccagcaacaggcaccccccacagccaatagcgacgcgctctcccgcggcggtcgccccggcaacccggtgttgtcggttgccgtagaaactgtggccggcttgtgctgaggctcctcgcccgggctgatacactgcatgcgccacagaccatgcaccggattgggcgccttgctgcgtttatccccctgcctcccctaggcggttccagcatcgcccccctttcatggaatgggaaacatgcctgactccagagcttgtgttttcttcactgcacttgggaatggcttttcaggagggcctggggaacttcgcagagccaggtcaccctctcactctgtggctctcagttctcttgcatgcgctggcctttgcatacgctgttcgctcccctgggaacctccatccccatctttgtctgcttgttgaacttcagaatctgcaagcgtcagctcagaagtcacttattcctgaagctttactcagagcccccccggggctgttgctgccctcaggccgtcttctcacagcactgataacagctgtccttccccatcctctcaccacgtccactcccaccggaggaagtgaggccagagggcagggacagagctgctgttttctgtgtgccaccagggcccagcaaagagaatgtagggagggtgggaggtgcagggcagctggggttaggggctgaaggctgggtgttggaggctggatcctgctttagtggaagtgtccctttaacagcggctggcgtggcctggctcgggccctgctttgcctcctgttcagctgcggctgcagctgccatgctgactcatgtgcccgcagctagcaggagctggcagcatgggctccccaggggccacagcagactaggggcttctggattataaaacggagaagtatgtgatgaccaggaactggtgggggggcgccctgcagaggctgctgcagtttgggatcgtcgtctatgtggtagggtaagagagaagagcttttggccaggctggaggggcaagggaagaggtcgggggtggggcttggtcctgctgggttgaagttgagggttgggctgtttaggggctggaggggaaggggccataatgggacggggtgggaggtaggcaatacaagacaggagagcaagaacaagctgtgtgtttgtcctgtgtgtccacctgcctgcttcccagtccctccccacggccccacccagggggcacaagacattgtccttaacatctgtgagagctggagcactaggcccccagagagaccaccagctatatctccggtcaggggagtctataagctcggagctgggtctactgaggctgggggtgggtgctggctagtgaaggtgattgtctgagggcactggctctctgatgcatggctggagcttctgtctcgttcagggagtctacagtgggaagtggggccagagaggatgctggactgggagcctgtagggtgtggggagagaactgagcatgtagggcccagctctgccccgtcactacacgctggggggacaccacactgcccatcttctccttcccaggtgggcgctcctcgccaaaaaaggctaccaggagcgggacctggaaccccagatttccatcacaaccaaactcaaaggggtttccgtgactcagatcaaggagcttggaaaccggctgtgggatgtggccgacttcgtgaagccacctcaggtgggggccctgatgttgctgacgggggcgcaagtcctttccccactgacagcttgaacacccgccatgcagccagtgtgtgcgagagagaagcatgtg

SEQ ID NO: 27917 - DNA, 2300 bp, Homo sapien
tcccaggagtttgtggcttcagtgagctatgattgtgccactgcactccaacctggggaacagggccagattctgtctcaaaaaaaaagggaaggaaacaaaaaaaattgagttacaaatcagtgctgattctaaccctgatttttttcaacccagacttgagtcaaagcctttccagaaatgtgtctgtgtagtttcaattcttcaggtttgggacaaccgatgtcaaacgtccttaccatttccttctaatggcctgttcttgccttaaccatgtgcctgctgctctgagaattcctgtcagcactggatctgtcattctaaaagaaatagaatgtcatatggcattatcctgcctgaatatacacttacttgtcacaatgtatggtcattatcagaagcccctagtcttgtgggaatgccatgggctttggaatcagttcagggttgggaccaaatcctgtgtctatcaatgtgagatcctggacaagattctgagtcaaagaatcataaacgatcaatcaataacaagcctgggatgggcatgatggttcacgcctataaccccaggacctcgggaggccaaggcaggtggatcacctgaggtcaggagttcgagaccaccctggccaacatggcaaaacctgtctttactaataatacaaaaatttggccggagttggtagctcatgcctgtaatcccagaactttgggaggccgaggcaggcagatcacctgaggtcaggagttcgagatcagtctggccaacatggtgaaaccctgtctctactaaaaatacaaaaattagccgggcatagtggtatgcacttgtaatcccagctactcaggaggctgaggcaggagaatcacctccaggagaacccagaggcagaggttgcagtgagccgagatcgtgccattgcactccagcctgagcaacaagagtgaaactctgtgttgtaaaagatagaagaaaaattagctggatgtggtggtgctcacctgtaacctcagctactcgggaggctgaggcaggagaatcgcttgaaccagaaagcggaggtttcagtgagccgagaccatgccaatgcattccagcctgggtgacagagcgagactctacctcaaaaaaacccaaaaaacaaaaaaacaaagaaaaacaattagcctgaattgaatattctatcttctattccttaactgttgttatctgttatcactagtataatctgactagcccagattttattctgagctttgagggaaatagttttgaagacttatagttcaaggaaaatctttccctaggctcagacttgtgtttttgtgaaatggggctaacgtctaccccgcaaggccatcatgaacataagctgagatgacagacctaagggaaaggccttgcacagagaaggactccatcagtgccagttctgttcttcacaaccccttggttttttgtttttaattgaggaacaacatctatgctgaaaaatgcacaaagattaagcatagagcttggagaattttcacaaacagcataggtgtctatgtaaccagcccccagatctggaaatacagcatagccgggcatggtggtgggcacctgtagtccctgctattctggaggcttaagcaagaggatagatagcttgagtccaggagctcagggatgaagtgagctatgattgagccactgcactccagcctggtgacacagtacgatcccatttctaaataaataaatacagcaggcctctaaacatcccccattgtccccttctctcctggatcttactagtttgcgggtatgagactgtcatccacaggggagaagctgcccgaaggagcttctctgagaccttgcgtgtgtgagtgaaaaatggtgaagttctcagatagtaacaaagttcatccttgtaatgggtgtctccttaggatatccaggtgaacgcagagtttgatggccttgctagctcagtgaggggaattcttccagaactctgcataaagactggcgcttgcagagtggagtataaaaaggagttgctgccagtcttcagatcagccctgccagcgtctgtccctaagtgaccttggagtgtggcttcctcatctccaatcagctgctttgacctccagggtgaggagctctttgactcacgaggccttgttaccacttgtgtctgcactgagtcctcacgtcagccgtgtgctaagtccacacggtgctcacacacctgtaccctcctctgtgccccacggaccctgcactcatctgggccttcatgtgctctcac

SEQ ID NO: 27918 - DNA, 2300 bp, Homo sapien
gttgtagtcgcatggcaaaaacccatccctacaaaaaaaaaaaaaaattagccaggcatggtggtgcacgactgtagttccagctactcagggggctgaggcgggaggatcatctgggcctagggaagttgaggctgcagtgagctgtgatcacaccactgtactccagcctgggtgacagagtgagatcctgtttcaagaaaaaaacatatctgtagtcatgttattgggttttgtgaaaattaggtgaaattgctcagtaaaagcacagtttctagcccaatgtgtgtctgcactttgcagatgttcaagactcttcttccagtccctttctctgtcatacttatttctccccagggcctttgcatgtccatgctcttcctttgcctgaggctttttctcatttccttctttactcaagatcccatatgcagacctagctcccccagggggccagataaggatgggcttagagccccagaaaagtcaggacaggaaagggatgagaaaggttgcacttcagcaaccagaatcaggaaatctagaagagagttcctttaacctcaacatgtgcatatattttgtgctttatggttttgcattcttttaattttgatttacatcgggtatcttggctgggcgtggtgactcatgcctgtaatcccagcactttgggaggccaaggcaggtgaatcacttgaggtcaagaatttgagctcagcctggccaacatggtgaaaccccatctctactaaaaatacaaaacttagccaggcgtagtggtgggcgcctgtaatcccagctacttgggaggctgaggcaccagaatcacttgaacctgggagggcggaggttgcggtgctgagatcatgccactacactccagactgggcgacagagtgagactctgtctcaaaaaaaaaaaaaaaaaagtgacataattaaaagagccatcatctatggcctttaagtgtcatgtgtgtgctcatctttccttgctttactactcaaagattatcttttccatgtgacctgctctttcctgcctctgtcaccaccaaacatcaaagccttaagttttgtttggctgtttgttatctcttgagaattgagcaccagagctattgggtgggcttgatgttgacctacaatgcaggatgtctgtgggcatgactctctcctaggcactcacagacacttgaagctggggactgaggtcctctagtgtgtgtctgtgggggtgaaggagtgcaccctcatcctcctgcactttcgggtcttgtagcagcaactccctgtttctgtcctttctacttactgctggtttcatcacactcccagggttaatttaaagaaccagcctcggtgtgatgcacctacaacaaacagagccacttctgtggggagctctggagctgggatggcccctcagagtctagaggtggtgagagcgctggagcttcatcaccgtgctaactgtgtccctggaagagtgagggagcttgagtgattccttacccaagggccgtcataaaaggtctcagctgatgcctactgccgatcacattcagctatttgggaagagatgttcagtccttaagaggacattattagtggacatcactctttccacaaaagccccagtcttgtgttacttagtcccactagcttctttaaagaaaccccaagagcatttcctccaggaatctgtttgatctcttttcctgggggagatttccaggtgattctcattggaatgaatcctaggtcctgttgctgctgctggtctcacactgtgactgatgctaagtccttctcttccaccaccattctggattttccttgctatagcctaagtgtttatgtctccccaaattgtcagcgttggagcaccaagaagacaggcagcactgacagtagcagaagagtaggaggtggctgtggcaccccacgccgagcaggagcgggaggagttcctgggcgatggggccgcagcctgggccgatgctgaccatgggatgagatcattcttcactctgcaccgtgaccatcagggggcgccccaaccaccttttctgccccacatcgtgctcttgcagtgttctccccgcaggtgctgcatggagtgagtggcggcatccaccgtgaggaggagaggagctctgataccctcaggacccgccaggaggggcatcacggaggcttctggacgacttggagctgtgtcctggggagaaaaccgctcctgtctgggccctgagtgctgaggaggaagctgccatgcacttttccctggcatt

SEQ ID NO: 27919 - DNA, 2300 bp, Homo sapien
gacctgcctcaaatgccaggggagggcactgagaccccagagggtccttcccagcatcttcaaagcaacaggattttgtgcctgcagatccttctttgcagcacacaccacccaccctgaccaggacccctagaatgcccagcatccctgggagggccctgtggtagtttcagctccctctgagggcccagaatgaacctggcctgtggtgaggatgtaagcaccaatggccaattgggtccaaaggaagacaccggttcaaacactgaaaccaatcagattctcccacggccttcctgctatcagaagacactggtgcaggggtggttgctatgtacagggcagagccacccaatccccacgcaggcgctgtgtcctgccatgctggcctcctcctggccatcacatcaggccaagcaggggagaggaatgggaatgcccacgcacccctatcaactctgcagacacagaaccatgcacagctcttgggaggagtcagatgagctgctcaaagcccaggagggacccacacagtggtcagcatggcagggacggtgctttagccaaggcagggatggtgggtgactcactcaggatcttcaaggaggccgctgcatttccgtgctctttccagataacaaggacgtgtcagtgatgatgagcgagatggacgtgaacgccatcgcaggcatgctgaagctgtacttccgtgagctgcccgagcccctcttcactgacgagttctaccccaacttcgcagagggcatcggtgagcactggaggccttggcctcatgggagacgtctcctccacgtgcactgctgccctcagaggctgtgaaaagtgaggtgtgggaacccgagctgtgcttcctctgccatggtcggaattttaacccaacctcaaaaagcaggggaccaaaactgagcctatcctggaaggccttgcccatccccagagggctccccatccatatttctcaaggaggccaagtgggtgaaatggtcagcactgccgtgctgtggggtcctaaagtctgctgtcctccttcctgcagaccagggctaaacactggtgcccaggtgctcttgccatgggtcctggtccagccaagcatggtttcaaacatgacctgacccttagtcaacctggaggctgatgtctagagtgggcgctggagcgtgcagcacctgtagcctgtgcatcacccttagggcaggtctgcctcccgggcccatgcacagaggacctggtctcccagcctgcaggtgcccctgtggtgtccaggatgtcgagggggtctctgcgtacttggtggggctgggaccctcccacttcccacctccttgtgtccctcactcccctgtttcattccatgctgagcctcccctgccttgggctccctggggagggggtggtggcaggagttgcccgagggcagctctgcccatgagcagctgctctagcggctcctcctgctgctgtttgccgggtgctgctgacccctgcgaggtagagaaaaggcgttcaggtggttcacaccccacacaggtgcccctcacagggtcctcactggcggccagcgctgtgggtgtgacgatgatgacaagcctaaactgcgcaaggactcgtgtccctggcgctccatgtgaccacctcgggagaggtctccggcttgtcgtaacccaggggagtgacccactgcctcctgcagctctttcagacccagttgcaaagaagagctgcatgctcaacctgctgtcgtccctgccggaggccaacctgctcaccttccttttccttctagaccacctggaaaggtagcccagctctcttgtggctgcccaggactccaggtctccaggccgtggggtgcccctctgctcccaccagacccccagcaccaaggaccttttcccccgacccctgtctgcagtaactcactgcttctaaggactagcaccactgccacccccgcccctgcctctcctctttgccaccctcctccctctgcactgtggccttaacaaagagctcagagctttggccgtggccagcagtgcatttggaccgcccccccttccctcccaagcacatcaggaagacctccccatcagcccagagctggccccttgtcctgggccactgagacccagaagtaccaaggctggagtcagcttgcagcacagccagggtcgaggtcactccctccctgaggactctagcacggcacagcccctctgcctctctcctggtggtggcgttgaaacagcaccctctgcttcggtcctctacaggat

SEQ ID NO: 27920 - DNA, 2300 bp, Homo sapien
acctcgacctgccctcgcggagtggggaagaggagagtggctcggaagggggcgcacagctgctggtgggaggtctttggggcccaagatcccaagtccacctcaggtgctagaaacccctgctggtgtcatgaaccccttacagtgagacgggggtggggtggggtcctgacaaggcatgacttgttgggtggggggtggttatttattttagagatgcacagggccttgctctgtcccccaggctggagtacagtggctccatcatggatcactgcagcctctaactcctgggctcaagcaatcctcctgtgtcagcctcccagatacctaggattacagatatgtgccccaatgcctgcctaatttttctttgtattttttctggagatggggtttgctacattgcccagactggtctcaaacacctgggttcagttgtcctgcctcggcctcccaaagtgctgggattacaggcatgagccaccacactcgaacacttggggtggttttaagcccccagcaaggtgcaccagcaggaccaggaggtggcctaggcaccccctatcactcccatccatgcaaacctaggcaagtccctgtctctgaatctcagccaccaccacatacaatgcaagtcggaagatgggcaggactgggggtggggcaggcagaggccacctctgtcaggctggggttgcatgggctggaggctgtcttcccatacctgggacatgacctccaaggaccagctgtcagtcatggtgatgggctggctggggttggcagggagcttgctctccttctcggagggccggagcagcgtggggccaaacaccgtgccaaggttgtgcagggacatcttattgactgcctccttctctgccatcctgtagaggaccgaagcagagggtgctgtttcaacgccaccaccaggagagaggcagaggggctgtgccgtgctagagtcctcagggagggagtgacctcgaccctggctgtgctgcaagctgactccagccttggtacttctgggtctcagtggcccaggacaaggggccagctctgggctgatggggaggtcttcctgatgtgcttgggagggaagggggggcggtccaaatgcactgctggccacggccaaagctctgagctctttgttaaggccacagtgcagagggaggagggtggcaaagaggagaggcaggggcgggggtggcagtggtgctagtccttagaagcagtgagttactgcagacaggggtcgggggaaaaggtccttggtgctgggggtctggtgggagcagaggggcaccccacggcctggagacctggagtcctgggcagccacaagagagctgggctacctttccaggtggtctagaaggaaaaggaaggtgagcaggttggcctccggcagggacgacagcaggttgagcatgcagctcttctttgcaactgggtctgaaagagctgcaggaggcagtgggtcactcccctgggttacgacaagccggagacctctcccgaggtggtcacatggagcgccagggacacgagtccttgcgcagtttaggcttgtcatcatcgtcacacccacagcgctggccgccagtgaggaccctgtgaggggcacctgtgtggggtgtgaaccacctgaacgccttttctctacctcgcaggggtcagcagcacccggcaaacagcagcaggaggagccgctagagcagctgctcatgggcagagctgccctcgggcaactcctgccaccaccccctccccagggagcccaaggcaggggaggctcagcatggaatgaaacaggggagtgagggacacaaggaggtgggaagtgggagggtcccagccccaccaagtacgcagagaccccctcgacatcctggacaccacaggggcacctgcaggctgggagaccaggtcctctgtgcatgggcccgggaggcagacctgccctaagggtgatgcacaggctacaggtgctgcacgctccagcgcccactctagacatcagcctccaggttgactaagggtcaggtcatgtttgaaaccatgcttggctggaccaggacccatggcaagagcacctgggcaccagtgtttagccctggtctgcaggaaggaggacagcagactttaggaccccacagcacggcagtgctgaccatttcacccacttggcctccttgagaaatatggatggggagccctctggggatgggcaaggccttccaggataggctcagttttggtcccctgctttttgaggttgggttaaaatt

SEQ ID NO: 27921 - DNA, 2300 bp, Homo sapien
aataagaaaacacacagctatagtccaagctacttggcaggctgaggcaggaaggtcccttgtgtccaggaattggaggctgcattgagctataatcgcaccactgcactccagcttgggtgacaaagtgagaccctgtctctaaaagaaaaaaaaatcggcctgtgagcatgggcttgattttcaaacaggacccggagggtagggacagacagtgctgtcacccttaggtgctgaacactcagaaacgggccagcggcagcccttccctcacctgcagacaccagattgggcagaacagcacgtggcacttgcagctcttgcagtgagggcagaacccagtgtcaacccttctgcctgtggaaggggctgctgaggcctgcggagaggccagggtggaggctcgtccccttgtccagcccttggcgtggtctccaccaggtccccagcccaccagtgcagggcgcccctgagcctgctgctgccacgggccctgtctctacccaggacgtccccacaccctcgcagtgtcagggaaatgatcatggtggcggtgacactccgcaggcagggctgctgagagaagctgagaagggtcacaccgcaggcaggggcccgtgtgacaagcccctctcaccccgagagagctgaccaggcagctcacgagcagagccacatcccgggagtccgagaaaggtcctggctgggctcagccacctcattggccacgggcagcctttgtcgtgtgagccttgctctcctggggaggctcaggctgacggctgatgtgggcattgccgaaggtaacctgtggcccagtgtatatggccgggtctcctcaagctgcattcattcaagtaggacccagggtgcatgcccatctccagcccagggcagctcccctgtaagctgggtgagctactgaagccaaggcgggaggcagctgacaacacccacagcccatgcggaggtggtggaaaggctggactcagcagcaacaccaaatcctggaccaggcagaaaccacccaagactgaggggctcgtgccagagcggtggccacaggtaagaacccgggcccaggctgtgtggcaggaatcctccatgtcccagggcttagcatagcaaaggaagaccagccgggtcaccctggtggccatctgtccctgtcccacctgcagagtcagaacagcctctccccagtggggatcatctctctctgccaaaataacagcggtccctgccccaaccagactaccccactcagtggggttacggatgctgctccagcatcctaacactgcccagctggtgcctgcctgtgctcacccacaccccccaggccggccttccctgcagcctgggcttggccaccttggcctgattgagcactgaggcctcctgggcacccagccccatcactgcacctgctgcttccagccccaccccaccggctcaggggttcttcccagcggcgctgatcatgaagtcaacatgcacgcaagtcgtctcaggaaacttcttaatgaaagtgtcggccacggtggtgtgtaggtggctgagctcagattgcagctgctaagacaccagccacttaccaagagaaagccaggctgcttcaaacccagggcccacggcaaaaaagcatcacttccggccggggagtctggaagccacgccttgtgggaggtcacactggcatctaggccttcgcctgcattgcagaaggagagccgggtccccctcctggagaacgctgcgttccccagccccacaccggctttgccaccacacaggctgttgaggcaggaggcgggtaagacgtagctgtagacccaaagcaaccaccagccctgggaccctgcgggagaggagcacttttagaacatggaaaagtgtggtcatcccatcattagacagcacacatcctacataaataaaaagtcgtatggggaaggaggttggggagggaataaaaaattggcacagacattgatagactggtttccagtttcaaggtaacagatgcacatcatgagaccagaggaggcagagacaaggctggatttggcttttctaagcaacacgtgttcctgcgcagggctgaatggttgctgagacagagatggaagccaggacaagggagcccaccgggcccagataggtacagagagcagaggctcctgttctgtcctcgccacccacgagggtgacactgcttgtaaatggtggctgtgctctcccagcaagaaaaaagcacaactaaatccacactgcacacagacgcagacagaaagcct

SEQ ID NO: 27922 - DNA, 2300 bp, Homo sapien
gagaagaacaaggtgtggcacttctgctcctgcagctgccgcagcagcccctcccccctccacattgaaccccacgttggggtcactactggagtggatggaggcccttcacatttctgggcctcagccacagctgcagcaggtgcccagaggtcagaaccagagatcccagacctcccggaccagctcgtgccccaaacgaaatgccatctcgagcccctaccgctctacgggaggcctcccggaacgaaagcggagaagggggccagcctcatcccactgccagctgaccctcagttcctgaaacacagtgagtgaggacggacctcaggctgtctcttcaggtcacacccagtgtgaaaagatggcagatacagcaccagggcagacactcgcccccaggggtggctcccccagatcccaggcctctaggccctgtagatgcaagtttcccctgctgccacgcaggcgaggggagcctttgatgctgccacctcccttagagctggggtaccgggtcactgctgaagacctggaccaggagaaggaggcggctttccagcgcatcaggagtgcactgcaggttgaggacaaggccatttagtactgcagaccctcacggccttcccacactttgtcctcacttgcaacaggggcttctggtctgcctgccatttctaaagcacccagtatggatgcacagcaggagagacacaagtcccaagactgcctgggcctagtggccccccagcatctgctgcacaggcctgtagtcccagctactcaggaggctgaggcaggagaacggcataaacccgggaggcagagcttgcagtgagctgagatcgcgccactgcactccagcctgggtgacagagcgagactccgtctcaaaaaaaaagaaaaagaaaaaaaagttattgtgacatttctgtatgaaatcagccttcactacatggataggaccagcacgcttccgtggcacgactctgcaatcatactacattttttttttgtattttttttattccttttgagacagagtctcactctgtcacccaggctgaagtacagccgagatcttggctcactgcaacctccacctcctgggttcaagcaattctcctgtctcagcctcccaagtagctgggactacaggcacacgtcaaaaggcctggctaatttttgtatttttagtagagatggagttttgccatattggtcaggctggtctcgaactcctgacctcaggtgatctacctgtcttagcctcccgaagtgctaggattacaggtgtatgtttatttatttatttaagatggaatcttgctctgtatttattaatttatttagttgagatggagtcttgctccatcacccaggctagggtgcagtggtgcaatctcggctcactgcaacctctgacttccagtttcaagcgattctcctgcctcagtgtcccaagtagctgggattacaggtgcctgccaccacagctggctaatttttgtatttttagtagagacagtgtttcaccgtcttggccaggctggtctcgggctcctgacctcatgaaccacctgcctcagcctcccaaagtgttgggattacaggcctaaggcaccatgctcagccatatttatttaattatttagagacaaagtcttgctctgtcacccaggctggagtgcagtggcgccatctcagcttactgcagcctccgtctctgaggtttaagcgattctcatgcctcagcctcctgagtaactgggactacaggtactcaccaccatgcagggatatttttttctattgttttatagagacacggtttcaccatattggccaggctggtctcgaactcctgaccttaggtgatctgacagcctcgtcctctcaaggcactgggattacaggcatgagccgccaagcccggcctctcactacatttaagtgacgccatggctcatgcctgtaatcctagcactttgggaggccaaggcaggtggatcacctgatgtcaggagttcgaaacgagcctggccaacatggggaaaccccgtctctagtaaaaatacaaaaattagtcaggtgtggtggtacaagcctgtaggcccagctacttggaagactgaggcaggagaatcactttaagcgggaggcagaggttgcagtgagccaatctcaaaaaagaaagaaaaaaaaaaagaaaaacatatgatgctggagcatctcggcctcaatacctgcatgagcacagtcatgtccaggccagggctgctggtcgaggtccggcccca

SEQ ID NO: 27923 - DNA, 2300 bp, Homo sapien
cctgatatagacgataaatcatacatgatatagatgatatatatcatatatgatatagatgatatatatcatatatgatatatcatatattatataataaatgaaaaatattatctataataaaagacatatattacataataaatgatatatattatgtaaaatatatgatatgtattatatattatatctgatatatattatatattatatattatatctttaatctgatatatattatatattatatctgatatctgatatattatatattatattatatataattatattatattatattatatataaaatttatgatatatataatatattatatataatttatgatatatattatatattatatataatttatgatatatattatatattatatataatttatgatatatattatatattatatttcatatatattatggtatattatatataattatattatatattatattatatataatataccataatatatcatatattatataatatataatataatataatataatcatatataatatataatatattttattataaaatatattatattatgatatactatatattacatattacattatacaatattttatataatatataatatatattatatattatactttattatattacatatataattatacattattatatttcatatataattatatatattatattatatataatattctgtataataatatatattatacataatattatatattatgttatatataatattatgtataatatatattatacagaatattatatattatattaaatataatattatatcttatattaaataaaatattatatattatattaaataaaatattatatattatattaaatataatattgtatattatattaaataaaatattatatattatattaaatataatattgtatattatattaaatataatattatatataagggatgcaggatgtaaaaggaaattatatatatgttatatattatatatattatattatatataattatatatatatatttgggggtgccctatttcctatctcataacttattttaagaagcacagcataataatgtgtggacttgggattcagtttttgaaacgaaacactgagccttcgatgaccttcctgtacatctgaaagcacacctgtctgcatggcagcagttggacctcacagtgtggattgtgccttcaccctggaatgtttatgccctatcaccatggtgatgggattagggatctgctgcccttggtcctaagtgccactatctgtgctgagtttttcaaaggtcagagcagattgaacctttgtggtttcattttccctgattttgatttttcttatggggaacctgtgtggctgcattcaaggtatgttcatactggcctgtcaaatgcgatcttttcaaattactagttaatgctttcaaaatatgttatttaaaaaattagcctctgtattttccatatgcagttataaatatgtttcatgattatgttttattcctcaatttatatatttgattattgtaccaagcagagtatctttgaaatttttcttcatttaaaaaatatgtatcttgactcaggcctgtaatcccagcactttgggaggccaaggcaagaggatcacaaggtgaggagatgaagaccatcctggccaatacagtgaaaccctgtctctactacaaatacaaaaaattagccaggcatggtggcagctgttgtagtcccagtgtgaattgggattcagtttattcccaaattcccaaattatatatatatatatatatatatatatatatatatatatatatatataaaatatatctataatatattaaatatattatatatataatatatattatattatatataattttatgtatatatatatttgtgggttccctatttcccatctcataacttattttaagaagccagcataataatgtgtaggcttgggattcagtttttgaaacaaaacactgagcctttgatgaccttcctgtacttgtaaaagcccacctgtctgcatggcagcagttggacctcacagtgtggattgtgccttcaccctggaatgtttatgccctatcaccatggtgatgggattagggatctcctgcccttggtcctaagtgccactatctgtgctgagtttttcaaaggtcagagcagattgaaccattgtggtttcattttccctgattttgatttttcttatggggaacctgtgtg

SEQ ID NO: 27924 - DNA, 2300 bp, Homo sapien
taaaatattatatattatattaaatataatattgtatattatattaaatataatattatatataagggatgcaggatgtaaaaggaaattatatatatgttatatattatatatattatattatatataattatatatatatatttgggggtgccctatttcctatctcataacttattttaagaagcacagcataataatgtgtggacttgggattcagtttttgaaacgaaacactgagccttcgatgaccttcctgtacatctgaaagcacacctgtctgcatggcagcagttggacctcacagtgtggattgtgccttcaccctggaatgtttatgccctatcaccatggtgatgggattagggatctgctgcccttggtcctaagtgccactatctgtgctgagtttttcaaaggtcagagcagattgaacctttgtggtttcattttccctgattttgatttttcttatggggaacctgtgtggctgcattcaaggtatgttcatactggcctgtcaaatgcgatcttttcaaattactagttaatgctttcaaaatatgttatttaaaaaattagcctctgtattttccatatgcagttataaatatgtttcatgattatgttttattcctcaatttatatatttgattattgtaccaagcagagtatctttgaaatttttcttcatttaaaaaatatgtatcttgactcaggcctgtaatcccagcactttgggaggccaaggcaagaggatcacaaggtgaggagatgaagaccatcctggccaatacagtgaaaccctgtctctactacaaatacaaaaaattagccaggcatggtggcagctgttgtagtcccagtgtgaattgggattcagtttattcccaaattcccaaattatatatatatatatatatatatatatatatatatatatatatatataaaatatatctataatatattaaatatattatatatataatatatattatattatatataattttatgtatatatatatttgtgggttccctatttcccatctcataacttattttaagaagccagcataataatgtgtaggcttgggattcagtttttgaaacaaaacactgagcctttgatgaccttcctgtacttgtaaaagcccacctgtctgcatggcagcagttggacctcacagtgtggattgtgccttcaccctggaatgtttatgccctatcaccatggtgatgggattagggatctcctgcccttggtcctaagtgccactatctgtgctgagtttttcaaaggtcagagcagattgaaccattgtggtttcattttccctgattttgatttttcttatggggaacctgtgtggctgcattcaaggtatgttcatactggcctgtcaaatgcgatcttttcaaattactagttaatgctttcaaaatatgttatttaaaaaattagcctctgtattttccatatgcagttataaatatgtttcatgattatgttttattcctcaatttatatatttgattattgtaccaagcagagtatctttgaaatttttcttcatttaaaaaatatgtatcttgactcaggcctgtaatcccagcactttgggaggccaaggcaagaggatcacaaggtgaggagatcaagaccatcctggccaatacagtgaaaccctgtctctactacaaatacaaaaatttagccaggcatggtggcagctggtgtagtcccagtgtgaattgggattcagtttattcccaaattcccaaattatatatatatatacatataaaatacatatataatatattaaatatattatatatataatatatattatattatatataattatatatatatatatttgtgggtgccctatttcccgtctcataacttattttaagaagccagcataataatgtgtgggcttgggattcagtttttgaaacaaaacactgagcctttgatgaccttcctgtacttgtaaaagcccacctgtctgcatggcagcagttggacctcacagtgtggattgtgccttcaccctggaatgtttatgccctatcgccatggtgatgggattagggatctcctgcccttggtcctaagtgccactatctgtgctgagtttttcaaaggtcagagcagattgaaccattgtggtttcattttccctgattttgatttttcttatggggaacctgtgtggctgcattcaaggtatgttcatactggcctgtcaaatgcgatcttttcaaattactagttaatgctttcaa

SEQ ID NO: 27925 - DNA, 2300 bp, Homo sapien
tttgcacttgccaacctacgtggacctgagagatccaccatccagaagctgatgtcttttccagtgtgtatcctacccttgttttggaggccttgaagttgactacactttctgatcaagttttcagtattcattgagagaaacagagccttgtgcaaacaatccacaacatgagatacccctgaaaaagctttgtttctgtattgcaggtggtgcaggtggcccctctgaggcttgaatctagtaagtattctggaatcacttgccaagaaaacaatctggatgccaagaaaggtgtggcatccttgcctggtttcaatgtgaagagcctccctgatcctgggattgtgataggaataagtataggggaagtgtttttttaaaacctgaattccccagggaaaaattatggccaaattttgaggaagcagctgtgctcccttttgggtggtgctgagttgggtgcttgaggattggtggtgtcttgtgtgaggctgcatcgtgtggtgtgaatgtgtgtgtttctgtacaggtgaggctgtgtgttttctcaggagagatttcccacttatacaacccaatcaccagtgtccacttctaacaataaaatccacccccgctctactctctctgtacagtgactcctccaccctcaccagagccatccccgggtctgccttattatccccactgctcaggtggagaacctgaagggccaagggagtggccccagctcccgagttcctgaatgaaacagtgaaaacacgaacccaggagtgtggaccagtgctgacgctgacatgcacttagtcatggggtgttcaccaccacacacggagtccagcattcatgtataagccctaaagcaacgagcccaaaaggccccagacactgcccatcatcataaagtggcctccgtggtcacacaacccagggcagttatagcctcatctccccacggaccgacatagtcatcagtgtgtcaaaagcacaaagatccccaggtgtttggctcagctcacagatccctttttttatttaacttttcagttcaggggtacatgtgcaggatgtgcaggtttgctacatatataaatgtgtgttatgagagttttttgtacagattattgcatcacccatatattgagcctaatatcagttatttttcctgatccaccccctcctcccacctcccaccctccagtaggccccacgctcacaaattctaagaggagtgggggaccacaaaggccagtgtggcccacttcagttgtgaagttaatttgctcagcaactggccaaagtctataaggatgggtgatgtattttagtagatttagtaatactatcttcccaagccctaaaatgctcaaatcctgccagccaaaaatggtgaggagggacagataggaactctgtgtggcacttggttattagcctggcttccatcccttagtggcaactctcttgtatatgtgggttaaagaccctcagcctcaagccaagcctcctccatgaggagccatctcactattgaccggctagtgccgggtatggccaccagcccaactgaaacaaaatgttgctttaaaacaagtgtaaatctcatacatacaacaggcaaatgcagaagcagtgtggtctcgcaagttgtaaagaggacagtcgcaattttgctggacttcaacctgggtagaagacatgagggaacctgtcactaaatcacggcagagttcaaggccacttgtagactatttcatgttacagaaggtggcctttagctactaagcaaaggcctctgtttctcatttctttcctgttcatcttcttggtcatccttcttccgcaagggaaacgagcccaagcaaaaggcagtttcaatattaatttgaccgaggttttgtgcagtttattatcatccaggtaatcaggtgcaacccagtctgcctagccgcccccctatctctgctctgtgttttcatttaataaacattttggtctacttactatgtgctagattttctcgagaccaagtaaatgagatagaatctttatgctggcagctaagttagatttcacataactgacaaaaattaaaatttctgatttcttgtaaaaatattttgtatgtgtgaatgcatactgaatgtaaagtggataaaaaactcacacttgcactcatggaaggcttttcatgaatttgtcaatttttattttttatatttccccacttcaccagataatgcatacctgaacctggaaactgattcccactgcagaaagtgttctgagccacatcc

SEQ ID NO: 27926 - DNA, 2300 bp, Homo sapien
gtttttagttttattgatgtgatgtatcacatttattgacttgcgtatgttaaaccatccctgcatccctagtatgaaacccacttgaatcatggtggattatctttttgatatgctgttggattcagttagcttggttgtagcatttcttattattccatctgtggaatgtattggttgaaataatgaaaacatgttctatcctcactgcttagcactttgtgtttctttaatagccttcccaacagggcaacataaaagcaggagccctgctagtctccccttaacccggaatccccccttctccacagctcgctcattggacaggatagactgggcgcccaggcttcaaggtaaggacgtgctctgtcacctagaggtgcagtgcttgggaaggccaaccttggagggttgcctgccagctttacagtgacagaggtgttgagagggactgaccaccagtgcataaggctgtgctttgttggtgacataaaggattgtttcacagattgttggggagggacaatcccaaggcctcccctggccctggtgctggctctgcacaaaggcaataagagagggatgctggtaagggctgacctgttgctgtgctggggaggaaggtgctgggctgaaattcaggaggctgaggatgcagcagtcccataggaggtacatgaccttcaggatacattttcttcattgatgatcaatggaaatgagaaatcactgactattttttctatcattggaatctactctccactgctcatgctgttcctgtcttttggggaagatggaggatcaatcagtgtgcactgcactgagtggaaggaaggagaactgtgacaaaaattaaggaaggatgagagacgggagggcccttcatccagctgcttgcagagtcctcctgaggaggaaagccccgtggctccctggagaaggagcattgagggctgcgtgactcccacagtgaagtgtgtggtatgtctgaggacacccaggctggtggtccatgaggagccagtggcagagtgagaagaagaaaggccaggagggtggctggaggccaggctctgagtcattctccatgtgatggaaacagccggagcccagtgggcttggaggtacaggatgcggtggctgatgacagaacaatgtggagagaggcgtcatttgtcaaatccttactttgttctgggcattgtgctaaaaattctgatggctcatcccatttaggggctgaaagttgcagaggtttaggaagctcacccacgatactggagcccccatctcctgccctagtgctgtccaccttctcacccagccaccacctgtttcgggggaacacacagaagtggtaacctcttatggagaggcaagtaaattctgctgtttttgttattcacagaaaaacactggctcgtgtgggttgggaaggtgaaataccagaagtatttcatctggttatttctacccatgcgactcctatagtattgaaatgcataggttagcatttttggccaatttactcagcattctgggttaaaggcttttatttattttatttatttatttatttatttatttttgagatggagtttcactcttgttgcccaagctggagtgcaatggtgcgatcctggttcattgcaacctccgcctcccaggttcaaactattctcctgtctcagcctcccaagtagctgagattataggcacatgccaccacactgggctaatttttttgtatttttagtagaaatgagatttcaccatgttggtcaggctggtttcgaactcctgacctcaggtgatctgcccccctcggcctcttaaagtgctgggattacaggcgtgagccaccacgcctgccctaaagtcttttaaaattcacttgtataagttgacttagttttctttaaccttgtagaaaaatacaaaaatggcaatctcttttatcacacaaataatgtctttttaatggagtgatttttttctaattgaggtattatgtacttttcatttactaattattgtttacatttgaagtgttttatgaattaatatttaattgcatagatgaagattactagttataggcattttactaaccaatactcattaagcatagcgtggattcctatgacatcaaggagctattttatttggtaaaacgaaaaagcacaagaatgaacgaacgcaagaactgaaacagtggagacacctagaatgacttgtctaagatctaaatcattttgttgtcttcccagcgtacttattatcctgatcattgtcat

SEQ ID NO: 27927 - DNA, 2300 bp, Homo sapien
ataggcctttgggtagctctgagacccacggggcactgctgaagcaggaagcacatgtggctgcgggtccttgctcagaccttgtacattgaaggtcctttggctccatgcgtaaggaactatgaactggctgtctcccttgttgctccttaatgctgaaggaaacatgaggaagagggatgcaggagcttccagtgtgggcagcactggtcacagtgtttgccagtgtcaaagggttaaccatatcaaggctgttctgtttttctgcctatattaatgtccagtttttattatcacaactaagcagtgggtgttgctagttcttttattaatacacatactatcatttgtttatttttcctttctctaactagtctgtgttccagcaggagaccttttttttctttttttttttttttgtgtgtgtgtgtgtgtgtgtgtgtgacggagtttcactcttgtggcccaggctggagtgcagtggtgcaatcttgcctcactgcaacctccacctcccgggttcaagcaattctcctgcctcagctcctgagtagctgggattacaggcacctgccaccatgcctggctaattttttgtatttttagtggagatgggggtttcaccatgttggccagactggtctcgaactcttcacctcaggtgatccacctgcctctgcctcccaaagtgctgggattaaaggcgtgagccactgcacccggccatgtgatgggaatgttctgtgtccataatagatgctgcatattgctggcccagctcctgaggctctttggacctccaggaatcggtgtctctaccaggaacccttaaccctgacccggactcccggctgggacccggggtgttggagtggcaagagcgctgtcaggcctggtgaagggtgtgagctgtccaacagggcagggaggaggcagggcctgttctgcagttggacagacagagccctctagctgctttctggaagactgaagggcaggtgatgttggagggagggagtgcaggcaggggctgtgagggagttcaggtcagaaacaggtggcgcctggattcaggctgtggtggtcacggtggggatgaggggctgctttggattgtgctggggatgtggggtggtgcgctgctgcatggctactgccaggtctctctgctcttggtgtctgcatccagggctgggagggggtcaaatgtatcacactatcggccccaggcccaccaagcctggggaggtggccacccttccacgatggcatttggatgttccctgtgtgtggggagggcacggggactccattcgtagaccacctctgggacagtgtgtctgcctctgaggtcagatgctctgcactgggacagcgtggagtggagggaaaccaagcttggggctcattggaggggcttgctggcagacaccgccctttgtgggaaactgactgtgggagaggggaaccccaacctctgtcaccacatccctcttccctgttgtcacacctgtcacctgctgccgtagccatgagacttcccaagggtcactgctgccactcactgcacagcctggaagggagtccacaggggacatacagtgagcaagagacctgtgccactcaggcctcctgggggtgtccccagtgcagccatgatgataatcacagctaccattcaccaagccctgcccacagtctaacctactctattcacaacactcccagcagcaaggcaagtgaggtgctgccgtcatccaggctggacagttcagtgatttgcctgaggccccacagcaggtgagtggcaagtccagcgtcagagcagggcaggctggcggtgcctcctgagccccctttgccatgcttaccgcatgcacatcctgggcttgtgcaggaatgccctgtcccctacctgccctgctccgtgcaaaaccctgtgcctgggagacatgctgagagaattcatggaaacaaatgtgttactgacagcctctttgcctccagagttcaactggagacagagaaaccagctagaggcagagggaggtaacacggagtcccccagaaaggtctgggctgtgcgtgcttcaggtaacctcccttgaccttcaggagaacgagaaggctgcctgatcagagagtctctgaagaagattctgtggctacaggcttcagcagagtgtgagggagaccccggttatttcctcagctgtttccaccaaatcctcctgtctttcgtggccaacaccccaggcaaggcttggggcccccgtctgctgctggacggtaagtcctgg

SEQ ID NO: 27928 - DNA, 2300 bp, Homo sapien
atgagaagaacaaggtgtggcacttctgctcctgcagctgccgcagcagcccctcccccctccacattgaaccccacgttggggtcactactggagtggatggaggcccttcacatttctgggcctcagccacagctgcagcaggtgcccagaggtcagaaccagagatcccagacctcccggaccagctcgtgccccaaacgaaatgccatctcgagcccctaccgctctacgggaggcctcccggaacgaaagcggagaagggggccagcctcatcccactgccagctgaccctcagttcctgaaacacagtgagtgaggacggacctcaggctgtctcttcgggtcacacccagtgtgaaaagatggcagatacagcaccagggcagacactcgcccccaggggtggctcccccagatcccaggcctctaggccctgtagatgcaagtttcccctgctgccacgcaggcgaggggagcctttgatgctgccacctcccttagagctggggtaccgggtcactgctgaagacctggaccaggagaaggaggcggctttccagcgcatcaggagtgcactgcaggttgaggacaaggccatttagtactgcagaccctcacggccttcccacactttgtcctcacttgcaacaggggcttctggtctgcctgccatttctaaagcacccagtatggatgcacagcaggagagacacaagtcccaagactgcctgggcctagtggccccccagcatctgctgcacaggcctgtagtcccagctactcaggaggctgaggcaggagaagggcataaacccgggaggcagagcttgcagtgagctgagatcgcgccactgcactccagcctgggtgacagagcgagactccgtctcaaaaaaaaagaaaaagaaaaaaagttattgtgacatttctgtatgaaatcagccttcactacatggataggaccagcaggcttccgcggcacgactctgcaatcatactacatttttttttgtattttttttattccttttgagacagagtctcactctgtcacccaggctgaagtacagccgagatctcggctcactgcaaactccacctcctgggttcaagcaattctcctgtctcagcctcccaagtagctgggactacaggcacacgtcaaaaggcctggctaatttttgtatttttagtagagatggagttttgccatattggtcaggctggtctcgaactcctgacctcaggtgatctacctgtcttagcctcccgaagtgctaggattacaggtgtatgtttatttatttatttaagatggaatcttgctctgtatttattaatttatttagttgagatggagtcttgctccatcacccaggctagggtgcagtggtgcaatctcggctcactgcaacctctgacttccagtttcaagcgattctcctgcctcagtgtcccaagtagctgggattacaggtgcctgccaccacagctggctaatttttgtatttttagtagagacagtgtttcaccgtcttggccaggctggtctcgggctcctgacctcatgaaccacctgcctcagcctcccaaagtgttgggattacaggcctaaggcaccattctcggccatatttatttaattatttagagacaaagtcttgctctgtcacccaggctggagtgcagtggcgccatctcagcttactgcagcctccgtctctgaggtttaagcgattctcatgcctcagcctcctgagtaactgggactacaggtactcaccaccatgcagggatatttttttctattgttttatagagacacggtttcaccatattggccaggctggtctcgaactcctgaccttaggtgatctgacagcctcgtcctctcaaagcactgggattacaggcatgagccgccaagcccggcctctcactacatttaagtgacgccatggctcatgcctgtaatcctagcactttgggaggccaaggcaggtggatcacctgatgtcaggagttcgaaacgagcctggccaacatggggaaaccccgtctctagtaaaaatacaaaaattagtcaggtgtggtggtacaagcctgtaggcccagctacttggaagactgaggcaggagaatcactttaagcgggaggcagaggttgcagtgagccaatctcaaaaaagaaagaaaaaaaaaaagaaaaacatatgatgctggagcatctcggcctcaatacctgcatgagcacagtcatgtccaggccagggctgctggtcgaggtccggcccca

SEQ ID NO: 27929 - DNA, 2300 bp, Homo sapien
aataagaaaacacacagctatagtccaagctacttggcaggctgaggcaggaaggtcccttgtgtccgggaattggaggctgcattgagctataatcgcaccactgcactccagcttgggtgacaaagtgagaccctgtctctaaaagaaaaaaaaatcggcctgtgagcatgggcttgattttcaaacaggacccggagggtagggacagacagtgctgtcacccttaggtgctgaacactcagaaacgggccagcggcagcccttccctcacctgcagacaccagattgggcagaacagcacgtggcacttgcagctcttgtagtgagggcagaacccagtgtcaacccttctgcctgtggaaggggctgctgaggcctgcggagaggccagggtggaggctcgtccccttgtccagcccttggcgtggtctccaccaggtccccagcccaccagtgcagggtgcccctgagcctgctgctgccacgggccctgtctctacccaggacgtccccccaccctcgcagtgtcagggaaatgatcatggtggcggtgacactccgcaggcagggctgctgagagaagctgagaagggtcacactgcaggcaggggcccgtgtgacaagcccctctcaccccgagagagctgaccaggcagctcacgagcagagccacatcccgggagtccgagaaaggtcctggctgggctcagccacctcattggccacgggcagcctttgtcgtgtgagccttgctctcctggggaggctcaggctgacggctgatgtgggcattgccgaaggtaacctgtggcccagtgtatatggccgggtctcctcaagctgcattcattcaagtaggacccagggtgcgtgcccatctccagcccagggcagctcccctgtaagctgggtgagctactgaagccaaggcgggaggcagctgacaacacccacagcccatgcggaggtggtggaaaggctggactcagcagcaacaccaaatcctggaccaggcagaaaccacccaagactgaggggctcatgccagagcggtggccacaggtaagaacccgggcccaggctgtgtggcaggaatcctccatgtcccagggcttagcatagcaaaggaagaccagccgggtcaccctggtggccatctgtccctgtcccacctgcagagtcagaacagcctctccccagtggggatcatctctctctgccaaaataacagcggtccctgccccaaccagactaccccactcagtggagttacggatgctgctccagcatcctaacactgcccagctggtgcctgcctgtgctcacccacaccccccaggccggccttccctgcagcctgggcttggccaccttggcctgattgagcactgaggcctcctgggcacccagccccatcactgcacctgctgcttccagccccaccccaccggctcaggggttcttcccagcggcgctgatcatgaagtcaacatgcacgcaagtcgtctcaggaaacttcttaatgaaagtgtcggccacggtggtgtgtaggtggctgagctcagattgcagctgctaagacaccagccacttaccaagagaaagccaggctgcttcaaacccagggcccacggcaaaaaagcatcacttccggccggggagtctggaagccacgccttgtgggaggtcacactggcatctaggccttcgcctgcattgcagaaggagagccgggtccccctcctggagaacgctgcgttccccagccccacaccggctttgccaccacacaggctgttgaggcaggaggcgggtaagacgtagctgtagacccaaagcaaccaccagccctgggaccctgcgggagaggagcacttttagaacatggaaaagtgtggtcatcccatcattagacagcacacatcctacataaataaaaagtcgtatggggaaggaggttggggagggaataaaaaattggcacagacattgatagactggtttccagtttcaaggtaacagatgcacatcatgagaccagaggaggcagagacaaggctggatttggcttttctaagcaacatgtgttcctgcgcagggctgaatggtcgctgagacagagatggaagccaggacaagggagcccaccgggcccagataggtacagagagcagaggctcctgttctgtcctcgccacccacgagggtgacactgcttgtaaatggtggctgtgctctcccagcaagaaaaaagcacaactaaatccacactgcacacagacgcagacagaaagcct

SEQ ID NO: 27930 - DNA, 2300 bp, Homo sapien
tgggccactgagacccagaagtaccaaggctggagtcagcttgcagcacagccagggtcgaggtcactccctccctgaggactctagcacggcacagcccctctgcctctctcctggtggtggcgttgaaacagcaccctctgcttcggtcctctacaggatggcagagaaggaggcagtcaataagatgtccctgcacaaccttggcacggtgtttggccccacgctgctccggccctccgagaaggagagcaagctccctgccaaccccagccagcccatcaccatgactgacagctggtccttggaggtcatgtcccaggtatgggaagacagcctccagcccatgcaaccccagcctgacagaggtggcctctgcctgccccacccccagtcctgcccatcttccgacttgcattgtatgtggtggtggctgagattcagagacagggacttgcctaggtttgcatggatgggagtgatagggggtgcctaggccacctcctggtcctgctggtgcaccttgctgggggcttaaaaccaccccaagtgttcgagtgtggtggctcatgcctgtaatcccagcactttgggaggccgaggcaggacaactgaacccaggtgtttgagaccagtctgggcaatgtagcaaaccccatctccagaaaaaatacaaagaaaaattaggcaggcattggggcacatatctgtaatcctaggtatctgggaggctgacacaggaggattgcttgagcccaggagttagaggctgcagtgatccatgatggagccactgtactccagcctgggggacagagcaaggccctgtgcatctctaaaataaataaccaccccccacccaacaagtcatgccttgtcaggaccccaccccacccccgtctcactgtaaggggttcatgacaccagcaggggtttctagcacctgaggtggacttgggatcttgggccccaaagacctcccaccagcagctgtgcgcccccttccgagccactctcctcttccccactccgcgagggcaggtcgaggtgctgctgtacttcttgcggctggaggccatccctgccctggacagcaagggacagagcatcctgttctccaccgatgtctaaaggtcccagtccatctcctggaggcggacagacggcctggaaacctctggctaatcaggccatctgtagagtgggaatcaagattttctgaggcatccttgggccacccccaggtgtcaggccatctgccaagagacagcggcccaaagcagaaggacaggtggcctgggcagatcccgcccaggtctgaaagccccaggctggcctcagactgtgggttttttatgtggccacccgagggcgccccaaaccagttcatctcggagtccaggcctggccctgggagacagggtgaaagcagtggtttttatgaacttaacttatagagtctaaaagatttctactggatcacttgtcaagaagcgccctctctggggagaagggaacgtgaccggattccctcactgttgtatcttgaataaacgctgctgcttcatcctgtgggggccgtggccctgtccctgtgtgggtggggcctcttccatttccctgacttagaaaccacagtccacttagaacagggtttgagaggcttggtcagcactgggtagcgttttgactccattcttggctttcttctttttcttcccagaaggatttttgtgcagaaatgggtcttttgttgccgtgttagtcctccttggaaggcagctcagaaggcccgtgaaatgtcgggggacaggacccccagggagggaatcccaggatacgcactttagggttcgttctccagggagagcgacctcgtcccccgatcctgaccgcccttccggcccacgctctcctgtttggcttccacaggcctggacttctctggcttctctgcccacacactccctgcccccagtgtccctgcccctgccccagcacaggtgacttcatttctgtcctctcagctcagtggactcgctcaacttttgtataagtctccacttggtggcagcagcttgctgatgacttgttttaaaactttcatcctaaataaccttttgatacttgaatatttgtaagttttatacatagtttctaattttttccccaacagatccagatacctaataagatgctggaatgtaatccctggacaatccgtgtcctggcagcatttggtcttcctctaagcgcctggctccgctgttctcaggagtgggttctgaagtctctggaga

SEQ ID NO: 27931 - DNA, 2300 bp, Homo sapien
acctcgacctgccctcgcggagtggggaagaggagagtggctcggaagggggcgcacagctgctggtgggaggtctttggggcccaagatcccaagtccacctcaggtgctagaaacccctgctggtgtcatgaaccccttacagtgagacgggggtggggtggggtcctgacaaggcatgacttgttgggtggggggtggttatttattttagagatgcacagggccttgctctgtcccccaggctggagtacagtggctccatcatggatcactgcagcctctaactcctgggctcaagcaatcctcctgtgtcagcctcccagatacctaggattacagatatgtgccccaatgcctgcctaatttttctttgtattttttctggagatggggtttgctacattgcccagactggtctcaaacacctgggttcagttgtcctgcctcggcctcccaaagtgctgggattacaggcatgagccaccacactcgaacacttggggtggttttaagcccccagcaaggtgcaccagcaggaccaggaggtggcctaggcaccccctatcactcccatccatgcaaacctaggcaagtccctgtctctgaatctcagccaccaccacatacaatgcaagtcggaagatgggcaggactgggggtggggcaggcagaggccacctctgtcaggctggggttgcatgggctggaggctgtcttcccatacctgggacatgacctccaaggaccagctgtcagtcatggtgatgggctggctggggttggcagggagcttgctctccttctcggagggccggagcagcgtggggccaaacaccgtgccaaggttgtgcagggacatcttattgactgcctccttctctgccatcctgtagaggaccgaagcagagggtgctgtttcaacgccaccaccaggagagaggcagaggggctgtgccgtgctagagtcctcagggagggagtgacctcgaccctggctgtgctgcaagctgactccagccttggtacttctgggtctcagtggcccaggacaaggggccagctctgggctgatggggaggtcttcctgatgtgcttgggagggaagggggggcggtccaaatgcactgctggccacggccaaagctctgagctctttgttaaggccacagtgcagagggaggagggtggcaaagaggagaggcaggggcgggggtggcagtggtgctagtccttagaagcagtgagttactgcagacaggggtcgggggaaaaggtccttggtgctgggggtctggtgggagcagaggggcaccccacggcctggagacctggagtcctgggcagccacaagagagctgggctacctttccaggtggtctagaaggaaaaggaaggtgagcaggttggcctccggcagggacgacagcaggttgagcatgcagctcttctttgcaactgggtctgaaagagctgcaggaggcagtgggtcactcccctgggttacgacaagccggagacctctcccgaggtggtcacatggagcgccagggacacgagtccttgcgcagtttaggcttgtcatcatcgtcacacccacagcgctggccgccagtgaggaccctgtgaggggcacctgtgtggggtgtgaaccacctgaacgccttttctctacctcgcaggggtcagcagcacccggcgaacagcagcaggaggagccgctagagcagctgctcatgggcagagctgccctcgggcaactcctgccaccaccccctccccagggagcccaaggcaggggaggctcagcatggaatgaaacaggggagtgagggacacaaggaggtgggaagtgggagggtcccagccccaccaagtacgcagagaccccctcgacatcctggacaccacaggggcacctgcaggctgggagaccaggtcctctgtgcatgggcccgggaggcagacctgccctaagggtgatgcacaggctacaggtgctgcacgctccagcgcccactctagacatcagcctccaggttgactaagggtcaggtcatgtttgaaaccatgcttggctggaccaggacccatggcaagagcacctgggcaccagtgtttagccctggtctgcaggaaggaggacagcagactttaggaccccacagcacggcagtgctgaccatttcacccacttggcctccttgagaaatatggatggggagccctctggggatgggcaaggccttccaggataggctcagttttggtcccctgctttttgaggttgggttaaaatt

SEQ ID NO: 27932 - DNA, 2300 bp, Homo sapien
gacctgcctcaaatgccaggggagggcactgagaccccagagggtccttcccagcatcttcaaagcaacaggattttgtgcctgcagacccttctttgcagcacacaccacccaccctgaccaggacccttagaatgcccagcatccctgggagggccctgtggtagtttcagctccctctgagggcccagaatgaacctggcctgtggtgaggatgtaagcaccaatggccaattgggtccaaaggaagacaccggttcaaacactgaaaccaatcagattctcccacggccttcctgctatcagaagacactggtgcaggggtggttgctatgtacagggcagagccacccaatccccacgcaggcgctgtgtcctgccatgctggcctcctcctggccatcacatcaggccaagcaggggagaggaatgggaatgcccacgcacccctatcaactctgcagacacagaaccatgcacagctcttgggaggagtcagatgagctgctcaaagcccaggagggacccacacagtggtcagcatggcagggacggtgctttagccaaggcagggatggtgggtgactcactcaggatcttcaaggaggccgctgcatttccgtgctctttccagataacaaggacgtgtcagtgatgatgagcgagatggacgtgaacgccatcgcaggcatgctgaagctgtacttccgtgagctgcccgagcccctcttcactgacgagttctaccccaacttcgcagagggcatcggtgagcactggaggccttggcctcatgggagacgtctcctccacgtgcactgctgccctcagaggctgtgaaaagtgaggtgtgggaacccgagctgtgcttcctctgccatggtcggaattttaacccaacctcaaaaagcaggggaccaaaactgagcctatcctggaaggccttgcccatccccagagggctccccatccatatttctcaaggaggccaagtgggtgaaatggtcagcactgccgtgctgtggggtcctaaagtctgctgtcctccttcctgcagaccagggctaaacactggtgcccaggtgctcttgccatgggtcctggtccagccaagcatggtttcaaacatgacctgacccttagtcaacctggaggctgatgtctagagtgggcgctggagcgtgcagcacctgtagcctgtgcatcacccttagggcaggtctgcctcccgggcccatgcacagaggacctggtctcccagcctgcaggtgcccctgtggtgtccaggatgtcgagggggtctctgcgtacttggtggggctgggaccctcccacttcccacctccttgtgtccctcactcccctgtttcattccatgctgagcctcccctgccttgggctccctggggagggggtggtggcaggagttgcccgagggcagctctgcccatgagcagctgctctagcggctcctcctgctgctgttcgccgggtgctgctgacccctgcgaggtagagaaaaggcgttcaggtggttcacaccccacacaggtgcccctcacagggtcctcactggcggccagcgctgtgggtgtgacgatgatgacaagcctaaactgcgcaaggactcgtgtccctggcgctccatgtgaccacctcgggagaggtctccggcttgtcgtaacccaggggagtgacccactgcctcctgcagctctttcagacccagttgcaaagaagagctgcatgctcaacctgctgtcgtccctgccggaggccaacctgctcaccttccttttccttctagaccacctggaaaggtagcccagctctcttgtggctgcccaggactccaggtctccaggccgtggggtgcccctctgctcccaccagacccccagcaccaaggaccttttcccccgacccctgtctgcagtaactcactgcttctaaggactagcaccactgccacccccgcccctgcctctcctctttgccaccctcctccctctgcactgtggccttaacaaagagctcagagctttggccgtggccagcagtgcatttggaccgcccccccttccctcccaagcacatcaggaagacctccccatcagcccagagctggccccttgtcctgggccactgagacccagaagtaccaaggctggagtcagcttgcagcacagccagggtcgaggtcactccctccctgaggactctagcacggcacagcccctctgcctctctcctggtggtggcgttgaaacagcaccctctgcttcggtcctctacaggat

SEQ ID NO: 27933 - DNA, 2300 bp, Homo sapien
accactgtgtgggtccctcctgggctttgagcagctcatctgactcctcccaagagctgtgcatggttctgtgtctgcagagttgataggggtgcgtgggcattcccattcctctcccctgcttggcctgatgtgatggccaggaggaggccagcatggcaggacacagcgcctgcgtggggattgggtggctctgccctgtacatagcaaccacccctgcaccagtgtcttctgatagcaggaaggccgtgggagaatctgattggtttcagtgtttgaaccggtgtcttcctttggacccaattggccattggtgcttacatcctcaccacaggccaggttcattctgggccctcagagggagctgaaactaccacagggccctcccagggatgctgggcattctaagggtcctggtcagggtgggtggtgtgtgctgcaaagaagggtctgcaggcacaaaatcctgttgctttgaagatgctgggaaggaccctctggggtctcagtgccctcccctggcatttgaggcaggtccgggtccttcaaagcctgtgagggttggtgagatggaggcggagaggctgcagccccggcctgcgctgaatttcatcagtgccctctgcccaccacatcctcatacagggcagtggacagaccgcactgagtcctgggcttccacctcctgtccaaccccaaggcaggaaggccaaggccccgcagaagcccctggtccactgcaccaagtggcacgagtgggtacgatggtgtaaaaactggcttctatagaagctgtttgtacaactcttgttttctcttttttaaaaataataaaacagtaaatgaagaaaagacacagagaaggatgtgacatgcctgggccatggagcactctgagatctcatcggggacaccactgcccacacctccatcccgtcctgcgcaggccgacactcactgacgttgaagcctgccttcagtgcctggatgtctgcggccaccccagacatgcggtagatgcccacctcctccatgcctcggcgctcgatctcctccatgcactggcgcacgatgtagggcaccttggacctctctctcctgcgggaggagggaatgttctcagtgtcctaacagccctgcttgggccataacacaggagacctgctccctatctgcgcacccggaggtggggtgaggacggtgacgaaggtacccaggtctggggctgcacacagagccttctgcatgcctgtcctccctctgcaagctctgtcctcattgcatgtactttctcaggaacctttcaagcggccagaacccctgcgaatcacacatgacctttgcgggaaggtcaggaggcctgtctaagtcaagtcagcacgggaagggcatctgacagattccaggcctggggttagcagcctgtgcccccggctgggaggtcagacccggtgttggtcctgccacccacgtgctgtgtgagaggagaaaccctgacccctgccctgggccttaacacacatccgacgaatgaatgaagggttgcctcagcaccggtgctccaagtcctgcgatgctaagtgcttttctcctctgagtcttagcaatggacaattccaatacctccacacaggacactagagtaagaatccttcacagttagaacgcagtgctgtgcggaggccttaacttgagttctgttttgcacctggatttaccagcacatcaaagctgcttcgcaagccccctcatcagcagggcttatgtgggggagctgctgatggagtcctcgctgctcatgcccacagccctcccagagtgctatgcgagtggctgccgtgcagttgggggtggggcgtgtgtttagacacagataggagtccagggtatgactgatggaggccccggcccacgtgaccagcaaggtcagaggcccagccagattccatcctggggaagcaaatgaattctcagaggaagtggtctgtgtctgcatgaactgctctcaaaccaacaaataggcttctcttggcaactgactcgtgacaaagggttcaagattgtttgaaaaaaaaaaaaggggggggggaacagggaggcagtaggtcctggaaaagtaaattctttattttacaataagaaagtgattacatattttattttttttacaatggtggaaaattagaagtgattgtgaaaatgatgtctacccgccttgctgatgagtaggatgtgatttggctctttaggaaactgaatttgcagaacttaagaatattgatttataaagggcatggcc

SEQ ID NO: 27934 - DNA, 2300 bp, Homo sapien
gtttttagttttattgatgtgatgtatcacatttattgacttgcgtatgttaaaccatccctgcatccctagtatgaaacccacttgaatcatggtggattatctttttgatatgctgttggattcagttagcttggttgtagcatttcttattattccatctgtggaatgtattggttgaaataatgaaaacatgttctatcctcactgcttagcactttgtgtttctttaatagccttcccaacagggcaacataaaagcaggagccctgctagtctccccttaacccggaatccccccttctccacagctcgctcattggacaggatagactgggcgcccaggcttcaaggtaaggacgtgctctgtcacctagaggtgcagtgcttgggaaggccaaccttggagggttgcctgccagctttacagtgacagaggtgttgagagggactgaccaccagtgcataaggctgtgctttgttggtgacataaaggattgtttcacagattgttggggagggacaatcccaaggcctcccctggccctggtgctggctctgcacaaaggcaataagagagggatgctggtaagggctgacctgttgctgtgctggggaggaaggtgctgggctgaaattcaggaggctgaggatgcagcagtcccataggaggtacatgaccttcaggatacattttcttcattgatgatcaatggaaatgagaaatcactgactattttttctatcattggaatctactctccactgctcatgctgttcctgtcttttggggaagatggaggatcaatcagtgtgcactgcactgagtggaaggaaggagaactgtgacaaaaattaaggaaggatgagagacgggagggcccttcatccagctgcttgcagagtcctcctgaggaggaaagccccgtggctccctggagaaggagcattgagggctgcgtgactcccacagtgaagtgtgtggtatgtctgaggacacccaggctggtggtccatgaggagccagtggcagagtgagaagcagaaaggccaggagggtggctggaggccaggctctgagtcattctccatgtgatggaaacagccggagcccagtgggcttggaggtacaggatgcggtggctgatgacagaacaatgtggagagaggcgtcatttgtcaaatccttactttgttctgggcattgtgctaaaaattctgatggctcatcccatttaggggctgaaagttgcagaggtttaggaagctcacccacgatactggagcccccatctcctgccctagtgctgtccaccttctcacccagccaccacctgtttcgggggaacacacagaagtggtaacctcttatggagaggcaagtaaattctgctgtttttgttattcacagaaaaacactggctcgtgtgggttgggaaggtgaaataccagaagtatttcatctggttatttctacccatgcgactcctatagtattgaaatgcataggttagcatttttggccaatttactcagcattctgggttaaaggcttttacttattttatttatttatttatttatttatttttgagatggagtttcactcttgttgcccaagctggagtgcaatggtgcgatcctggttcattgcaacctccgcctcccaggttcaaactattctcctgtctcagcctcccaagtagctgagattataggcacatgccaccacactgggctaatttttttgtatttttagtagaaatgagatttcaccatgttggtcaggctggtttcgaactcctgacctcaggtgatctgccctcctcggcctcttaaagtgctgggattacaggcgtgagccaccacgcctgccctaaagtcttttaaaattcacttgtataagttgacttagttttctttaaccttgtagaaaaatacaaaaatggcaatctcttttatcacacaaataatgtctttttaatggagtgatttttttctaattgaggtattatgtacttttcatttactaattattgtttacatttgaagtgttttatgaattaatatttaattgcatagatgaagattactagttataggcattttactaaccaatactcattaagcatagcgtggattcctatgacatcaaggagctattttatttggtaaaacgaaaaagcacaagaatgaacgaacgcaagaactgaaacagtggagacacctagaatgacttgtctaagatctaaatcattttgttgtcttcccagcgtacttattatcctgatcattgtcat

SEQ ID NO: 27935 - DNA, 2300 bp, Homo sapien
atatgatatagattatatacaatataaatgatatagattatatagtatatatgatatacacgatatatcatatatgatatacacggtatatcatatatatgatatatacggtatatcgtatatatgacatatacggtatatcgtatatatgatatagatgatatatcgtatatatgatatagatgatatatcatagctgatatagatgataaatcatatatgatatagatgataaatcatatatggtatagatgatatatatcatatatgatatagatgatatatatcatatatgatatatcatatattatataataaatgatatatattatatataataaaagatatatattacataataaatgatatatattatgtaaaatatatgatatatattatatattatatctgatatatattatatattgtatattatatattttatctgatatatattatatattatatctgatatattatatattatatattatattatatataattatattatattatatattatatataatttatgatatatattatgtattatatataatttatgatatatattatatattatatatcatatatcatatatattatggtatattatatataattacattaaatatattatatataatataccataatatatcatgtattatataatatataatataatataatataatcatatataatatataatatattatattataaaatatattatactatgatatactatatattacatattacattatacaatattttatataatatataatatatattatatattatactttattatattacatatataattatacattattacatttcatatataattatataattatatataatattatatataatattatatattatatttaatataatattatataattatattaaatataatattatatataaggatgcaggatgtaaaaggaaattatatatatgttatatattatatatatataattatatgtaattatatatatatatttgggggtgccctatttcctatctcataacttattttaagaagcacagcataataatttgtggacttgggattcagtttttgaaacgaaacactgagccttcgatgaccttcctgtacctgtgaaagcacacctgtctgcatggcagcagttggacctcacagtgtggattgtgccttcaccctggaatgtttatgccctatcgccatggtgatgggattagggatctgctgcccttggtcctaagtgccactatctgtgctgagtttttcaaaggtcagagcagattgaacctttgtggtttcattttccctgattttgatttttcttatggggaacctgtgtggctgcattcaaggtatgttcatactggcctgtcaaatgcgatcttttcaaattagtagttaatgctttcaaaatatgttatttaaaaaattagcctctgtattttccatatgcagttataaatatgtttcaagattatgttttattcctcaatttatatatttgattattgtaccaagcagagtatctttgaaatttttcttcatttaaaaaatatgtatcttgactcaggcctgtaatcccagcactttgggaggccaaggcaagaggatcacaaggtgaggagatcaagaccatcctggccaatacagtgaaaccctgtctctactacaaatacaaaaaattagccaggcatggtggcagctggtgtagtcccagtgtgaattgggattcagtttattcccaaattcccaaattatatatatataaaatatatatataatatattaaatatattatatatataatatatattatattatatataattttatgtatatatatatttgtgggttccctatttcccatctcataacttattttaagaagccagcataataatgtgtaggcttgggattcagtttttgaaacaaaacactgagcctttgatgaccttcctgtacttgtaaaagcccacctgtctgcatggcagcagttggacctcacagtgtggattgtgccttcaccctggaatgtttatgccctatcaccatggtgatgggattagggatctcctgcccttggtcctaagtgccactatctgtgctgagtttttcaaaggtcagagcagattgaaccattgtggtttcattttccctgattttgatttttcttatggggaacctgtgtggctgcattcaaggtatgttcatactggcctgtcaaatgcgatcttttcaaattactagttaatgctttcaa

SEQ ID NO: 27936 - DNA, 2300 bp, Homo sapien
atcctggttaacatggtgaaaccccatctctactgaaaaatacaaaaaaaattagccaggcgtggtggcgggcacctgtagtcccagctacttgagaggctgaggcaggagaatggcgtgaactcaggaggcggagcttgcagtgagcagagattgcgccactgcattccagcctgggcgacagagcgagactccatctcaaaaaaaaaaaaaaaaaaaaagaacatctggagccataattcccgatgttcttgttacttgacactgcctaaaggcatgttctgtgggttccggggaaactgatttgaaaaacttgagtgttgtaaaggagggccataagctgagtgaacacagcagttgtgagaggtcccaggtgcttcctggggacagggagacacgacagaccaagaagcaaaggggcctctgatgtgacttcaatatcaaggtcttgtcgggcacagtggctcatgcctgtaatcgcagcactttaagaggccgaggcgggtggatcacttgaggtcagaagttcaagaccatcctggccaacatactgaaaccctgtctctactaaaaagtacaaaaaattagctgggcatggtggctcaagcctgtaatcccagctacttgggaggctgaggcaggagaatctcttgaacgtggaaggtagaggttgcaatgagccaagattgcgccactgcactccagcctggcgacagagtgaggccccatctcaaaaaacaaaatcaatgtctcaatgcagactgccaggtatcaggtgtccatccatgtctccaaaaagccacttggcaccaggagcagacaggaagggcaaagaggagccagactgaagcagggcttcttagctcccaagccacacaggtggccaccagtcagagaggcagtgtgtgtgtgtgtgtgtgtgtgtgtgtgtgtgtgtgtatttcttcagttcagtgtgtgtatgtatgtttcttctgcagctcagtgtatgtgtgtattccttcagctcagtatgtgtgtgtgtgtatgtttcttctgcagctgtgtgtgtgtgtgtgtgtgtgtttcttctgcagctcaggatgcctccaacatttctgctgaagcctcaccctcactcctggcccatcctgaggcctctacctaagatgccaatgagtagcccagacactggggctccagtgtttgtcaccaggtggtacctggatgtgggaggtagacaggccagatggccagtttgggcagtgcccccatgcctatctggccctgggtccctatgccaccttgctggggagggtcttttcgcttacacctcctctgagccgactctgcgcagtaacacaaatgtgtatcaggcacatcctttcctcaaaaggtggatgaccagttgggtgatcagggctgttagggggctgaagggtcctggggagtccaggtctagccaagttgaggcctatcctgctgcattttccagccacctgacccaaatacaccacctgaacccacgaccaggtatgcccacaccccatgggtggccttaacacacacaccctgcccctttctccaagtacaggagcagcagcccagacttccctcggggcaccgcggcctgcttgggactgcacagtgcctgggagggtgcctggggagggtcacaagggacttggtgctagtagcaggaaaagtgtagggaccggaaaagcccccgtgcatcctggaagggacatgggccagtttgagcaggggtgtgggagtccagccctggccttgccaggtggagaggcgcctgggccagacatccgcggcaggaggcgggggaacatgccaagaggcggaaggggcacgcggagacccccagggggcgccggaaggggcgcgccgggcggtcggcggcggccgttggcgagctgaggcctgccaggcgaagtctggagaccagccgggccgcggccgcaatggccaaggactcgcccagccccttgggcgcgtcgcccaagaagccgggctgctccagcccggcggcggcagtgctggagaaccagaggcgggagctggagaagctacgggcggagctggaggcggagcgggcaggctggcgggcggaacggcggcgcttcgctgcccgggagcgccagctgcgtgaggaggccgagcgggagcggcggcagctggctgaccgtctgcgctccaagtgggaggcacagcgcagccgggagttgcggcagctgcaagaggagatgcagcgggaacgcgaggccgagatccggcagctgctgcgctggaaggaggccgagcagcgg

SEQ ID NO: 27937 - DNA, 2300 bp, Homo sapien
ttttggggccaggtgcgttggcttatgcctgtaatcccagcactttggaaggcaggaggatcacttgatcccaggagtttgaggctacactccagcctgggcaacagagtgagactccgagtctccaaaaaacaaaaaaagacaaaagaaccccaaaaaaacaacttttggctcataccgccaaactcatgtccaggaattttgaggtgatttatgtgcttccaaaagtatatgagagtgattacctatcagaccttgtgtttgaaggttatcacttgaaactgatttttaatttgtttaggagaaaacccagcttcttatagttttattttatttatttatttatttttttgagacggagtctcgctgtcgcccaggttggagtgcagtggcacgatctcggctcactgcaggctccgccccccggggttcacgccattctcctgcctcagcctcccgagtagctgggactacaagcgcccgccacctcgcctggctaattttttgtatttttagtacagacggggtgtcaccgtgttagccaggatggtctcgatctcctgacctcgtgatccgcccgccttggcctcccaaagtgctgggattacaggcgtgagccaccgcgcccggcctatagttttaatttatatgtcttgggttagtagaatggttgactttttttttcagtcgttccttcaaatagtgagtcctctgctaggctctatttgtggaatattcttgttcttcttcagggatgtttgatagctcttttttttccacagatgtttgatatttcctttttcatctattgtgttcttaccatttctaggatgtttctaggctttctattctatttcctgttctgtaccacactgaaatgcctgcggtagctttacaatttgttttgatatctgttagggcaagtctaccctcatgcctgcttttgttcccaaggggggaaaaccatagctgttttcggctatttatttttccaggtgaacttagaattttgtgaagtctaagaaatgttgttaggatgacattaaacctatacatccattaggaaagaaaggttgcatcatcagcttggcgaagggttattgaaactggtttttgatcttgactggagctggggcacaacttccctgtaaggcagacctgggctcctcttggacttgggcgacctcgatagtggtgtgttcctttgtttggtgttcaaagtagagagcggtccattaactagctccctagagaagcagtggcggctcaggccagcccagcccctgggaaggctatctgcatggcggccgggagcccgggtcctggtgggccggctcgggcaggcgcttgacccctggggcctgcgaggggctgcggccaccggaaggggctggctgagcgcagcgtgctgggtcctccgcgccctcggagcaggtagggttcgcgggggtgcgcccgcgggggcccgaggggcgctggggtcacgggaggggcgccccttctcttttgcacccaaccagcccgggcttccccaggagcccagacccccgagcttgcagtcactgctggctgcgcctttgagcctcgggcaaccgcagggagcgtcgagcaggggtcgcaaaggggtcggggagggggcgcgtaggccgatagaggtccctaattcggggctcctaggggtcagggtagggctaaaagggggtaagtccaccagagtttgagggggtgggcgtcagcctgtcggggggggccagggtccctgtcccgggggccggtatgcggtccgggtatttcaggggcgaggtcgcggtcctgccctggcgcttgaggtcggagtccggttagatgtccggggtctgggtccccggctcctcccgcgcacccctcccccacggcgccggaccccggcagcccgccccgcctagtgctgggaccgctgtccggcccggccccgcccccgcaggccccgcccctgttcacaggccacgcccccagctgccccctgtccccgccccgccgctcgcccattcagatgtgggtcaggggtgagcgggcggcgccgacgtcacaagcttccaagatggcgctgggcgggcggctgtgagcggcgctcggggcgcgctaggcggggagccgagccgggctggcggcaggcggacggggcgggcgcgtgcggcgcgagccgggcgctgaggacaagggccgctggtagggccggccggccggcgggcggagcgccgccgccgacgcacacgaggtgaggggcggccttgtggggcggggggcgcggggagcgggcg

SEQ ID NO: 27938 - DNA, 2300 bp, Homo sapien
agcacatctggaaagctgtgttccccgaccccccactcccccaacagcaggaggggtgtaacccagggaagccacccctctgacatatgtgctggggggaggggcagagccttgcccctaggaatcctgtggcggtgggttgttgactgatgtgggattgctgtgtctcttgtgctgtcggagagctggcaggtagtggaggggccttgggagctcctaggctgaacttggggctgtcctccaaggatccaggatggagggatggagctgggtcactcaaacctaaggcctttctgggtctagcatttattgcttcctggcttctggcttggcttcttttcgtccattctcatctgccagtgtctggactccctgggccttcaggcaggcattttcaggagcacaggccatgtggttggtctggagccctgtgtcaaggagagtgtgcgtgcttggtggagcagggttgctggagtagtgtgaaaaaaagcagatgagctggcctctggagacaaagctgtgtggcaagactgctggtttagtgggctctgaacaccaagaacagggccgggagtctgatacttgggggctgaactgagtcctgtggcgcaggattgttgcctggaagtgaacgttccgtcttgtgccattgagactgtgaagatctctgggtcccacaggacgagcagtagacttggaaggctgggaagaggctccccagctgcctgccttgggaggtcagagctctcaggtgggtcggcaggccagtgtcgggctgggggagggaggttgtagtagagtgcctgtggcccagcttctctggtcagttggctctgagtgctgctgtgtgcccagcaacctctccctgcggtgtttttctgccagttgttggaacttgtagattagtcactgagtttttacgaccgattcctgaaaagaaaaatctccctctggttgctgcctctgtgtagaggaagaagcagcccgagggagtcaggcctttaattaaagcaaaaccgaaatgattgtcgaagttgctggaaggagaagagaaggcgcaggtggggcaggggtgatgagtcctgttgtgctgcatgatacctgctctggggacaggtaggcacgatcccatcctcgatccttggtcttggccagcagcccagccttctccacaagctgcagtcgcagattaatcctcacgtagtgttttctttccgtagatcagatttctcattttgttaataagcgcagcctcccatccacttgaagtcagctgttgtggacgaggagcaacagggttttgcattattgagctgatagcctgccgcctcccctcaagtccttattgtttgcggggtcagatctgaggggtggggaagtgccatttaatcagcagccagcccctggagaagagctggcggggcagttctggagagtgagagccgtgaggaaggaataaagttcagtttacccaggggacttgtggttccaaccttattgcttggtctgttggcctggagcagtcagccccaccccataccttgtcctgcccgctgcccccagtacctgatccctgggagagtggggcacttcttctgggctgctcttgctggcctgggaggcagctttcaccgcgggaagaaagaacacattgggttcctcccttcttgtctcctccgagcctggcctaggacggacccctgtggggcagtgagaggggaactggacttggtcggtcgcaaagtctgtagtgcattgctggctctgccatttactcccgtcatgaccttgagcagtgattgactctcctgccgggtttctacaatgggaacagaactggagtttacattcatgtatcgctgttttctggagctcagcctagggaaggcagacactcaacaaatgattataagatggggtgataagggctggcatctagcggagcgcagagggcatagcggtggcgtgggaggagccggccgtgggctggctgagaaccctggatgccatgtgggttggggttggcctggaggggaggggttttaaccaggaagtgactgctactgggttttaaaaggcagtggtagggtagagggtggcagtggagacagctggagagcactgaggacgcggacccacgggtactgtgtgagctgtgaagcccgcttgggagaccccactgccagccaggcatgtatgtggctctttttcaagctttttattcattccgccacattttctgagcgcaaagtcagtgcctggcccccttggtttagaccaagtcatgttggcccctgctt

SEQ ID NO: 27939 - DNA, 2300 bp, Homo sapien
cctgtaatcccagcactttgggaggctgaggctgcaggatggcttgaagccaggagttcgaggttgcagtgagctatgattgtaccaccgcacttcagcttgggtgacagagcaggaccctgtctcagaaaaaaccccacaaaacagtaatagagaagccacataagcagatgctcgttaggagccctgactatttaagaatgtaaacaacacaattttagaaccagtggcaaggagggtactggacatttccatcttccccacgtgcctccttatctttcacatgttgtttcactctgtctcttctcagcattgggtctgaccagcatttgctcacctaatgaatgtttatgagtgcctgctgcatgcctgctgctgtggctgcttgggacacagggtctaactttgggtactggtctatggggtggtgggggtaggcaggagggaagcagcttggcagctggtgctgacgttggaagcggggggacaacagaggcagttctggcttcacagaggagggagtcgtgagggggcaggctcctcccagagtagggcacggcctgcaggagctctcaggtgtgtctgtggaagggatgaggtgggcttgatgcccctgtgggaagtgctttgcatgccaggcctgagcatggactttatgctaggcatcaggaatttattgaaagctttatttatttttttaattttttttttttgtattttgagatagagtttcactcttgttgcccaggctggagtgcaatggcgcgatcttggctcactgcaacttcctcctcccgggttcaagtgattctcctgcctcagcctcctgagtagctgggattacaggcatgcgccaccatgcccagctaattttgtatttttaatagagatggggtttctccatgttggtcaggctggtctcaaactccagacatcagatgatctgcccgcctgggcctcccaaagtgctgggattaaaggtgtgagccaccatgcccggcccattgaaagctttaagcaggggagtggcttgatgagatgggtgttgagaaagataactcagggttattggactctgaattggagggtacagggactaggcgagggttggctggaggggttgcaggggggtgattgtgttctaaacgctgatattttcacttagagtggctctgattctgcccttctttctcctgtagaccttgggaggttgcctgggatttctccctcctggacaacttctgttgagtgaagcatacctgctaccccaggtgtggaggccccaggttcttttgctttgtatgattaggacagggtgatattttctgggttatctcttgtgggaactgagccctccaaagccctcatttgtgcattgttgtcatagctgcccaagtgtgtggccttgctgagtttgacggctgtggaccaggtgatctctcgggtggtgaaagggaggtgctctgtgagtgcacctcagctttagcctcttggcttctccctggattgggatttccagggaggtctctttcctctttcttttttctctttcttttctctctttctctctctctgtttttttgtttgtttgtttgtttgttttttaaatgagacagggtcttgccgtgttgcccaggctggtcttgaactcctgggctcaagcgatcctcctgcctcaatctcccaaagtgctcagattaaaggcatgaaccaccacacccgactttcctttcttttgagacttctgcacagagcaggctcagcttccttagtagacttagccattgaactctaagaagttatttacaaaggtgtaaataggccgggcatggtggctcacgcctgtaatcccagcactttgggaggccgaggcaggcggatcacttgaggtcaggagtttgagaccagcctggccaagatggtgaaaccctgtctctaccacaaaaattagctgggtgtggtgatgggtgcctgtaatccccagctactcgggaggctgaggcaggacagtcgcttgaacccgggcagcagaggtcgcagtgagccgagattgtgtcactgcactccagcctgggcgacagaggaagactcaaaaaaaaaaaaaaaaaaacaaaggtaaattacatgtatatatgtgtgtgcacaaatcttaaagaatagagagataagtagtggtaaacctactattggttgaatcgtgggtgtcccactaagcgtgacaccgttgttccctcatggccacataagaaatagcctcccaagttcctgggacacctcatgcacttctccctggcttattc

SEQ ID NO: 27940 - DNA, 2300 bp, Homo sapien
cccaaagtgctcagattaaaggcatgaaccaccacacccgactttcctttcttttgagacttctgcacagagcaggctcagcttccttagtagacttagccattgaactctaagaagttatttacaaaggtgtaaataggccgggcatggtggctcacgcctgtaatcccagcactttgggaggccgaggcaggcggatcacttgaggtcaggagtttgagaccagcctggccaagatggtgaaaccctgtctctaccacaaaaattagctgggtgtggtgatgggtgcctgtaatccccagctactcgggaggctgaggcaggacagtcgcttgaacccgggcagcagaggtcgcagtgagccgagattgtgtcactgcactccagcctgggcgacagaggaagactcaaaaaaaaaaaaaaaaaaacaaaggtaaattacatgtatatatgtgtgtgcacaaatcttaaagaatagagagataagtagtggtaaacctactattggttgaatcgtgggtgtcccactaagcgtgacaccgttgttccctcatggccacataagaaatagcctcccaagttcctgggacacctcatgcacttctccctggcttattcccacttccctctagaagccaacagtcttctgaattgcgggtcagccattcgctggcttttgtcggtttcccacctttgtctggatcctgaaactgcgaatgattttggctcagttcgctgggagccgggtgtcctgcactcttgggacaccaggagcagcagttcctgtgttcccattctccatttcagtgtccaaggtggcgccatccacacataatcacctgtcctgctggcagtgagcatttgggtgggtttctgggttttgtttttgctgccttctaagtagctgacttttcacccccaagctatgcttcttgaggcagagaagtgccagtttattttgttttctgtctctaaatccagttccttaatgcaccactgagactcagtttagaagtacagtgaaactttgtgagcatttttctccctgagtttgaatggatccctctctcattctttgagttcttgggcacttgtctcttagacactttcaagttacctactggacaggagagacctcttctctataaagtatcacacttggaggcttttcaggcacaggaccatagattgtaatattttccatagcagttgcccaattttatctgtaaaaattgctttttaaggcctggcacagtggctcacacctgtaatcccaacattttggaaggctgaggcaggaggatcacttgagcccaggagtttgaggccagtctggaaaacatagtgagacctcatctctacaaaaaattttaaaaattggttgggcatcgtggcatgcacctttagttccagctactcaaaaggctgagacgggaggatcccttgagcccagaaattagagctatgatcgcgccactgcactccagcctgggccacagagcaagaccctgtctccaaacaatcacaaaacttccaatggatgccgaacgtataacttttttttttttttttctttcttggagtaaaataacttgatccttgatctttggctgtagctcctgagccatttgaggcactggggggtttgtgtgttgattacctatgaaggagcaagtgggctgtttccttctcccagcggcttcctttgaccccaaatccctgagagtctcgcccattttcttcttggcttcctccctttgatatgcccagccggctcctgccctacctggctgccaccaggacctgctggaggcggttgctgggaattatttggtgtcctgtttgaacctcgcttgccgtgctcccagatttcctgtttctcctgggcttgcctttcaggatttgcagaaccccttctcctttagaagtgtcaactggggctgggtgtggtggctcacgcctataatcccagcacttttgggaggccgaggcgggcggatcacctgaggtcgggagttccaggccagcctgaccaacatggagaaaccccgtctctactaaaaatacaaaattagccaggtatggtggtgcacacttggaatcccagctactcgggaggctgaggcaggacagtcgcttgaacccgggaggcggaggttgcggtgagccgagattgcaccatggcactctagcctgggcaacaagaggaaaactctgtctcaaaaaaaaaaaaaaaaaaaagtcaattggaccttaggacaacttaaaaacattatcaggtttttatcttttagatagca

SEQ ID NO: 27941 - DNA, 2300 bp, Homo sapien
ggctggagtgcggtggcacgatctcggctcactgcaacctccgcctcctggttttatgcgattctcctgcctcagcctcctgagtagctgggattataggccaccatgcccagctaattttttgtatttttagtagaggtggggttttaccatgttggccaggctggtctcaaactccagacctcaggtgatccacccaccttggcctcccaaagtgctgggattacaggtgtgaaccactgtgcttggcctttactactacattttttttttttttgagatggagcctccctctgtcaccaggctggagtgcagtggtgcaatctcggctcactgtaacctctgcctctcgggttcgattcccctgcctcagcctcccgagtaggtgggactacaggcaagcaccaccatacccggctaacttttttttttgtatttttagtaaagacaagatttcaccatcttggccaagctggtcttgaactcctgatctcatgatccaccctcctcggcctcccaaagtgctgggattacaggcgtgagccaccgtgcccggccgtctactacttcttaaagggtgagaggcgggaggatcacttgagccctgaagtgtgcggctgcagttagctttgatcgtaccactgcactccagccagggtgacagcaggaccctgactctaaaaaaaaaaaaaaaagcaaaaaaaagcatatactattaatacttcctccttactataatgtttactgtggcctttatcagactagagagtgcttttatctctcccttttgttagagcttttagaattatcaatagatggtcaggtgaggtggctcaggcctgtaatcccagcactttgggaggccgaggtgggtggatcacgaggtcaggagttgaagaccagcttggccaagatggtgaaaccctgtctctactaaaaatacaaaaaaattagctgggcgtggtggcgagtgcctgtaatgccagctactctggaggctggggcagagaattgcttgaacccagtaggcggaggttgcagtgagccaagattgtgccactgcactccagcctgggcaacagaatgagactctgtctcagaaaaaaaaaaaattattaatagatggtgaccctcatcttcatgttttctgcatctattgaagtgcgccattgagatcgtggagttcttccctgtttgtccatatggtgaacaacactgattttctgatgttgaacaatctctggaataaactctgtttggtttccatggatttctgtttccctttagattttgttagtaatgtattttggatttttgcatccaagttcataattgtaactggacaaataaaggcagattttaaaaggacaagttgggaggctaaggcggaaggatcacttgagcctgggagattgaagctgcagctagcttcgattgttccactgtactccagcctggtgacagcaggacctgcctctaaaataataatacttaaaaggacgagtttacctacagtctcaccaagcaatgaaagagcttatcttcctcctgtttcctttacggatcttgctcatgtattttatcttagttactttagcataaatgctaaatcaaattctttttcactagacatcatcatagctctaggcataccacataatacccaagcacattttaatcattaaaattgtttcctttttttgtggctactgtaaccacttcagcgaaccatttagtgtgtagtgggtttaaattattttttctcctttctgggataaatttcccaggagaaggataattgggtcaaaagctacgaacatatttatgggttcttttccacaagagatcgatcagtttgcaagtgccatctgcagtgtgggggaaccaatcttcaacttgcctgcatttggtattagtattttattaacctttcattgatccaattacggctctttgacacaattttcatcagtgatggactaagtgtgatccggcctgacccgcctccggccggcgtgagaaggggcatgtgtcgggctacgctcgggcttcccctgccgcccattgtgatccagcccgctaggcgctccctgccgcccattgtgacgcctgccagccgcaggctgggtccccgaggcgggcggcatttaggctcggtctccacagccatggccgcgacgcaggagctgctgctgcagttgcagaaggataaccgagatggtcgccagcggaagcaggagctagagaagctgatgcgcgggctcgaggccgagagcgagagcctcaaccagcgcctgcag

SEQ ID NO: 27942 - DNA, 2300 bp, Homo sapien
tagctttgatcgtaccactgcactccagccagggtgacagcaggaccctgactctaaaaaaaaaaaaaaaagcaaaaaaaagcatatactattaatacttcctccttactataatgtttactgtggcctttatcagactagagagtgcttttatctctcccttttgttagagcttttagaattatcaatagatggtcaggtgaggtggctcaggcctgtaatcccagcactttgggaggccgaggtgggtggatcacgaggtcaggagttgaagaccagcttggccaagatggtgaaaccctgtctctactaaaaatacaaaaaaattagctgggcgtggtggcgagtgcctgtaatgccagctactctggaggctggggcagagaattgcttgaacccagtaggcggaggttgcagtgagccaagattgtgccactgcactccagcctgggcaacagaatgagactctgtctcagaaaaaaaaaaaattattaatagatggtgaccctcatcttcatgttttctgcatctattgaagtgcgccattgagatcgtggagttcttccctgtttgtccatatggtgaacaacactgattttctgatgttgaacaatctctggaataaactctgtttggtttccatggatttctgtttccctttagattttgttagtaatgtattttggatttttgcatccaagttcataattgtaactggacaaataaaggcagattttaaaaggacaagttgggaggctaaggcggaaggatcacttgagcctgggagattgaagctgcagctagcttcgattgttccactgtactccagcctggtgacagcaggacctgcctctaaaataataatacttaaaaggacgagtttacctacagtctcaccaagcaatgaaagagcttatcttcctcctgtttcctttacggatcttgctcatgtattttatcttagttactttagcataaatgctaaatcaaattctttttcactagacatcatcatagctctaggcataccacataatacccaagcacattttaatcattaaaattgtttcctttttttgtggctactgtaaccacttcagcgaaccatttagtgtgtagtgggtttaaattattttttctcctttctgggataaatttcccaggagaaggataattgggtcaaaagctacgaacatatttatgggttcttttccacaagagatcgatcagtttgcaagtgccatctgcagtgtgggggaaccaatcttcaacttgcctgcatttggtattagtattttattaacctttcattgatccaattacggctctttgacacaattttcatcagtgatggactaagtgtgatccggcctgacccgcctccggccggcgtgagaaggggcatgtgtcgggctacgctcgggcttcccctgccgcccattgtgatccagcccgctaggcgctccctgccgcccattgtgacgcctgccagccgcaggctgggtccccgaggcgggcggcatttaggctcggtctccacagccatggccgcgacgcaggagctgctgctgcagttgcagaaggataaccgagatggtcgccagcggaagcaggagctagagaagctgatgcgcgggctcgaggccgagagcgagagcctcaaccagcgcctgcaggacctgagcgagcgggagcggaggtgcgcggggaacgcccctctacctggcgggcgcgcgagggtcggtcccgcaggcagcgccgcgaggtgcttcgcagagtaccaggctgatccgcccaggcccgcatctctgctctaggcccttgggaacgggtgatccacccagcggacccaggtgggggactcggccaggacttcccagtcctcaatcatgagcctgcggctggtccttcctggcgactgcgggatcctgagcgacccagtccgccttgtagcgccaacctcagtttccctctgcagcctgctgcggaggcgaagccaggcagcgcagcctctgcaaggggaggcgcgcgaggcggcgcgggagcgcgcggagcgggtgcgcagaagactggaggaggcggagcgccacaaggagtacttggtgaggaagagtcctggaatggggctggacccagggtggggtggggcagggcgggcggaagggggcaggatccgggggtggggtgaggtaggaccggcggagaggtcggcaccgccccaggaccccgtccgcaggagcagcacagcaggcagctgcaggagcagtgggaggagctgtcgagtcaggtacgtgcaggag

SEQ ID NO: 27943 - DNA, 2300 bp, Homo sapien
cggtggctcatgcctgtaatcccagcactttggggaggccaaggtgggcggatcacgaggtcaggagatcgagaccatcctggctaacacagtgaaactctgtctctacaaaaaatacaaaaaattaaacgggcatgatggcgggcgtctgaagtcccagctacttgggaggctgaggcaggagaatcgctggaacccgggaggcagagcttgcagtgagccgagatcatgccactgcactccatcctgggcgcagagcaagactccgtctccaaagaaaagaaaaaaaaaagtagcacatgtgatcagagggaaaagacctaagatgctttaaggcggtttaggggaagatgacagcgatgagctgagctcaagtagtaagaataccagaatacagagtgtgacttcccaaataaacagaaggaaaggggagcattgaaaaatcaggatcaacatgttacaaatggtagaaataaattcaaatatagtagaaataatttcaaatcacaatacttgaaaaggcagcttgtcagattggcaaagtgtcaaatgctatgtacaagtttctggcaatacggcaaattatgtatcctgaaaaactaaaaatgctgtttacaatactggggagtggctctaaatccatgagctgtaaggaaggaaggaatctttggaggctgaaaagccagtcaagctcctacatgacatgggagacagacgacgaacccacgagcttcatcccttgagtttattaggcaaccttggtctacactctcaggagaggagtgcaccagaaataaagccaggtgccctggagtccacctggagccaggcgcggggcgctgcacttaggttggcagaagcccgttagcgcgcagctccagcagcggggacagcgtgtagcgcaggcggcgcagcgtcgtctccgaggtgaggctccagagccacgcggagacggcgccggggtccaacagcaccgtccagagcagcgacagccccaggaagaggagcggcagcgtcagcagcacctgcagcgcgcccagcacgcaccgcctgcggggcgaaaggcgggcaggtgggcggcaactcgggcgggcacctgggggaccgcggccgcgcccaccgcccggctcacctgatggccagcgcgcgagggccgccgaacagccgcgtctcctgcggggagagagggccgcatccagctacctccgcgcccgcggcgccggcccggtttccaggaggagggggaggcggtaccgcgggggggacggggagggttgtcccgctccagcccaccccgcccggacccgcgcaggcgctcactcggtccgccctggccatctcctccatgagcgattcggtgctgtactgcactccgcgaagctgcccgtcacacctgcggggacaggcatgcaggtgggagcccatcccggccccacagtgccccgccgcgcccgcaggcccaactcccttacagttcccggccactctgccaggcgtccagctcctccgcagcctccatcaccttcacctgcacctcctggagcgggtgagagtgcggactgaggcctcggggaggcgtcctggcggtgggttgggagacttaccgccccaggtctgggggaggagaggcgggaggcaccttggcgtctgagtggggccgcacctgcaggactacggtctgctcctggaatatggcccaggcctccgctgtctgcagcgcgtcctgggtgtggacacccgggttagactcggcggcgtcggggcgacaggcccttccccatccacactcgaaagcctaccctcctccaacagaacccgcttctgccctcacctgctgcagcttctcctcctgcaaggcgcatttggtctccgccagctccagttcattcttgagaaggacccagggaatgtcaggaggtccgcaggccggcaacccgctgcgcctccgggccccgcccccggccctcagtgcccgcccccaggcgatcatgaccccgcccgcgtcctcaggaccagtcgtaagcaacgccccagctggtcatggccacgccccctccgcgctccgcccctattctagccctcagagccccgcccccatgcgattgtgctccgcccacattccccgccccgcccacgccttcagggcctgccttaagccacacccccaggtggtcacggcccagctcatgctgctgctccgcccctactaaacacctcagggtcccgctcaagcacctgcagcgtcaccaattgggctgcgagttgctgctccgtgctcttctggctctgcagttcccctc

SEQ ID NO: 27944 - DNA, 2300 bp, Homo sapien
ccatctccgcctccctcttcacatgatgatctcccttgaaggacatcagtcattggattagggactgtcctaatccactgtgaccttgtcttaacctaattacatctgcaaagaccctgtttccaaataaggacacattctaaggtttggggtgaacatgaattttagggagacactcttcaacccagtacagacggtgtggccagctgtggagagggggctgccaccccttgcagggacctgcctcccatggccatgtctgcacactggccccgagccctcccaggaccccagtgtacagacacattcctcctgccccccagctcacagcacccaacactgactcaggcacacctgggtcttcactgcagatgaaatggggctctgtttttagttccatttaagcctaaatgttcttagactccaaccctggattccacctgctgttccaaggctttccttgggccctgctgggctcctccttggcctccttggggttttgaagaagtgatccccaagattgctggggttcctttcaggcatgtgagaggactcatccctggccccctcagagggcttctcactgcctacaggctaacagtggcctctctccctgcgggcaggtctgcggtgccgctcagactctgaggatgagtgcagcacgcaggaggccgacggccagaagatctcctggcaggcagccatcttcaaactgggagacgactgccggcaggtaagcagggtcaggcctcaagtaggcttggggactgggcttgctgctccccaaggctccaggcccaccagagtccaatctcatatgcagaaatgtgaatcttttccttctcttacatggttcaggtgccacggggtaaattagggcttctgcaaaacccagaggcctctccttccagcccctttcccactgtccctgccatgccagtgcccacctgagggaactgtccaggggttgggtgccttatctcacacaccccaccagacagctcagcctcatgctcagcccagggcctggtggtcccagcagcctgagtccagcccccggtggtcagaaaggaaggccttccagactcttgctcggctgtggtctccccacctcactccatctctgggtgctcggcttttgccctgcatgagccagaagagctactggggtgcaaggatgccaactgaccgcatcctgcgcctcccggcttcccaggacatgctggccctgcagatcatcgacctcttcaagaacatcttccagctggtcggcctggacctctttgtttttccctaccgcgtggtggccactgcccctggggtaagttccctgagtggagccagtagggcagccctgggcacctcgcacccggcgggcctcagaactggcctttcctcctagtgcggggtgatcgagtgcatccccgactgcacctcccgggaccagctgggccgccagacagacttcggcatgtacgactacttcacacgccagtacggggatgagtccactctggccttccagcaggtagccagggtggccacaggccggggaaagtcgtgtgcgctccaccctaccccagccacccatacccagcctctacccacaccctgctctcctcagtcatcctttgttaagggttaaaaccagggcacctgggctgggcacggtggctcacgcctgtaatcctagcactttgggaggccgaggcgggcagatcacgaggtcaagagatcaaaaccatcctggccaaaatggtgaaccctgtctctactaaaaatacaaaaattagctgggcatagtggcacgcgcctgcagtcccagctactcaggaagctgaggcaggagaatcgcttgaacccaggaggcagaggttgctgtgagccgagattgcaccactgcactccagcctgggcaacagagtgagactccatctgaaaaaaaaaaaaaaaaaaaaaaaaaaaccagggcacctggccgggcgcagtgctcacgcctgtaatgccagcactttgggaggccaaggcgggcagatcatgaggtcaagagatcgagaccatcctgaccaacatggtgaaaccccatctctactaaaagtaaaaaaattaactgggcatggtggtgggcacctgtagtcccagctactcgggaggctgaggcaggagaatctcttgaacccaggaggcagaggttgcagtgagccaagatcgtgccactgcactccagcctggcgacagagcgagactccatttaaaaaaaaaaacaccagggcatctgtaagccactttgggagtcaaaa

SEQ ID NO: 27945 - DNA, 2300 bp, Homo sapien
gtagatgccagcgaggtccttctctctgctcagacatctttgactccctcttatgcacatcccactgatgactctcagcacatcccatcaccttcacctttgaggtttatccaggatctgacaagtcccagcatcccagctgctgccccctggcctggcctcctgctccccaaccccaggcatcttccccttctccacatgcggttggcgcaagccaggggggaatcagagcccccctacagactcgaaggtgggcttgtttctgtgacctgcaagcccccttcccacctgacttccatcctctctcttcccctcgcttgctgtgctgtggccatgctggggtcctgcttgcacttcccacggatgattctcagcacatcccatcagtttcacttttgaagctgccctcctgggctgctcccaccataggctgcgtcatgcattccctcttctcagatggccatgccttgcgcctcactcctgcgtctcctccagggctcatctcagatgtcccctccttgccagggctctccctggccacctggccacacgctcactcgcactgctgtttcttagtgtttctcagtgtgtgtagcttatttcttgttgtctgtggtccccaccatagactgtgtggtcatgtttgtcttcattcagagcaccatgcccagagtccacgaggccctggcacagaggcagccaccaggatgtggttgtttaacaaatagatgggagtgtgtttcttcgatggcttcttgtccgtggcagttctggggtcccccccaccgccatttttttgctcccttgtctgcttccataagactaatcagtctgcaggaaacagaaagcaggctgtagtgcctcgtcccccaggagtcctcaccccatgggcagattagagggaagcagcagacagagccccgccccgggctcccgtcggctcctggccatcctgggcttatgtggcctttgtctccaccctcacagcctccagatggcttctgtgcctcccagcaggaaggaagacaaggacagagtgcaaagggcagaggccagctgccttgaccttatgaagctcaccctggcatgtgttcccagggccttgcccagttcactctccctggctcattagagtggccggggagaacagtggctgcctcagccagcagggaccctggctgagagccctgtgactggccacgtggccaccctgatccacctcatgaggaagaagggaggggatggtactggggagggagccgcggtgtgtgttctactcattaggcctcgttgccacctctgcacaggcgcttggagcccttgtagaagctggtgctgctgggacaacagagggatagaatcctctttggccagatgccaaatgctgtttgttggtctccttgtaaaaacacccagaaatcatgggggctttccatgtgtgagctgcacctcttactctctgcagcacccaggtgtctcccgggcaccatgctgctccctctgggcacccctcatgcccccccacggaatggggacctggctgagcatgactgggccatgggagcagcctgaccctgggctcccaggcctggccatggtggctgcaggctcgcctcggctccatgggccttcctaatctggttagcgggatgaaggtatcgggtagggtctgtgtggggtggagaggaggagccaggccctggatccagaaccctcttctgcccttgccagctcagcagcccacagaggggtcttcccgctcacagccacagagggttatcagggttatagagaagagtcacctacccagtgcctgtcagggcatcaggtacatcccgggtgctgccacctcacacctgcaatgtccacacggtgaaccgggttgaacagaatgcagcctcgagaggctggagaaaatacaccaagcactgacacagatgaccctgggatgtgggactataggcgatcttcaattttttcttcatacttttcttggtttctaaatcttattcagtgagcacgtgttcctttttttaattagagaaaacttgacagtagcccctttttgtgtttcacagaggagctaacattccttctgtacctgtagttcatgcgggagatggcaggggctggcacatgacagtggagcagaaatttggcctgttttctgctgagataaaggaagcagaccccctggctgcctcggaagcaagtcaacccaaaccctgtccccccgaagtgaccccccactacatctggatcgacgtacgtgcctgttcccccacgaaggctgtggggtg

SEQ ID NO: 27946 - DNA, 2300 bp, Homo sapien
tcctggcggcagctgcccaaggctttggtgggccggtattgaaagcccaggcctgcagcttgggtgagcccttaggcagtgaaacctctggagagggaaggccatgtggtcaggccaagcgggctagggggctgggccctctgggcagggaggcggtgagagcagatcaggaagggaaggaacgggggagccaaaagcggttgagactggttcttataaatagcccttgcacaagtggctccaattttgaccttttgttatgtaaatgtggccagcttgggaagggccctgcccaggcctcctgctaccacacccgcaggccaagaattgtgtgtctgccaccagcgccccctggcctaggtggcccctgggtgtccttaatctcctgtgtgtgttagaggggcaggcattgcacccaccgaactccctagacctgttcgctggtccttactcttcctggctgtcagatccaactaccaggctctgtggccacagtctcctgctgggctgcccctggtgccccagccagagacccccaggtgcgtcccttcatcgcccttccctcccttcttcgctgatggctgtctgggtgactgtgttcgtcttctcttccccaggtgaccaggcattgatgcacccccaggaaggccacgcgctcaggaggcccccccgccccgctggctgctgctcacatggtgtctgggcccttggcactctggtgaggcgcaggggaggggggaccgccactggcccctttccccggagtttctgggtggcacacagccccacagctcggcctctatctgtctgacccgtggtcctttgtgtgcacacagcactgggcagtgtggagggagcctggaggccactgccctcttccagtccccttgccagtctcagggtaccaggtgtctgggtgctggcagagccggcactgatgttttctggggtcaccagaaagccctggtttcaccacaaattgtgactgtcaggacacagtgctgctatggtcaggattcctttccatatgctgcttcagcctcagacctcggtgggccttaagagtaggggctgctcagccaggcgcagtggctcacgcctgtaatcccagcactttgggaggcagaggcgggtgggtcacctgaggtcgggagatcgagaccagcctgaccaatatggagaaaccctgtctctactaaatatacaaaattagccgggtgtggtggcatgtgcctgtaatcccagctacttaggaggctgaggcaggagaatcgcttgaacccaggaggcggaggttgcggtgagccaagatcgcaccattgcactccagcctgggcaacaagagcgaaactccgtctcaaaaaaaaaagaaaaagagtaggggctgtagctgttcccatttcacagggcactgggggtgctcctgaccacgtgtcagccctcacattgtacctggggctctggagcccagatctgtctctctcctctccacttccttagttcaggtgcccttgaacctctggcctctctgtctggtcctcagataggagtgggtcctcagataggagtgggttggttgacccctgggggcagggcagttggagtacagatatcactagcaggtcccagatggtaggaagacagatcagctcagggaaagctgctcacagcctccttcagagttctgggtcttgaaagcagctgttttgggagcctaactgcttttcccagggacttaaggcctttgtaatttttgtagccctttcatcctccagaataaagggaccttcttgagctcagggccttctcagtactggcatgccccagggctcctcctccctgcctggctactctggccagctccactgcttacccagcccagtcactcctagtccaggtggatcccttcagtggcttggcccatggcctgcatggtgaactgattagcagccccaactaatgggtccaacctcagctccagacaccgctgcgctggtcgcccatccgccatcactgttgatgccagggtggttcttcccttcactgttgatgccagtggggcccctccctttactgtagatgccagtgtggcccctccctttactgtagatgtgagcgaggtccctcccgtcactagatgccagctaggtccctccctttactgtagatgccagcgtgacccttcccttcactatagatgccagcgaggtccctcccttcactgtagatgccagcgaggtccttctctctgctcagacatctttgactccctcttatgcacatcccactgatgactctca

SEQ ID NO: 27947 - DNA, 2300 bp, Homo sapien
ctgtaatcccagcactttgggaggctgaggctgcaggatggcttgaagccaggagttcgaggttgcagtgagctatgattgtaccaccgcacttcagcttgggtgacagagcaggaccctgtctcagaaaaaaccccacaaaacagtaatagagaagccacataagcagatgctcgttaggagccctgactatttaagaatgtaaacaacacaattttagaaccagtggcaaggagggtactggacatttccatcttccccacgtgcctccttatctttcacatgttgtttcactctgtctcttctcagcattgggtctgaccagcatttgctcacctaatgaatgtttatgagtgcctgctgcatgcctgctgctgtggctgcttgggacacagggtctaactttgggtactggtctatggggtggtgggggtaggcaggagggaagcagcttggcagctggtgctgacgttggaagcggggggacaacagaggcagttctggcttcacagaggagggagtcgtgagggggcaggctcctcccagagtagggcacggcctgcaggagctctcaggtgtgtctgtggaagggatgaggtgggcttgatgcccctgtgggaagtgctttgcatgccaggcctgagcatggactttatgctaggcatcaggaatttattgaaagctttatttatttttttaattttttttttttgtattttgagatagagtttcactcttgttgcccaggctggagtgcaatggcgcgatcttggctcactgcaacttcctcctcccgggttcaagtgattctcctgcctcagcctcctgagtagctgggattacaggcatgcgccaccatgcccagctaattttgtatttttaatagagatggggtttctccatgttggtcaggctggtctcaaactccagacatcagatgatctgcccgcctgggcctcccaaagtgctgggattaaaggtgtgagccaccatgcccggcccattgaaagctttaagcaggggagtggcttgatgagatgggtgttgagaaagataactcagggttattggactctgaattggagggtacagggactaggcgagggttggctggaggggttgcaggggggtgactgtgttctaaacgctgatattttcacttagagtggctctgattctgcccttctttctcctgtagaccttgggaggttgcctgggatttctccctcctggacaacttctgttgagtgaagcatacctgctaccccaggtgtggaggccccaggttcttttgctttgtatgattaggacagggtgatattttctgggttatctcttgtgggaactgagccctccaaagccctcatttgtgcattgttgtcatagctgcccaagtgtgtggccttgctgagtttgacggctgtggaccaggtgatctctcgggtggtgaaagggaggtgctctgtgagtgcacctcagctttagcctcttggcttctccctggattgggatttccagggaggtctctttcctctttcttttttctctttcttttctctctttctctctctctgtttttttgtttgtttgtttgtttgttttttaaatgagacagggtcttgccgtgttgcccaggctggtcttgaactcctgggctcaagcgatcctcctgcctcaatctcccaaagtgctcagattaaaggcatgaaccaccacacccgactttcctttcttttgagacttctgcacagagcaggctcagcttccttagtagacttagccattgaactctaagaagttatttacaaaggtgtaaataggccgggcatggtggctcacgcctgtaatcccagcactttgggaggccgaggcaggcggatcacttgaggtcaggagtttgagaccagcctggccaagatggtgaaaccctgtctctaccacaaaaattagctgggtgtggtgatgggtgcctgtaatccccagctactcgggaggctgaggcaggacagtcgcttgaacccgggcagcagaggtcgcagtgagccgagattgtgtcactgcactccagcctgggcgacagaggaagactcaaaaaaaaaaaaaaaaaaaacaaaggtaaattacatgtatatatgtgtgtgcacaaatcttaaagaatagagagataagtagtggtaaacctactattggttgaatcgtgggtgtcccactaagcgtgacaccgttgttccctcatggccacataagaaatagcctcccaagttcctgggacacctcatgcacttctccctggcttattc

SEQ ID NO: 27948 - DNA, 2300 bp, Homo sapien
gcacccctagtcttttctagtaggagttgccaagcacatctggaaagctgtgttccccgaccccccactcccccaacagcaggaggggtgtaacccagggaagccacccctctgacatatgtgctggggggaggggcagagccttgcccctaggaatcctgtggcggtgggttgttgactgatgtgggattgctgtgtctcttgtgctgtcggagagctggcaggtagtggaggggccttgggagctcctaggctgaacttggggctgtcctccaaggatccaggatggagggatggagctgggtcactcaaacctaaggcctttctgggtctagcatttattgcttcctggcttctggcttggcttcttttcgtccattctcatctgccagtgtctggactccctgggccttcaggcaggcattttcaggagcacaggccatgtggttggtctggagccctgtgtcaaggagagtgtgcgtgcttggtggagcagggttgctggagtagtgtgaaaaaaagcagatgagctggcctctggagacaaagctgtgtggcaagactgctggtttagtgggctctgaacaccaagaacagggccgggagtctgatacttgggggctgaactgagtcctgtggcccaggattgttgcctggaagtgaacgttccgtcttgtgccattgagactgtgaagatctctgggtcccacaggacgagcagtagacttggaaggctgggaagaggctccccagctgcctgccttgggaggtcagagctctcaggtgggtcggcaggccagtgtcgggctgggggagggaggttgtagtagagtgcctgtggcccagcttctctggtcagttggctctgagtgctgctgtgtgcccagcaacctctccctgcggtgtttttctgccagttgttggaacttgtagattagtcactgagtttttacgaccgattcctgaaaagaaaaatctccctctggttgctgcctctgtgtagaggaagaagcagcccgagggagtcaggcctttaattaaagcaaaaccgaaatgattgtcgaagttgctggaaggagaagagaaggcgcaggtggggcaggggtgatgagtcctgttgtgctgcatgatacctgctctggggacaggtaggcacgatcccatcctcgatccttggtcttggccagcagcccagccttctccacaagctgcagtcgcggattaatcctcacgtagtgttttctttccgtagatcagatttctcattttgttaataagcgcagcctcccatccacttgaagtcagctgttgtggacgaggagcaacagggttttgcattattgagctgatagcctgccgcctcccctcaagtccttattgtttgcggggtcagatctgaggggtggggaagtgccatttaatcagcagccagcccctggagaagagctggcggggcagttctggagagtgagagccgtgaggaaggaataaagttcagtttacccaggggacttgtggttccaaccttattgcttggtctgttggcctggagcagtcagccccaccccataccttgtcctgcccgctgcccccagtacctgatccctgggagagtggggcacttcttctgggctgctcttgctggcctgggaggcagctttcaccgcgggaagaaagaacacattgggttcctcccttcttgtctcctccgagcctggcctaggacggacccctgtggggcagtgagaggggaactggacttggtcggtcgcaaagtctgtagtgcattgctggctctgccatttactcccgtcatgaccttgagcagtgattgactctcctgcctggtttctacaatgggaacagaactggagtttacattcatgtatcgctgttttctggagctcagcctagggaaggcagacactcaacaaatgattataagatggggtgataagggctggcatctagcggagcgcagagggcatagcggtggcgtgggaggagccggccgtgggctggctgagaaccctggatgccatgtgggttggggttggcctggaggggaggggttttaaccaggaagtgactgctactgggttttaaaaggcagtggtagggtagagggtggcagtggagacagctggagagcactgaggacgcggacccacgggtactgtgtgagctgtgaagcccgcttgggagaccccactgccagccaggcatgtatgcggctctttttcaagctttttattcattccgccacattttctgagcgcaaagtcagtgcctggccccct

SEQ ID NO: 27949 - DNA, 2300 bp, Homo sapien
acagaatcctggaatactggtctgagagggtataattattttaaaatatttttggggccaggtgcgttggcttatgcctgtaatcccagcactttggaaggcaggaggatcacttgatcccaggagtttgaggctacactccagcctgggcaacagagtgagactccgagtctccaaaaaacaaaaaaagacaaaagaaccccaaaaaaacaacttttggctcataccgccaaactcatgtccaggaattttgaggtgatttatgtgcttccaaaagtatatgagagtgattacctatcagaccttgtgtttgaaggttatcacttgaaactgatttttaatttgtttaggagaaaacccagcttcttatagttttattttatttatttatttatttttttgagacggagtctcgctgtcgcccaggttggagtgcagtggcacgatctcggctcactgcaggctccgccccccggggttcacgccattctcctgcctcagcctcccgagtagctgggactacaagcgcccgccacctcgcctggctaattttttgtatttttagtacagacggggtgtcaccgtgttagccaggatggtctcgatctcctgacctcgtgatccgcccgccttggcctcccaaagtgctgggattacaggcgtgagccaccgcgcccggcctatagttttaatttatatgtcttgggttagtagaatggttgactttttttttcagtcgttccttcaaatagtgagtcctctgctaggctctatttgtggaatattcttgttcttcttcagggatgtttgatagctcttttttttccacagatgtttgatatttcctttttcatctattgtgttcttaccatttctaggatgtttctaggctttctattctatttcctgttctgtaccacactgaaatgcctgcggtagctttacaatttgttttgatatctgttagggcaagtctaccctcatgcctgcttttgttcccaaggggggaaaaccatagctgttttcggctatttatttttccaggtgaacttagaattttgtgaagtctaagaaatgttgttaggatgacattaaacctatacatccattaggaaagaaaggttgcatcatcagcttggcgaagggttattgaaactggtttttgatcttgactggagctggggcacaacttccctgtaaggcagacctgggctcctcttggacttgggcgacctcgatagtggtgtgttcctttgtttggtgttcaaagtagagagaggtccattaactagctccctagagaagcagtggcggctcaggccagcccagcccctgggaaggctatctgcatggcggccgggagcccgggtcctggtgggccggctcgggcaggcgcttgacccctggggcctgcgaggggctgcggccaccggaaggggctggctgagcgcagcgtgctgggtcctccgcgccctcggagcaggtagggttcgcgggggtgcgcccgcgggggcccgaggggcgctggggtcacgggaggggcgccccttctcttttgcacccaaccagcccgggcttccccaggagcccagacccccgagcttgcagtcactgctggctgcgcctttgagcctcgggcaaccgcagggagcgtcgagcaggggtcgcaaaggggtcggggagggggcgcgtaggccgatagaggtccctaattcggggctcctaggggtcagggtagggctaaaagggggtaagtccaccagagtttgagggggtgggcgtcagcctgtcggggggggccagggtccctgtcccgggggccggtatgcggtccgggtatttcaggggcgaggtcgcggtcctgccctggcgcttgaggtcggagtccggttagatgtccggggtctgggtccccggctcctcccgcgcacccctcccccacggcgccggaccccggcagcccgccccgcctagtgctgggaccgctgtccggcccggccccgcccccgcaggccccgcccctgttcacaggccacgcccccagctgctgccccctgtccccgccccgccgctcgcccattcagatgtgggtcaggggtgagcgggcggcgccgacgtcacaagcttccaagatggcgctgggcgggcggctgtgagcggcgctcggggcgcgctaggcggggagccgagccgggctggcggcaggcggacggggcgggcgcgtgcggcgcgagccgggcgctgaggacaagggccgctggtagggccggccggccggcgggcggagcgccgccgccgac

SEQ ID NO: 27950 - DNA, 2300 bp, Homo sapien
aacatggtgaaaccccatctctactgaaaatacaaaaaaaattagccaggcgtggtggcgggcacctgtagtcccagctacttgagaggctgaggcaggagaatggcgtgaactcaggaggcggagcttgcagtgagcagagattgcgccactgcattccagcctgggcgacagagcgagactccatctcaaaaaaaaaaaaaaaaaaaaagaacatctggagccataattcccgatgttcttgttacttgacactgcctaaaggcatgttctgtgggttccggggaaactgatttgaaaaacttgagtgttgtaaaggagggccataagctgagtgaacacagcagttgtgagaggtcccaggtgcttcctggggacagggagacacgacagaccaagaagcaaaggggcctctgatgtgacttcaatatcaaggtcttgtcgggcacagtggctcatgcctgtaatcgcagcactttaagaggccgaggcgggtggatcacttgaggtcagaagttcaagaccatcctggccaacatactgaaaccctgtctctactaaaaagtacaaaaaattagctgggcatggtggctcaagcctgtaatcccagctacttgggaggctgaggcaggagaatctcttgaacgtggaaggtagaggttgcaatgagccaagattgcgccactgcactccagcctggcgacagagtgaggccccatctcaaaaaacaaaatcaatgtctcgatgcagactgccaggtatcaggtgtccatccatgtctccaaaaagccacttggcaccaggagcagacaggaagggcaaagaggagccagactgaagcagggcttcttagctcccaagccacacaggtggccaccagtcagagaggcagtgtgtgtgtgtgtgtgtgtgtgtgtgtgtgtgtgtgtgtgtgtgtgtatttcttcagttcagtgtgtgtatgtatgtttcttctgcagctcagtgtatgtgtgtattccttcagctcagtatgtgtgtgtgtgtatgtttcttctgcagctgtgtgtgtgtgtgtgtgtgtgtttcttctgcagctcaggatgcctccaacatttctgctgaagcctcaccctcactcctggcccatcctgaggcctctacctaagatgccaatgagtagcccagacactggggctccagtgtttgtcaccaggtggtacctggatgtgggaggtagacaggccagatggccagtttgggcagtgcccccatgcctatctggccctgggtccctatgccaccttgctggggagggtcttttcgcttacacctcctctgagccgactctgcgcagtaacacaaatgtgtatcaggcacatcctttcctcaaaaggtggatgaccagttgggtgatcagggctgttagggggctgaagggtcctggggagtccaggtctagccaagttgaggcctatcctgctgcattttccagccacctgacccaaatacaccacctgaacccacgaccaggtatgcccacaccccatgggtggccttaacacacacaccctgcccctttctccaagtacaggagcagcagcccagacttccctcggggcaccgcggcctgcttgggactgcacagtgcctgggagggtgcctggggagggtcacaagggacttggtgctagaagcaggaaaagtgtagggaccggaaaagcccccgtgcatcctggaagggacatgggccagtttgagcaggggtgtgggagtccagccctggccttgccaggtggagaggcgcctgggccagacatccgcggcaggaggcgggggaacatgccaagaggcggaaggggcacgcggagacccccagggggcgccggaaggggcgcgccgggcggtcggcggcggccgttggcgagctgaggcctgccaggcgaagtctggagaccagccgggccgcggccgcaatggccaaggactcgcccagccccttgggcgcgtcgcccaagaagccgggctgctccagcccggcggcggcagtgctggagaaccagaggcgggagctggagaagctacgggcggagctggaggcggagcgggcaggctggcgggcggaacggcggcgcttcgctgcccgggagcgccagctgcgtgaggaggccgagcgggagcggcggcagctggctgaccgtctgcgctccaagtgggaggcacagcgcagccgggagttgcggcagctgcaagaggagatgcagcgggaacgcgaggccgagatccggcagctgctgcgctggaaggaggccgagcagcgg

SEQ ID NO: 27951 - DNA, 2300 bp, Homo sapien
aatgctaaaaccctgtctctactaaaaatacaaaaattagctgggcatggtggcaggtgcctgtaatctatgctactcaggaggctgaggcaggagaatcacttgaacccgggaggcagaggttacagtgagctgagatcatgccattttgcactccaccctgggtgacagagtgaaactgtgtctcaaaaaaaaaaaaaaaaaaaaaaaaaaaaaagagaaaaactccttaagaaggtctgagtatattctgaagctatgttcttctctctgcattgctacctgaggtccaaaccactgtcacctctttgcctgaatgattgcaaccggtttccaagtggcccctgctccccttcttatcctcttacccacctccattccccattttccaatcagagtactcctttttttttttttttttttaagatggagtctcactctgtcgcccaggctggagtgcagtggcgcggacttggctcactgcaacctctgcctcccaggttcaagcgattctcctgcctcagcatccagagtagctgggattacgttcgcccaccaccacacctggctaatttttgtatttttagtagagacggagtttcaccatgttggtcagggtggtctcaaactcctgacctcaagtgatccacccccctcagcctcccaaagtgctgggattacaggcatcagccactgtgccaagccccaaagtactctttaaaacatgcgtctcagcccaggtgtggtggctcatgcctgtaatcccaccactttgggaggttgcggcgggaggactgcttgagctcaggagtttgagaccagcctgggcaagacagtgagacttcatttctacaaaaaataaaaaaaaacttaggagggtgtggtggaacgtgcctgtagtcccagttaattgggaggcgaagcaggaggatcccttgagcctaggaggtcgaggcggcagtgagctgttatcgtgccactgtactccagcctgggtgacagatcaagactctgtctcaaaaaaaaaaaaaatcatctgaccatggagtcaatactcatatctatcaaagacctctcacagcacatggaatagaaaccaactcctcccctttctacaagaccctccatggtctgtcccctgcctccctcccaccctataatccttttactccattctggacactgagacagcctcatggtcttcgccagtgctgcttcctctgcttgaaacattctcctccagtcctcccagctgttccttcccattttccaggtcccagcattggctttggagccagcagcccacctgtgacaggagcctggctctgctcctagctggccgtgtgaccttgggcaagtcactggcttcttctgtgcttctgtttattgtgaaatgaggatgttaatgctaacgtatcccagaggatggtttcaagggttaaagaaaataaagcactagagagaggtctggcacttagtagggccatttcctcaatttggcttccttgacctctcaaagtatgtccccacagtcactttcctatcacccagttttcttcacagagcttggcagtgtgaagtaaccttggttattcaactttttttttttcccccaagacggagtcttcctctgtcacccaggctggagtgtagtggcaagatctcggctcactgcaacctctgcctcccgggttcaagcgattctcctgcctcagcctcctgagtagcagagattacaggcgcccgccaccacgcctggctaattttttgtatttttagtagagaccgagtttcaccacgttggccaggctggtctcgaactcgtgaccgcgtgatccacccgcctcggtctcccaaagtgctgggattacaggcgtgagcccccgcgcctggtcaactattttatgcaatcagtatttattatgctcctactatgtgccaggcactggttgtaactgccatctgattggacgatccgtaaacgctgaggcccagtctgtgcggttcacttgcgttcctccacgcgccccccagcacagtgggaagcacacagtaggtgctccgctctgctcctgtgccccgccccgcggcccctcccccgctccaggaagtgcgggggctccagccgcccggccggccgcgatgcattctggggaaggagcagcaccaaatccaagatggcggccagcaggaggctgatgaaggtaaaagccattctctggcagcggccgggcgtggggcggcgtcctaggctccggatccccgaggcaggcggcggcttctcagggcgctgccgtctg

SEQ ID NO: 27952 - DNA, 2300 bp, Homo sapien
aatctccctacagcacacccagtaacccagtggagccttgtgtattctttaattaattaatttatttatttggagacgggagtctcgctcagtcgcccaggctggagtgcagtggcgcaatctcggctgactgcaagctccgcctcccgtgttcacgccattctcctgcctcagcctcccgagcagctgggattacaggggcccgccaccacgcccggctaatttttttgtagttttagtagagatggggtttcaccgtgttagctaggatggtctcgattccctgatcttgtgatccgcctgccttggcctcccaaagtgctgggattacagacctgagccaccgcgcccagcggagccttgtatattcttacctcctctccctccctccttttcccctttgctcagtaataccccaccatggtgtcacttcttccaaaaaccttttactgtgaattctgccacgccctacgcaattcacagtaaaccccattccagactctaccataccatgttgctacttatttttctatcagatggtgcttctttggggccagaacagaggcaagtcacccttaatctctaatactttcagtgtctggcaccaagtaggtgctcaataaatgtcagtctcctccttcccacctgcagaccctcgggacctctgacctttccaagatcagcttccagtggagaacggtggttggttgaggtctgacaattcaccagtcactataaacacatcagtccttatgccaagagcatggctgaaggactctatgaggctttcaatcctcacatgcctcacgaaatattgttcctctcaagctctgctctgtcctctcagctctggctacccactaggtcagggacagagaggacatagcaggcctgggtgctggccccgaggtgtgaggttcagtcttagctccactactcctggcaggaccacactttcgctctctgaaccccagtttcctcatctgtgaaacaggaatgacattaccaatttcatagcccggacacaaataccacactttccatgggaaaaatcaagactgtcacattgcaatggaaactgtggctgccaaccataatgactatttatacagtcatgggtaaggaaagcttttctggaccaaagagaaaacagtgaagttatgaatgtaaaagctgtagcctggcagagagctcaagatggaaactggagataatgttttctcaaatgaagccttagtgtatatgctttctttcattttcttagtgtctagagctcaagaaaaaaaaaaaatcaacaaatcaagaaaatgcctgctcttagaaaaatctgcaaaagatcaataggcaatttgaaaaagaataaaaatagctaataatatgaaaattttcattcgcactgctaagaaactactagaatgtgataacattgatataatcatctttatgttctcaaaacaacacacaaaaaagttgggttggggagaaagggagttgggtgtgtttatttgcttagagaaaacactggaaggacacaacccagaaagtttacaatggcaatctctgggaagggtaggagattcttttttttttttttttttttttttgagacggagtctcgctctatcgcccaggctagagtgcagtggtgcgatctcggctcaccacaacctccgcctcccgggttcaagccacgctcctgcctcagcctcccgagtagctgggattacaggcgcgtgccaccactcccggctaatttttgtatttttaatagagacggggtttccccatgttggccaggctggccttgaactcctgacctcgtgatccacccgcctcggcctcccaaagtgttgggattacaggcgtgagccactgcgcccggcttccttttgatattttacatattaaatatcacttttgcagtcaaggaaagttccgcattgcaatgaatccatcactggtctggttagcgcgggagcagttgccgggtccttgcaggggcacgccggaccgctaggtggcgagaacaaaggcgaagtgcagccgcacctgggcgtgtgcgtcggggcggggcccgggcagcgtccgggggcggggcctgggctgtccggcccactcccctgggagcgcgagcggtggacccaggcggccatgtcccgccctcgcatgcgcctggtggtcaccgcggacgactttggttactgcccgcgacgcgatgagggtatcgtggaggcctttctggccggggctgtgaccagcgtgtccctgctggtcaacggtgcggccacggagagcgcggc

SEQ ID NO: 27953 - DNA, 2300 bp, Homo sapien
ggttgtgtccttccagtgttttctctaagcaaataaacacacccaactccctttctccccaacccaacttttttgtgtgttgttttgagaacataaagatgattatatcaatgttatcacattctagtagtttcttagcagtgcgaatgaaaattttcatattattagctatttttattctttttcaaattgcctattgatcttttgcagatttttctaagagcaggcattttcttgatttgttgattttttttttttcttgagctctagacactaagaaaatgaaagaaagcatatacactaaggcttcatttgagaaaacattatctccagtttccatcttgagctctctgccaggctacagcttttacattcataacttcactgttttctctttggtccagaaaagctttccttacccatgactgtataaatagtcattatggttggcagccacagtttccattgcaatgtgacagtcttgatttttcccatggaaagtgtggtatttgtgtccgggctatgaaattggtaatgtcattcctgtttcacagatgaggaaactggggttcagagagcgaaagtgtggtcctgccaggagtagtggagctaagactgaacctcacacctcggggccagcacccaggcctgctatgtcctctctgtccctgacctagtgggtagccagagctgagaggacagagcagagcttgagaggaacaatatttcgtgaggcatgtgaggattgaaagcctcatagagtccttcagccatgctcttggcataaggactgatgtgtttatagtgactggtgaattgtcagacctcaaccaaccaccgttctccactggaagctgatcttggaaaggtcagaggtcccgagggtctgcaggtgggaaggaggagactgacatttattgagcacctacttggtgccagacactgaaagtattagagattaagggtgacttgcctctgttctggccccaaagaagcaccatctgatagaaaaataagtagcaacatggtatggtagagtctggaatggggtttactgtgaattgcgtagggcgtggcagaattcacagtaaaaggtttttggaagaagtgacaccatggtggggtattactgagcaaaggggaaaaggagggagggagaggaggtaagaatatacaaggctccgctgggcgcggtggctcaggtctgtaatcccagcactttgggaggccaaggcaggcggatcacaagatcagggaatcgagaccatcctagctaacacggtgaaaccccatctctactaaaactacaaaaaaattagccgggcgtggtggcgggcccctgtaatcccagctgctcgggaggctgaggcaggagaatggcgtgaacacgggaggcggagcttgcagtcagccgagattgcgccactgcactccagcctgggcgactgagcgagactcccgtctccaaataaataaattaattaattaaagaatacacaaggctccactgggttactgggtgtgctgtagggagattttattgaatcccatactcccatattggaagaacactcaagcccatttacagtgtgggactaatgctgagaggttgagtcacattggcaggaaagagcagagccaggaactgaagctaggtctgtgacttagagccggcactctttccactgcagaggggagaggtctcaaggcagaacctggggctgtgcacaccgcgggaagggcagaggcccctggaaacgaacaggagcaggaggcccagggctgcgcagcaaccaaggaggacacgaggaaggtgcttgtgccaccggtggaagacgtggctttggcttttaggctcccctcggggcaggagcagatcaaagagcctagccccagcttcggtggtgggtggggggtcctcccggcagcggggagcgtgggcaccagcatcctcagcctgcggctcccaggcgagtgtgggagggcagagcccagagaattggaggtggggccaatgtgggccccgcccccaaccattgtgtcggagagggaagtggacgagctcctcggtaagaaccaatgaggatgtggtatgcaaataagcaagtggaggccgccagccgacttcctcgcactgtgcagctgctccagtgagggcgcagactgtactggcctgtgcggagcaaggcggtgtttctggtgagtctgttgattctgggctggggtgaaagccaggttgcccagggtttgggaggagggcgggtcgagcacacgcagatccaaagatgatcggagacagg

SEQ ID NO: 27954 - DNA, 2300 bp, Homo sapien
aggtcaggagttcaagaccagccaggccaacatggtgaaaccccgtctcaactaaaagtacacaaattagccaggccaacatggtgaaaacccgtctctactaaaaatacaaaaattagctgggtgtggtgatacatgcctgtaatcccagctactcagggggctgaggcaggagaattgcctgaacccgggaggcagaggttgcagcagtgagccgagatcgtgccactgcactccagcctgagtgacagagtaagactccgtctcaaaaaaaaaaaaaaaaaaaaaaaaaaaaagacttcttgaatgatgcacatgggagactcaaaagtttgaaaaaaaaaaaaaaaaaggctgggtgccgtggtggctcatgcctgtaatcccagcactttgggaggctgaggcaggtggatcacctgaggtcagaagtttgagaccagcctggtcaacatggtgaaaccctgtctctactaaatatatttaaaaaagtagccgggcgtgatgatgcatgcctgtaatcccagatactcaggaggctgaggcaggagaatcacttgaacccaggaggtggaggttgcagtgagccgagatcgcgccattacactccagcctgggtaacaagagcgaaactccgtattaaagaaaaaaaaattgttgaatgagatgtgaggagcaaggtaaagagacgaatgaaagaagaatcccaagttttgggcctgagcatctgcagaatggaggtgccatttactgagactcataagcctgggggaggggtagtttgagggcggagaccaggaattctgctttggatgtgctgattttgagatgatggctgacatgtccaagagtatatatccatcgcctctcagatagtacttcagctcttccaccctagactggagacccctcaagtgcagggactaccaaatccagggcagactgacttttaaccgtttggacacctaaatgctgaaaagatcaaggtgtcttatactacatgtaactcaaaatcaaaacagtattaaacacgaaacccccaaaataacatgttgctgtaatgaaaatggctttactctggattttctgaacgcaaaattctggatgatttaattaaatatgaacttttctctctgctttgcctgtgcttcaactacaccctagtcagactcttgagcccagagctatttgctctgtgaccccacaggatctggagtgaagctgctgtaacaatgtcccatgaatgaataaataaacagaggtgtaagttttcctcccttgaaggttgagctgacaacactctgagaaggcggcaagaaggagacctactcatggccaggagacctgggacacggtcgcccaggcatggttcccacagccccttggtctcctttgactctggtttcctaagacagctttgggactttctggtgagaagctgccattattctcaacgctacagctccctgctgccctctcctgcccgatgacccagtgaccacgagatttagccacgaaaggagtcaaatgtataagtggccaggggaattcagaaaccccagggtctagggactgtggtgacccagtatcagagagggcctagggccgaatgactggaggtttcattaatcccggggtccagggacttaaggactgatcccgattcagtgaccccgggatctgtcgactttgtgaccacaaaatctagcgatccaacaacctcaagaccctgcagctgcgggcccaggttctgaggggagagactcattactgagtgcccaggagtccaggatcaaggggcgtcgtgaaaacgtgcctgcagggtcctaggatcctgagccggtgtccagggactcaccggctgcgaggagccgcgtcttcaccaactgttcacgctcactctccgcggctcggagactcagccgcccttccctgggcactcattggtaagtcctcggaagcgtggaccaatcaaaaccctcctcgtgtctccagtccccgcccagctacggctctcgcgaaccgggggcgggccctccccgcgctgacccagtggcagtgcaagcggagtgccgcgcgggccgactattggctgccgcaagcgggcgctgtcagaaccggattgggccgcggcggggacggaagcggcccctgggcccgaggggctggagccgggccggggcgatgtggagcgcgggccgcggcggggctgcctggccggtgctgttggggctgctgctggcgctgttagtgccgggcggtggtgccgccaagaccggtgcggagctcgtgacctgcgg

SEQ ID NO: 27955 - DNA, 2300 bp, Homo sapien
accatgctgggcctaagattccagcccttaaggagctacatcccatccactgtatgtgtgtcatggaggcagtggttgtgtcagggagggtgctcagtaaaccgggacacagactgaattacacaggattacaaattgtgaggaattgtgacagactttatgggagatgcatggaagtgggtggttagggaaggtctctctggggaggtgacacttatgttaaaacctagagaataagaagccagccatgaaataaggcaaagatagctggctttcggtgactgggtggatggtggtactgctcagcagagtggggactgggagaagagggaggattgaaaattctgctttatggccgggtgcggtgactcatgcatgtaatcccaggactttgggagggctgaggcgggaggatcacctgaggtcgggagttcgagaccagcctgaccaacatggagaaaccccttctctactaaaaatacaaaattagccaggcgtggtggcgcatgcctgtaataatcccagctacctgggagactgaggcaggagaatcgcttgaacctgggaggcggaggttgcagtgagccaagatcacaccattgcactccagcctgggcaacaagagcaaaactccatgtcaaaaaaaaaaagaaaaaaaaaaagaaaattctactttgaccagacatgttaatttaatttttttaggcagagtcactctgtcacccaggctgggatgcagtggcctaatcttggctcacggcaacctctgcctccccagttcaagctactgtctcggcctcccaagtagctggaattacaggtgtgtgccaccacaccaggctaattttttgtatttttagtagagatggggttttgccatgttggccaggttagtcttgaactcctgacctcaagtgatccgcctgcctcagcctctcaaagtgctgggattggccgggcgtggtggctcacgcctgtaatcccggaactttggaaggccaaggcaggcgaatcaggaggtcaggagatcgagaccatcctggctaacatggtgaaaccccgtctctactaaacacacacacacacacacacacacacacacacacaaagtgctgggattacaggcgtgagccaccacgcccatccagacatgttacatttcagatcagtggttacccaagtggagatcaggaacctggagtgctggtgacttagtactgggagtcatgggatacaaatggcatttaaaattaggagcctaggcaagattaccctgggcctgagtgtagctaggggcccaaggtactgatctgacccaagggaagggtctggcagaagagacggaagggatcaggtagggctttggacctctaggcttgatggccacctgctgctgggcctccgaggggcctggaggcggtggggaccgaatatgcagagagaatgagaagtgagcgagtagaacgagagtggtacatggctttgaaggcatctgccacggaggcgggaagggatggggtggaggctcatgagacttgaagctctaggaggacgttgaaaaagacctgagcgctggccgggcgcgaagcctcaggcctgtaatcccagcactttgggaggccaaggcgggaggactgcttgagctcaagagctccagaccagcctgggcaacattgtaagagcctgtctctacaaaaaattaacaaattagccgggtgtggtggtgcgtgcccgtagctactcgggaggctgaggtgggagaatcgcttgagcctgggaggtcgaggcagtagtgagctgtgattgtgccactgcactccaacctgggcgacagagcgagaccctgtctcgaaaataaataaataagacctgagaacccagtatgggaatggccctgagccgtggctaggggggtagacaaggcggtccagacagacccctcaagaagatggggcttcgaggctgagggagctcggccccgaaaagacgcctgcgggagatggcacacctagctaggaccccatactgggcaggcgatccttccgagcatgagcacctggcgctagcgaaccacaattcccagcacgccaggcgcccgtttccggggcgcgccgcggaacccggaagtggtcacggaactcggctgcggctccatggtctgagttgtcagccgttgttttttcgtgctcgctagtcgccgccgccgctccgccatggggaagcgacagcaccaaaaggacaaaatgtaagttgagccgcagtcgggagcggcgctccactctgcctcagtgaaccgcctg

SEQ ID NO: 27956 - DNA, 2300 bp, Homo sapien
tcttctctttctgctggtttggaaattagatgttttacttctggtctaaggttaagaaggacatctatttaaagtccaaagttggccaggtgcagtggctcacgcctgtaatcccagcactttgggaggccaaggcaggtggatcacaaggtcaagagattgagaccatcctggctaacacagtgaaaccccgtctctactaaaaatgcaaaaaaattagctgggcgtgatggcgggcgcctgtagtcccagctactcaggaggctgaggcaggactatgacatgaacctgggaggcggagcttgcagtgaaccgacatcgcgccactgcactccagcctgggggacagagcaagattccatctcaaaaaaaaaaaaaaaagtccaaagttatgaggtagtctctgccttcctcccagaccaggctggcagaaactctctcctcgtctcatggcagtgctgttggctgttttaattccaccccatttccttttttctttttcttttttcttgagacagactctgtcgcccaggctggagtgcagtggtgtgatctcagcttactgcaacctctgcctcccaggttaaagcgattctcctgccttggcctcctaagtagttgggactacaggcacacgccaccacgcccagctaatttttgtatttttaatagggacagggttttaccatgttggccaggctggtctccaactcctggcctcaagtgatctacctgccttggcctcccaaagtgctgggattacaggcgtgagccactgtgcctggacgacctgagcattttcttagtccatgtttatttatgttacccacgtttcttaatcccttgactcctgttctggctttgttgcctcctttctcctcagtccttcaacaggtcccttgatgacatggggctggctctggttttccaggtgtcccctcgtcccagccacctcccacagagctgcatggccaacctggttctgggcacagggaccacctgacaggcagtgggcagcagccggggcagcaggaagacctggggacagctggagttccggggtcccctgggcagccttgggggctaatgacctgccctggtgggcagcgcagggaaccacgtgcacacatgcgtccgtggaagctgcaggttcccagagctggctgtagagggtgggcagctcctggtgtgctcttaggcaggccaggtgcagaaggtgccatgctctccctaaccatccagccctcctccccagcttcatcacgtttcgctcctgtgcctacctggacaagaagcataccatctttggacggtaagggaagcggctgtgtgaagcctggggggtcagtgggctaggtgggttccttccccacctgaggcctcctcactgcctttttcgtggacctgagtcatgtgccatgctggccatcactgctgggggttgaggctatgcagagctgcgatggagggtgctccatgtgccagggaagtctggctctctagacccaccgggctcaggagaggaggaaactcgcccatgtggcctggacactgccctgtctcagacccagtggcgcgccactcgcaagcctggccacacccagctcccttcaccctctagtccaggggtctttccagcgttgtgggccacgtggtctctgacgcccacccagctgtgtggaagcagcacgaaacagggtggacgcaggtgatgtggttctggccaagtggaactctgtttaccaaaccagcggggagagcacaagccacgttttgtgactcctatttttcctgtgggtgggggaaaccaaaaaaaaaacaaaaacagaaaaaaacccagctggatatgcccagggccatggtcagccgaccccgcccttgccactccctctcatcgccttcctggctgctgcccaaggaccaccaggccagcctcggggctctcaacccctcttcccacgtgccttggggctcagccgtgggggtgccctccttgagcacacgcagacccacctctgtctccctgctgcagggttgttgggggctttgacgtactgacagccatggagaatgtggagagtgaccccaaaactgaccgccctaaggtctgtgcccagggaggtggggcgtggcggctgggggccaggcaggcagggggaggacctgccgtgcactgagccccctttgctgctaggaggagatccgcattgatgccactacagtgttcgtggacccctatgaggaggccgatgcccaggtgagggggcacgatgccaccacctaggagggtctgggctagt

SEQ ID NO: 27957 - DNA, 2300 bp, Homo sapien
tatctacatacaatggaatatcattcagcctaaaaaaaggaaggaaactgtgacagtgctacaccatcggtgaaccttgcagacattatgctaagtgaaatgagccacaaaagtcacagtaagccacaaaaagacaaatactagatgatttcacttatgtgaggcacctagagcagtcaagctcatagggacagaaagtagaatggggtggtgcggggcatggggtagaaggaaacgggagtcattgtttcttgagtccagagctttacttaggcaagatgagttctggagagggatgatgatgatggttgcacaacattatgaatgtatttaataccagtgaactgtacactttaaaatagttaaatggggccgggcgcgtgggctcatgcctgtaatcccagcactttgggaggccgaggcaggcggatcacttgaggtcaggaattcgagaccagcctggccaatatggtgaaaccccgtctctactaaaaatacaaaaattagccgggcctagtggcgggcaactgtagtctcagctactggggaggctgaggcaggagaatcgcttgagcccaggaggaggaggttgcagtgagccaagctcacaccactgcactccagcctgggcgacacagcgagactcctgtctcaaggaaaaaaaaaaaaaaaaaaaaaaaggcaacatccagccacaatctaagttatgagtcaggtgtacatttagcgacttgaagagatctttacatacacagtgggttgcagaaaacaagagaatacgtccagaggacgctgataacaatgttatatacattgtgacctcaatagaggttttgttgttttcttggtttttttcttttctttttttttttttttgttcaagaggaagggtctcgctctgtcacccagtctggagtgcagtagcgcgatcatggctcactgaggcctcgacctcctgggctcaagtgatcctcccgcctcagcctcacaggtagctgggactacaggtgtgcaccaccatgcctaatttctttctttttttttttttggtacagtgtctcactatgttgcccaggctgctcttgaactcctgggctcaaatgatcctcctgcctcggcctcccaaagtactggaattacaggcgtgagccaccacacccagccttcaaatatatatattcaaataatacatatctattttcaaataatatatatttttttaaagaagggatacggaaccaagaaaacagtgacattagaggcgtgggggtggcgcaggctgccggggcgtcgggagcactacccagaggaaggggctttctgtagggtctgacgcggcagtcctggagcagagcgaggggccagacgcagacccggggggtcctccgtggcgagggggtcctagggggttaggtccttgggttcagagagggtggtggggacgggacagcacggacgaccgcattctggggacccggccgcggaggggtccggccaaggcgggccctggtcaggcgcacacaagctcgcctcggcctccacgtccgtcccctacaacgcggccgaccgcgcggacgggcggtacgtgcacggcgctggacgaggaggctgcgcgcaagctcgcctcagcctctggagctgcgggccctgcacgccctcggcccatccccgcgagccggaggaacgagtgaccaccaccgccagccccgccggccgagtgtccctgcccagccagcctgcgtccgagcgcggcgctcctcgcggaacccgcccctgctctcgccccgccccgcgcggccccgcccccgtgtccctcggcccttacaggctggctccgaggccgcgcccggcgggtcagccaatgggagtgcggcgcgccccgcggcacgtgggctcctgcccgtcccggccgggtgcgagctggcggagctccttggcccggagcgcgcggggcgggggcgcgcggggcaggcgggacgcggggcggaacggaggcaggatgggggcggggcgctggcgacatggcgcgctgattggccggcgccgcgctccaaggctgttaacggcgtctgggccgggctacggctccaaaacaaagggcaggcggcccgcggggcggcggcgggaggatgcctcgcgccctgcctaggcgttaacggcctcagcgcgtcccgggccgcgccgggaacgcctgagagccgagcccgcgctgaccggggcccgggccggatgggcgctgcgggccggggcgcggaccgcggagcggccgtgagtacgggcgggcctggctgcagctgcgc

SEQ ID NO: 27958 - DNA, 2300 bp, Homo sapien
tcccagcactttgggaggctgaggcaggcggatcacgaggtcaggaaatcgagaccatcctggctaacacggtgaaaccccatctctactaaaaatacaaaaaattagccgggtgtggtggcgggcgcctgtagtcccagctactcaggaggctgaggcaggagaatggcatgaacccgggaggcggagcttgcagtgagccgagattgcaccactgcactccagcctgggcgacagagcgagactccgtctcaaaaaaaaaaaaaaaaaaaaaaaaaagaaatgatcattgtcagaaaagacgcttcattaagtagtgccagtgtttttgtttgcggtctgcaattgtcagatggtcggtccctatgttcacagtctcgggaggcttggagatatagtcagcaccctttgtgctggctgctctctctgtagtcatgcttagctcagttgttttgtgggtaagttacttaaacaggaaattgaagtatttctgtgactacttctgctctcactactgcaaaacctttctctttatagctctggacttattggacaaaatgttgacattcaacccacacaagaggattgaagtagaacaggctctggcccacccatatctggagcagtattacgacccgagtgacgaggtaagagctcatgttcctggctgctgcttcagggacatagatcagccagcagtggaccaaccatatcttgcttagattttcctgagatatacctgctgccatacccggttcttccaacaagcccacctttgccttgaggacgagtgctgtggggcacagcttgaaatccctccccccgtaactctgtctatctcagaagacttcctccaggccacctgcaacaggtaggggcggggtaaacgcatgtataaaggggacagctgcaccagtatggagcacagagggcatgggtctgagactggaggccattgtcatggtgtgacaggaagagacacctgaagtgaagtgctggccctgaggatggccggggtggagaggaggtgggcagcctgctgacagggacagcacacagagtggggagggaagtcaacttggacagtttccactgtggcttggcgactccatgtcgggtgtgctattccctagagacaaggacacgagagcctgttgtaagaagtgatgaggccagagtggatatggcagctcttcagagcaggcagggcattcaggtagaagatgctgcatgtcatgttctccccaagacagtcctagtgccttggctctctggtgtctctggggttcaattttaactttattctctggaggataacaaagaaaaatgcaatatgaaccaaaagtttggattgttgtagttgaggctcatatgcacagagaatagtctttaccctcctatttttgaaagaatcagctttcccttccacatccatctctctgcctccagcaacaagttaggcagcttgtgaaatacctacaacatagccagtaacacagaataggagagaatacaggtttggggctcttacaagcttagtgggctggagatttcccaagcttccgagtccaaatcagctggctggggtggtgggtgatgcgtgtaggacacctcctgtgatcccagatgcatagccctccttcgggctgagctatttattcttctggacatgagtccttctcccctttcagatggccaaagcttagtgcagagtttggggtctgtgcttcctccccctaaaggccccatgtgaggattacatgggtgagaggtgagattctaggcattcactgattgacagctggtattatcatcagcttagttctgtaacattgcattagttcacgggcatttaaaaatcaaaatgtggccaggcatggtggctcacacctgtagtcccagctattcagaaggctgaggtggaaagatctcttgagcccaggagatcgaggtttcagtgagctgtgatcacaccactgcactccagcttcggtgacagagcaaaactctttctctaaaaaataataatcagtttgtcactgagtgtgtatggggttctttgatctaaatagacagtttatattttacttaaatagctttctggagtatggttaaaaattaaaatgggggctgggcgcagtggctcacgcctgtaatcccagcactttgggaggccgaggcaggaggatcacttgaggtcaggagttcaagcccagcctggccaacatggggaaaccccgtctctactaaaaatacaaaaatagctgggcgtggtagtacatgtttgtaatcccagctac

SEQ ID NO: 27959 - DNA, 2300 bp, Homo sapien
aaagctggtcatcttgaagaacaccctctctggctacttctccctggagggtaatagagaagtggagacagtggcggcgtctaagtcagaacggagactgcaagaccaagccacaccaggacaaaggcacaccaacagctccctttacaactggcactgaacactggcatgccaatgctccttgtttagaatggctgtcacgtggccagtcagagaaagaacctgttgtgtgggattatttgtgatatagaattacagagaatcaacatggcattttcttctctgaaacatctgttacaccaaatccttctttataatggaatttatgttaatgagattttacttttataactaaactgaacaaatgtaggatatcaagaaaaactaaatgctttaaacaaattccatttccttatgaaaaaatctaatagcttatctgtactagtaataaaggatggaggaagaaaaagaagactataagctaattagacctgttctttcatttccactaagcctctcaggactatttctggttcctgggccctagatacaagatccaatgtctatttttattgcttttcttcaagtatctttacatgacagcagagggaactgtgtttaagaatcttataatcctgagatactagatacaggtagtatgtcaggcctacttaactactcaattttcacaccttattcatatattatttgcaaataacagaaaaatactgaatctcaatctccatagcagccctcaatttttgcctcctggctcataaacccaacaaaaaatgtcagacttcacttttctgggcttttgtaaacttattcaaccatttcttatgaccaagacacagaccttgctagtagagtgtggatgagacctggatgcactctctatagccactcacagatgcagaggaaagcacttcatttggaagcaggaaatcacgtaatttcaaaagaatccacggcagttcctactctgtccacatttatgttttcttcaagtacaacaaattacaatataattctgccgaagagacattcttcattatcagataaatttgacctttatagaatagccctggcccatgttcacagaaatacacattactgaataacctctacaacaaacccagcctgcacctaacagtgacagcgataggtaggacttcaggacagctgtccaaggagtgaaacacagaccacttatggtaacagtgactggagaggcacaccccctcctactctacaaccgtcagcactatatcagctgaggtagagaggctgagccctagggcccagaagttcaatgccgaacaaaatttagacagcaccttggggccaggtgtggtggctcatccctgtaatcccagcactttgcggggggcgtggggggtgctgaggtgggtggatcccttaagctcaggagttcaagaccagcctgggcaacatgcgacataggaagacgccctacttttacaaaaaaaatttaaaaattagccagatgtggccaggcacagtggctcacgcctgtaatcccagcactttgggaggctgaggtgggcggatcataaggtcaggagatagagaccatcccggctaacacggtgaaaccccgtctctactaaaaaatacaaaaaattagccgggcatggtggcgggagcctgtagtcccatctacttgggaggccgaggcaggagaatggtgtgaacccaggaggcggagcttgcagtgagctgagattgtgctactgcactctgcctgggcaacagagtgagactccatctcaaaaaaaaaaaaaaattagccaggtgtagcggtgcactctgtagtcccagcaactccggagactgaggtgaggagggtcacttgagcccaggaggttgagactggtaagccgtgatggtgccactgcactccagcctgggtgacagagtaacaccctgtctcaaaaaagacagcaccttgtctctggccagacaggcaaactctcaacgcagagggagacttacggcttactgcaatgcattcagaaagttctcttacttactggatttctttttatgcaaacttcatccttaccttggaattcaacataatttctggagccctgtaccaacgtgtggccacatattctgtcaggaaccctgtgtgatcatggtctggatctgcaacacgggccaggccaaagtcacagatctaagagagaaaaaaaacaggataacttcttagaaattctaacctttcatatcaaaacatcacaaaaataaaaaaggcaataggaataataatg

SEQ ID NO: 27960 - DNA, 2300 bp, Homo sapien
tcccgagtagctgggactacaggcacaccggcaggcccagctaattttttgtatcttagtagagacggggtttcaccatgttgcccaggctggtccccagtttctgagcttgggcaatctgccctcctccgcctcccaaagtgctgggattacaggcgtgagccaccgcgcccggccggttattgtggttttaatttcatggtactccatttatcttggcctgttttttaaaaaaatatgcaatgtcctcttttgagaataagaattaggtattttctttttattattattattatactttaagttttagggtacatgtgcacaatgtgctggttagttacatatgtatacatgtgccatgctggtgtgctgcacccattaactcaagaattaggtattttctaaaattgggtcctgcttcatgggctaaatatattttgaaggagtaaattttggctggagcagtttattccttttctcatgtgtcacatcctttttcccccacaggattttttgtttgtttgtttctctgttttagagacagggtattgctgtgttgcccaggctagtcttgaattcttgggcccaagttgggattacaggcgtgagccaccacaccagcttccaccagagagttaaacaaacaaacaaacaaaaaactttgtttattctcctttgagattgactaattaatctttgttgatgtctagaagtcaagagttgatggttttaaacttggaagagttgaacaaagaggatatagggtctgccgctcttccttctccctccaaacatggcaggggaaaaggttcagaagcagtgcctgggtcattgtccgtctcgttgtcttagctttccttggtatccacctgcttcaggactctaatttttattttttcaacctctgttgtttgtgactgtttcttaacctggtgtgtctctttttctctaaacctcgatgttttggttttagtgactctatctttgcatttctatttcattacctgctctgtcagcatttctgcctatctgtaccaatctcggtctgtctctgaacgcaaatgtatctctcatgtgtttcgacccaccaccccctaatcccttactctctgctttgtcctcctgcctcagcctcccaagtagctgggatgacaggcgcccaccactgcgcccggctaatttttgtatttttagtagagacagggtttcgccatgttggccaggctggtcttgaactcctgacctcgtgatccgcccgcctcggcctcccaaagtgctaggattacaggcgtgagccacctcgcccggacttaatttttgtatttttagtagagacctggtctcaaactcctgacctcaagtgatccgcccgcctcggcctcccaaagtgctgggatgataggcgtgagacaccgcgccctcccttctgctttgtacttcttcatcgtacttatcacaacttgagcattacacgtatttgtctgtctcctctctctaaaaggtaacttctataagggtggatccccaggaacatggagtgtgctcaacaaacatctgaactaacctgattggcgtatcctctcagtgtctccttttagtctcgacaattgtgtttcacactttctcagtatgcaaatatctttctcggtctgggtcatgcctttcggtttctgccccagtgcagaggcctctaagtttatcagcgtgtggaccacagattcgcagaggcctgagctgcggcgctgccgggatatggcgcgtcgtcgggcctcaagcacagcccggggtccctcgctggctctgttcggaccctgctcggtcgctcgcctgggccccagccatctctcacttcagcccatgagttctgccccacgtctgtctccctgggtgtcttaagagacgcgacccgcaccgacgcccccgcgaatgcaccgcgaatgcacgtgaccgcgcctagtggcgccccctcagtcaacgccgtcgcagtgcccctcccgaagcccgccgcttccgccggcccgcgcggccccgcccccagccgcgaggaaccaatccgcatgcacacttcttgtccccgccccggcaccctcctcggcgcgcgcccctccctccgcccgcccgccggcccgcccgtcagtctggcaggcaggcaggcaatcggtccgagtggctgtcggctcttcagctctcccgctcggcgtcttccttcctcctcccggtcagcgtcggcggctgcaccggcggcggcgcagtccctgcgggaggggcgacaagagctgagcggcggccgccgagcgtcg

SEQ ID NO: 27961 - DNA, 2300 bp, Homo sapien
aaattagcagagccaggctttgcatctcaatagaaaaccatgcaatctctgcagctgcaaggaccccagtgaaaagcaggcaagcctccactcctggcctctcacctcagccccaggaagtgacaaaggcctctgagctcaaggcagcctcagagtagaaaagggattctctgaagcaggcgtaactgctttattgaggctgggcacagtggctcacgcctgtaatcccggcactttgggaggcagaggccggcggatcacttcaggttaggaattcgagaccagcctggccaacatggtgaaacctcgtctctactaaaaatacaaaaattggccaggcgcggtggctcatgcctgtaatcccagcactttgggaggctgaggtgggtggatcacttgaggtcaggagtttgagaccagcctggccaacatggtgaaaccctgcctctactaaaaattaaaaaaaaaaattagccaggtatggtggcacgcgcctatagtcccagctacttgggaggctgaggcatgagaatcacttgagcccaggagatggaagttgcagtgagctgagactgtgccactgcactccagcctgggtgacagagcaagattttgcctctaaataaataaatagccaggcgcagtgactcacgcctgtaatcctagcactttgggaggccaaggcaggcagattgcctgagctcaggagttcaagaccagcctgggaaagaaacatggcaaaaccccgtctctactaaaaacacaaaaaattagccaggcgtggtgctgtacgcctgtaatcttagctacttgggaggctgaggcaggagaatcacttgaacccgggaggcggaggttgcactgagccgagattgtgccactgcagcccagcctgaatgacagagcaagactctgtctctaaataaataaataaataaataaataaacatctttattgagatacaattgacaggtagtaagtggtgcatatttgaagtccacaatttggcaagttttggcttatacacatatacacctgtggattcctcaccacagtaacggaagtattcatcacccccggaagcttcatcctgccccgtgtcatcctctgcccttccctacctcctctcaactctcatgggccctctctccctgcagcggctgcagagcggcaccacaggtgtgtgtgcgctcattgcaggagcgaccctgcacgtcgcctggctcggggattcccaggtcattttggtacagcagggacaggtggtgaagctgatggagccacacagaccagaacggcaggtaaggggatccctgcgcccaggcccaggatattcctggcctccatcatgctgggcccataggggaaccccacccagcctgggaacttcaggtagtagtaatcctggcacctttcaagagggagggctccctgcctgatttgagtggccgggggtcccacgtgagcccttcctgagagctctgtgggtcacagctatatggagcccagagctccgggggagagcagagccctctgcactgacaggcatcccagtgcagtcagtgcagcccagtgcagaccagagcccatcatacacacggacaaggaggccacaggctgtgggtgaggaaggcctcagggaggtgatgctgccccgaggctggagggaacctggcttggggctgtactgactagaggctgcctgggaccctggcactcaggtcatcacctggacatgaggatgacagtcccactcagacctcttctcagaagactgtctcatccatgtgtctcctgaggttggattgcgagcattcagatatcatggaatgactgtttatccctcaaaccccacttttcccacgtgctgttctccaccagctatgtttgattaaccatgcacatggtggataattctacgtcagcacataggagcacccatcctttcttggggctgcggacattgcattcatcatgcagtcccttgtgggtgagcatgaagatcttttcagtctttcggtgctaaaaacaatgcatctctacctactttgtgcagcattaattgctcagagtcaagtgtacctatatctgtaggacacatccccagaagtgggatggctaggttggaactgatgcacgtacagtctgggtagatttgccaagcttcccacctcaggccatgccagcctgggctggcactacattcccaagaaggtccatttccccacagtctcaccaggctgcaggattcttcctgtcaggtaagaagcctgtcttggggcaattgttaagtttgctt

SEQ ID NO: 27962 - DNA, 2300 bp, Homo sapien
attttaatagagtttataagcatgtaaaatgcttctgtcatgatactaagtgaaaaaagaaggaaaattacatatgcagtttaactacaagtccatgaaaaaccaccagggccagaaaaaaaaaaaggcgggaacagcacacaaccaaggtgtcagagtgggcctgcacgtggcagttccacggacagctttttcctgaagtacactttcttaatacttccccagtttttcattacaagtgttagtctcgtgtgacagtggctttaaagcatgtccacaaattctttgacttccccttttgcgaggtggagctcacttcccactgctgagtgtgggagctggctgcttctgatgaagagtggcagtgactgcgtgtgcttcaggtgttacgaaacaaagaggccctgcgcctcccgccttgtgtattctcactctcttcctccctccctctcatcgctcaatctgagctgtgaggatgctcaagcagcgccacggagagtccacatgggacgggaccagggcctcctgtcagtggccgtgtgttgaaaccaccgtggaagcaggccctccagcccagccagcaaccatgtcaccacaacccagtaagagaccctggaccagaaccagctaagctgctcccagattccagacccacagaaactgggagaataaatgtctgttgttttaagccactacatttggggcaatttgttatgtagcaacaaataatataagccacaatactcatttgaaaagaaaaaatacccaaatcctacctaagcttggcttctcaagaaaagatcaaccagtaacaggcccaaaggaaaccatgggggctctggcttcagggactcatgtcacttcaatgcacaaactctcctggaactcctgccagcccaggtgcatgtggcaagcatggtgaatcagggccagtcagccgagggcaggagttgagtgtcacaggccacacccaaaggacatggggaactgagaggaggaaagagctcctgcctaaaggcggaggctgtggaagaaaaggagaagggctgaggccagagggggccaccgaggaagaaccatgaacgcgagggcttatgcacgcaggaggtcacagaaagacaggttcttgggaatccatgcatcaaggcaggggtgggggcatccagagccagctgctgccgccatggccaacacaggggcctattcaagcatttggcaagaactggggactggcaaggctatgggtgaaggaggggcctgagaactcattcaggcaggcccagctcagggaaggcagctccacacaagtttggccagtggatcccctgcaaaccagcaggaaacccccctcgtcctgccagtccttgtagcgctgcctcctcttcctctcgtctgagggccactgtgcccagaaaactgcccctaaatgccatggactcctcctcactccctctggaaactgtgggctcctggtgcttaccaggcctgagctcgggctgggggagactccggccgccgctgtggctcacggtctcgccccgggtgctactgctatttccaacagccgcttagcctagactctgctcaggaaaggccagcggctgaggcagtgctgcccagcccacggactccccatgccaagggctgcagccccgcaacctcgcttctggattcttcgctgatccagtcaccggggaggggctgactggcagccacacagaggtttcagccactcgctgctcttcagtggcaattcttataatacaatccccactctgacgcaattttgtaagaatggcttggagtccaaaaacttgactacattctacttccgtgacagggagagcatgatcaaggccgctaggcaggcctgcatgcgaggcactctgacagacggggaagcaagggcaggcgagacttccttctagctgcgccctccctccttcccaggcctgcaggagccccgagcgtaggactgggctggtgccggcgcagcaacgctccttctcaccggcaggtggcgctgtctcccgcgtggacggacagagacccatcaggcggggagggcctgggcggtggcggcgcccccttggtggggccgcagagcggaggagcagcagctgccaccggccggaagcctgctggctcggccgagaacaatggccgcctgtcactgtggacagctgtctcccaggctaaggcaaggctgcgctcccagggaatgcgggcagggagccagggcggagggcagaggacgagagcgaggaggagagcgcgggcacccactgatgctggcggcc

SEQ ID NO: 27963 - DNA, 2300 bp, Homo sapien
aacaacagaagtgtgcttcatggtgctggaggctgtcatctgagatcaggatattgacagaactggctccttctggtggtttgtgggcaacccttggcattccctggcttgtaggttcatcccccaggtctctgcctcatgttcccctggcattctctctgtgtgtgtgtgtctgtgtccaaattcctcccccaacctgttttttttttttggagacagcatcttgctctgtcgcctaggctggagtgcagtggcacaatcttggctcactgcaacctccacctcccaggttcaagcaattcttctgcctcagcctcctgagtagctggaactacaggcatgcgccaccacacccggctaatttttgtatttttagtagagatgaggttttaccatgttggccaggctggtctcaaactcctgacctcgtgatctacctgccttggcctcccaaagtactgggattacagatgtgagccaccgcacccggcccaaattccctttttcatagagacatcagtcattggagtaggggcccagcctgctccagcatgacgtcatcttaactaattccatctgtaatgaccctgtttccaaatgagctccattctgaggtactgggggttagggcctcagtgtatgaatttaggggggacacaattcaacccagaacactccccaccccccagggtccccagctggcatgggtgattcctctgccctcctgtggccaggagccatcatcagcatggatgtcaggcagtttacttgcccatcaacagccccctcccaactagccgcaggctcaagtatggtccagctccccaccagatggttgtgcgtctgcctttgctgtcctgtgaccttcctgtcccagctccctgaggacaggggccgccctgctggccgtgacccctcagcatgtgggctgacagttggggaaggggggctaggtgtggtctcctgctgggggctgcccctcacttccccctcctcatccctaggaaggccccgccaccacttgctgctgctctggcccacgaagcagtttcacagctgctacagacagacctttccgaattcaggaagttgcccagggaggaagaagaagaggaggaggacgatgacgaggaggaaaaggcccctgtgacctgtgagttctgtttcttctgaggtggccccagggctgcttagcaggcaacaaagggtgacgacattgtgggaagcccattgattggggtccctaagggtgctggggccctcgctcacaacggcagcagaatcaaggagcagagaaggcttgcggccccagtgaggtggagggtggcggtcacagccctccacaggtcatatagttcccagtcagcccacgaggcaggggtgggtggtgcagacaccctcctgtgtcctgtctgactgaagttccagaacagcccaggaaattaaagatgcttatcccgtttcacagaggatctcacaggtgatcgatctctggtcatgcagccaggttcaagtgccctcagtgttgtaactcagttaacatgcgcccgggcaggcgaagtcagggttggccaggtggcatgccagcaggtctcggggcagcagcgtggtcccctcaacgctcgggccccctgcctcagctgcccccaagtcaggattctgttgggtggagacgctctacggtgtccatgagccccatggttagatgctggtggaagcttgtctgtcagcctgctcctgggacagccataagcatggtgtggccaggggaacccagaaatggagagggctgcagatccatttcacagaggatataatcattaaaaagcagggcttttatttcatgtgactttctttcattctcctagtaatttcattttattatatttcgccaaagtgttggttgatgttagaccagaaatacagggcgtaagaatcgcaggctgcagcaggggtgccacaagggggtagcaacgtcccacccagctgaatagttgtccctggacaggccagcaggcagcagagttgcagtggattttcccttccttgccatttcctgtcggccatttcctttcccttcctttgccatttcctttcctttccctgttgttctaaattcggcattactagtgcatgcgtgcatccggggaaaaggaacaaggtgggagaagagagagaaagcgaatacccgaggccgccagcatcagtgggtgcccgcgctctcctcctcgctctcgtcctctgccctccgccctggctccctgcccgcattccctgggagcgcagccttgccttagcct

SEQ ID NO: 27964 - DNA, 2300 bp, Homo sapien
gtactgcggttctcaaacttcaccctacagccattctgttgtaggtgatctcaggggcagtttgagaaacagtggctcagggtctcacagcagccctctgagataggttggttgctattgtcccgattttttctcatcaagaaactgaggctcaggtgagctaaggaatgtgcccagggccactgtttataagaagtagcctcaagccttgctcatggttactgccctgacagggatctaggaaagagtgagcaggagaatgggatgaggcaggaccctccgccccagccctgctttctctgcccagacacctcctgccttgcagacccaaccccaccccagatggtttcctttccagtcacccagctgctagttctccaggttcctggtctcactccaggttcctcctgttagagaagcatcccagagacattcattcctggcaaggacacaggcctgcggacctgaaggtcaggtgggcagagccacataagatctggtgccccatcctccatttaaaaaattatactttccaacggcattggtataaaggtgaatatattaatatcatatattaaaacattttctttgacataaaggtttctttcttctgcctttaaaataaaatattttggccaggtgtaatggttcacacctataatcccagcacttgggaaggctgaggcaggaggatcacttgagcccaagagttcaagaccagcctgggcaacatagagaccctgtctctacaaattttttttaatcagctgggcgtggtggtgcttgcctgtgttcccagacactaggaaggctgaggcaggaggggagggtcacttgagcccaggagtttgaggctgcagtgagctgtgatcatgccactgcactccagtgtgggcaccagagaaggagcttgtctctaaaaagagagaaaaagaatattttcaagagcctctgtgttggcagaaaaatggcccttcagagatgttcatgtcctatacctgtgcctgtgttagattacatggcagacccggcatagtggctcacgcctgtactgtaatcccagcactttgggaggccgaggcaggcagatcatttgaggtcaggagtttgagaccagcctgaccaacatggtgaaaccccatctctactaaaaatacaaaaaaaattagccgggcatggtggtgcgtgcctgcagtcccagctactcgggaggctgaggcaggaaaatcgcttgaaccagggaggcagaggttgcagtgagtcgaggtcatgccactgcagtacagcctgggtgacagggtgagactccgtgtcaaaaaaaaataataataataataaggggcaaaggggaattaaggttgctaatcaactgatttagagagatgatgctggactatctgggtgggcccaatggcatcaggagggtctttagaagtagcagaaggaagcagaggagggaaccagaggtggcagtgtgagaaaggctcaactggccattgctggcttcgaggctgtaggaaggggccacgagccaaggtatgcagggagcccttaggagctggaaaaggcaggggaacagtttctcccctagaatcctcagaaaggaacgcattctggcgatccctggatcttcgcccactgaggctaagtggacttctgacctccagaacggaaagataacaaaagcctcaacgtttgtggaaacaaacaactcataatgagcctgggactgtgcctccttcccggacggatgagcctgcctgggcagtctgggtttgcatccctgctctgtcacttaccagctattgacggcagaagttgcttaatttctgggcgctgtgacctagggattgctttccccatccagccgcccacccaaagctgcagaagagaagcaagaggctggtgactggggcggctccggagcccaggtggagccgcagttcgcctaccactaaagggccgcagtcaccgtccacgtagccgccagggggcagcagaggtccggccccgccagcctggaggcccgactgcgcctgcgcggcgcccgcggcgcccgcggcggccagggacgggaagtgggcggggccggccggcagcagcttgcgggacacggagccgcgaggagacagctgaggcccgcggagaccaggggtgaggaggccgggggggacgggattagagggctgacggggctgggacgagggtcaggcgagcgcccaaggcgcacaggggtgaaatgggaccgaggaaccggaggggtggaatcagagggctggggaggcaaggaggccgagacg

SEQ ID NO: 27965 - DNA, 2300 bp, Homo sapien
gggttttactgtattgcccaggctggtctcaaactcctgagctcaagcaatctgcccaccttggcttcccaaagtgctgggattacacatgtgagccactgcgcccaggctaaacaaaaatttatttatttttttgtttgtttgttttttgagacagagtcttactctgtcatccaggctggagtgcagtggcacaatctcagctcactgcaacctctgcctcctgggttcaagtgattctcatgcctcagcctcccaactagctgggattacaggctcctgccaccactcccggctaatttttatacttttagtagagacggggtttcaccatgttggccaggctggtctcgaactcctgacctcaggtgatccgcccacctcagcttcccaaaatgctgggattacaggtatgagccactgtgcctgtccaaacattttgttttaattagctgggtgtggtggtgtgagcctgtagtcccagttacttgggaggctgaggtgggaggatcacttgagcccaggagttcaaggctgcaatgatctgtgaatccccattaatgcactcctgctgggcaatacagcaagaccctgtctctacaaaaacaaaagagacctaaagaaaattgtttatttagctgacagagatcacatatgccctgcttgataaagtgtgtttgtctgtgctctgggggtcctgaggagagtgtgcagtagatggaatagaatagaaggctccctggcctgagacagtagaaacctctgtctcctctctcactggctctgtcacccatgtacacacatgaatcctccctaaggctatgcccactctgctcccactggcttctaagtggggacaccacctgatgccacctccttcatgcaccacccctggccttgggctggactcacatgggtggccataatagtgtcttgagtgaatcagtgaccaaaatatctttccactccctccaggtttcagactaaatatttccaggggaaatacggtgatttagacagctctctcatctcctttgggccgtgtcagactccaaccctgggattctgtgtggagagacatgataaaatccagtccttcaaaccagagacctactgggtgctgcaggccaaggttccttgcctttctctattcatgctggggctttctgggtttggggcatggattctgagagtcttccatcatcatcagccggcaggccccgggctgagggcagaagtgtggacggctgtacctggaagtggtctgtggtgcctagggctgagggaccccagccttcatgggggcagtgggaagagactgggcctgtatatgctgaatctggataagtgggaatgagttcagctctggcagtgcagggtgaggtcaccccacaggaatcagtggcttcagtggtcaggtccaagcactggactgagaccattggctttcaaactttttaaaattcctagaaccctttcttcaaataaaagcctccacagaagctcactgtaagacttaatacagctaggcacagtgactgatgtctgtaatcccaacaacctgggaggctgaggcaagaggattgcttgaggccaggagtccaaggctacagtgagctacgatcgtgccactgcactccagcctagcaacacagtgagacactgtcttggagctgctgtggctgacacggggcttgggaccctggcggtggccatacctaccactggccaggcactggggataggcaggggtggtgtgagaagtaggggctcaggtgcttcttagggacacatcagcctcagctttgggccaccttcctgagactggctgcctggttttggggcaagtggtggagagggccagatgtcagcttgcgtatctgcccacctgaacaggtacagctgtgagccattacagccagggctatttggctcccagacaaggaccagcttcatctgtcctggttcttcctggcgttgggctcacctggagactttttcttgtgcgttcaccctttatcctttttcctgcaggttaacactgacaaagacagatctctccttttggactgggaccgagtaagagtgtttgaccgggagatcgcacagatgtttttaaacatgacaaagctggagaaggaagcccaggtgtgcctgctccacccacatctatcacagttgccttgggtgagggtggcccttggatgcctcccgctggaggaacagcctgtgatcctagtccacgtctttctccccctttctgaaacacagacatctttttggaaagctgaatggttact

SEQ ID NO: 27966 - DNA, 2300 bp, Homo sapien
cctggctggtatgtggagaacacactgcagggcggcaaggtggagacctggagggagaggaggagctcggatcagggtggtggcagggaggcagggagacttgaggggatctccgatatacagtcttcgatttaggacaatttccacctacaggatttttcaactacaaaaccagtatgcattctgcacgcttcttgactcatgatggggctacatctgggtaagcccatagtaagttgaaaataccataagtcaaaaacgtactttcgagtcacaatattttcaacttaagatgggtttatgtggatgtagttccatctgaagttgaggagcatctgtattgtaaagacagtaatggcaggatttgtgggtggtccaggatgctcccaggctctgtccctgagcaaccaggaagatggagttgccattttggagacgaagaacctaccaaggtgtgggtttggaatcaggagttctgctttgaaagtgaagtctcaccgtgactcataatttgtgacatttccaaaccttaatttgcctatagaacttttctttttccagagcctctatccagactacttattatttatcaaaataaattagataaataaataacttaattttagaattcatcttccagatatactttacacagatcattccaataaaggcaggttggggcccgggacagtggctcacccctgtaatcccagcactttgggaggccgaggcaggaggatcacttgaggccaggagtttgagaccaatctgggcaacatagtgagaccctccccctagaccccatctctaccaaaaaaaaaaaaattaattggctgggcttggtggctggcacctgtggtcccagctactggggaggctgaggtgagagcatcgcctgacgccaggagatcgaggctgcagtgagctgtgatctcgctactgcgctccagcctgggtgacagagtgaaaccctgtctttaaaaaaaaaaaaaaaaaacagcaggttgggaaaatctacaaggaacaagggcaatgtgtgtatgttatttaaaataagatcataaaacgtattttaaaccttccataatcctaatgctctaacaaataaattagttggccgagcgtgaagagtcacacctgtaatcccagcattttgggaggccgagggaggcggaccacctaaggtcaggagttcaagactagcctggttaacacggtgaaacccccgtctctactaaaaatatagaaatctttgggaggccaaggcgggcggatcacgaggtcaggagatcgagaccatcctggctaacacggtgaagccccgtctctactaaaaaaatacaaaaaattagcccgcgtggtggcaagcgcctatagtcccagctacttgggaggctgaggcgagatcatcgcttgaacccgggaggcggaggttgcagtgagccgagattgcgccactgcacttcagcctgggcaacagagtgagactccgcctcaaaaaaaaaaaaaaaaaaaatatatatatatgtatacacacacatatatatacatacacatataaattagctgggcgtggtggcgcacgcctgtaatcccagctatttaggaggctgaggcaggcgaattgcttgaacctgggaggcggaggtttcagtgagccgagatcacaccactgcactccagcctgggcgacaagagtaaaactctgtctcaaaataaataaataaataaataaataaataacttaattttagaattcatcttccaaatatattttacacagatcattcattcattccacagatttttttacagcatcgaaaagaagcctgctatacacacatcggtacatttttattattttaattattaacagcataaatgttttcatgccagttttcataatcattgtaatgataattgtcatgattgtctctccgtggcggggaagaatctgggtgcagggcttggggatccctgcggtccgcggcgtgcaagtgccactccctggggtgctcccggaatccgcgagccacggaacctaagaacgccgacccgccggagccggagggcagacgctggcacaccggacgcggggacgccagaagcggctggacccggaaataggggttgtcggtagccgccccgggaacaaggaccggagctggatccgcggtgcggctgtgggtgagcggcgggctgcgggaccctcgcccggcggctcagaaaggcgggaagcgcacgcatttttctggcttgtttcctgaacgttggccggcggaggacccgcgagctcggga

SEQ ID NO: 27967 - DNA, 2300 bp, Homo sapien
agtatggataattcatgggtaaaaaatgtaatacttgaaaaacaaattagatgttttcttattatttccacatagcagagtactaactgtaggacattgggatgtacttttgaataagaaatgaaggtttaaaaaaagataaaataaaacaaaataagtgcctaaaactgactggtgaggggtttacccaatgcatgagcagtagaaagaatttaattttttgcatccaggatactaaaaagtggaaagatagatttcttttttttcctgttttacttcttttgggttgctctatttgatctaattaaaaagcctattactcctatgctatgctgatggaagagaagtcttctctaacttagtcccagtgagattgcctcctctgggccaacaatgctcatctagaacttggaatttcgataaatccattctgaggtgatgagcagcagcagcaccagaaaagttgatccaggccatctaggaccctccagggaagggctcaggcctgtcaaagaggcctgatagaaactggggcctgcagtcagtcagggacattgaagctctcctgacacggtcccaccagctgggaaaacactcggggtctccctcgggtttgatcagatggcaagttccccattccctgattggcccaaagctttgacctgttggacccggggcctatcaaaggccaggtgtcctctccccattggaaacctccctaggctcaactcttctcttctcattctcctgctggcctgggagcatccaggccaaggggtgaggtggggacagccctacattaagtttttatttcaaggtagaaaatctgtccccttgattgtttgggaaactataaaaagactagggcagctcagggtctaaaatacagcttcagggagtacagagttagagtgcagaaacttcaattccatttactctctagcaatttacctaatatcaaaacatacagttatgttatgtttacaaatatgcacgcacctctattaatatgtgttcataagtacatacacatgcaccattacgtttacacatacatgcatgtaacaccaactgatgtaaaaatcattgttttatgtactcagttttcctttgagtttaccctcttttctctactttttaaaatatttatttctaatttggggagctactaactgagattatttttcatctcactgaaaaacagttttagaatttcctgtagagcagttctgctggtggcaaattccatcgggttttgtctgaaaagtagccattttctcctattttttctgtttattatatagaaagataacttatataaagtaaaattcacaggtcttaattatacagtttgatggtttttacaaatgcagatgctcatgtagccaacagtccgatccattctcacaacatctccattactgcagaatggagacattctgttccagtcaatgtaaattatcccattacacctaccaaatagaacgtgtatgagagacacctttctcctgaggacttttgcaaagtggggtggatcatgtgtcccgctcccactgaaaagggctaaatggaaaactaaagtctgaaataaaataggaggctgccctgacgaggggtcccactttgcccttggacagagaacaggccgtggtcaaggccctggtccgggcagaagcctctgtcaggacccactggcatctggtcacagacacgatggacctgggcctaggcagaagggggtgctgttggtctgctgctgagggctctgtgggtttctcagctgggaaaccaaacacttgaacttggtctccacgcagggttcactggggccagcagctgggctctctctgcacccttggagagcctcaggccaggcccagcccaggtaacccctcccagaaatgtcaccccaccactgggactgacactcaggcacacggagtgatttggttgggcagaggaagaggagcacatttgcatgaagggcccctctctctcctctgggactacagggtgggtaagaaatacctgcaactgtcagcctcagcagagctctggggagtctgcaccatggcttggaccccactcctcttcctcaccctcctcctccactgcacaggtcaggatggccctcagcaccctgacctccagctcactgataccacctcccaaacttatgccaggaatgtccttccctcttttcttgactccagccggtaatgggtgtctgtgttttcagggtctctctcccagcttgtgctgactcaatcgccctctgcctctgcctccctgggagcctc

SEQ ID NO: 27968 - DNA, 2300 bp, Homo sapien
gctacctatgggggccacagaagagacataaaaacctttttaagtgagaaagtcctcattaaattattgaaggttttatgcaattctttgtgcaatatatatttataaagaacatactaacatcagcttggtgccaaataacaatgtcatctgaagagccgggagggaaccccacactctggtgtgctcacttcagtggttctgttagggatgaggatggtgagcctgcttttagctttcctgtttcccagggttttcccctgggagatggcgtcaacaccacctgctactactaacacaagtagtcagccagcaggctcctctctgctggctacttcacactttcccctctagcctctggcacctctttccacatattccttctattgtccctgatttatcttgtcaatgacatcagaagataactcaacaagcttttctacccactctgagcttttcgagtgttgaaggtgaggggccacaatttaatcaactctaggtattcacatttcctttgttttattttattttattttattttaggctgagcctcactctgtcacccaggccaaagtgcaatagtgtgatcttggctcactgcaacctccgcctcctgggttcaagtgattctcctcccttagcctcctgagtagctgggactacaagcatgcaccaccacacctggctaatttttgtatatttagtagagatggggtttctccatgttggccaggctggtgtcgagctcctgacctcaggtgatccgcccacctcggcctcccaaagtgctgggattacagggttgagccaccatgcccggcccacatttcctttatattgcacctggcattcacaattatgtcctctaatcttttacctattagattgctctcaaatacttgtattttatttcattgattaatcttctccttacagaacaattttccacttactatgcttataggatgcattaggtattaacttcacagtaagaatcagagtttcttaagaagtgtaacttttctaataaagtatattttaattgttggtaaaagtctaaaatctcacatgccaaataaacaaataggggtctctgcaaagagaaaaaggccctttgatcaatgtgtttctatgttgtggttgtatgggggtcatctaaatgatgggtgaagatggggttggggttgctactcacttcattggaggagcgggcagaaacctgcctctgcattgcagttgcataggacacagtgctctctcctgggttgtatattaacaagtcaatgtccctggagccatgtggggggcaaagatgtggggggctttggtccgccattagaaatgtggtgctgtcacacatgcatttttatctcgatggaaaactatctttaaaccagatattttccccaaaatatcaaaaatcattttcaactacaagctaacgctcccacttcatttgttctttccagatactgcctgaggtatgtcagaggataaggaaagggcacaacaagagcacacacatgggatcattgtcttgtgtgggtgttgggggcaaacagggacgtggggcccaggaagcctcaactaagtgtgaggaacaagtctgggtctgtagaaggaataaagagagctctgtgacagagggaaaggggattctaatgagaggacaggcatgggcccaggtcataagaaggtgggataagcttgaggtgaccctgctgaacacacactcaaaggcagaccaccggaacctctgagcatttagtccagcatctccaaataaaagagaaggaaaatctgggaaaataaatatttccttagtttacccttgcattcatttttactactgattaatgcatgtgtatgttcatgtaagtatctagccacaaatatattcacaacaatgtttcctataaatattcattaatactgcagatttagttattttaacttatgatattatttttaatagttttgaatagcacacactttgtcacgtggaaaccagcccttgtcatttttggtttagtttaaacagtgctctatgacgcccccgcataccgagtgaagctaggggagctcctgagttttcgtctcacttcccctgaggcgctgtgtgagcactgaggctgctgtcccaggctgagcagtaataggcaggcttgtccttggtctggaggccagagatggtcagagatgccatgttcctaaccgggagccagggaatctctctgagatccctgagagttggctgtttttcctgttgatcaggtgtttgggggcatggccctggtgct

SEQ ID NO: 27969 - DNA, 2300 bp, Homo sapien
gaataaaactcaatattgcctgtattctgtaaacaataactatttacaaaactgactgtaaattatgattttaaaaaccacagcttatgaagaagagaaacctcaaacaatgacacccctgaattgcaaatctaagacatggcacacatttattttcagttccatatgtggcctggatttatttacaagacaatattatgatattatatgtcactattccattttagatggtgtatttaaaatctcacagtactgcaactacctagtaatctactcatcagtataaacatcaatgtgacaatcctgctatccttctctacccctgcataaccccagcaaaaattcattatgaattcacagaatgtaatatcagaactgttgtagccacatacacagtttgtttcattttatgttttgataaagtaatcttttttgtttaagcttattgttttttaaaaaatatattacatactagatgtcattacaaatcagagattaataatttctcttatgcttatactactcccacagcactcattactgaatgtaaaccatatttatattttctttctttttttttttttgagacagggactcactctatcacccaggctggagtgcagtcgcacaatctcggctcattgtaacctccacctcccaagtttaattgattctcctgcctcagcattctgagtagctggcattacaggcacccgccaccatgcccagctaatttttgtatttttagtagcgatggggtttcaccatgttggccaggctggtctcgaactcctgacctcaagtgatctgcctgcctcagcctcccaaagtgctgagattacaggcttgagccacctgcctggctccatatttatattttctaaacatcctacttggagtggctgatcctaccagctaccatgtttccacctcacctgggatcaaacactgacaattggtaattttatctcttgcagtcttcaaatattgagcaaatttgccatttttgctattcaataaaaatgctggaaagttatttgccatgccactgactctgttcagtgcttggaggacagactcctaggagtgagaagttgaccacagcatctgaatagctattaccccaagtctgtggaaattagagaacaaaattttaccagaaatgccccccagagcttctccccataacctcaccacccttagagaagagagctcctgttctcctcagcgctgcagggtccacagaggaggaagagctctggccagcagggaggagccacagaagaaaggacctggtgtctcccgtgaccagggtagtgagtcatgggaaccagtcactgctctggacttgacctgacctaagaggacttggtatagagtcaccacttcagtcctcaccaaggaacatccaaaaagccctggacagattcacccttaaggagaccagtaaagcatgaactgccctgagttaatgagaaggtcacaaaaagggtctgtctggcctggtgctgagcctgggggcagtgatcagagcagggggaatgcacagctggctctggggacatctggtcatcatgtcacaggagagtgtgtctggatgtggacacctggggacatgaagggctcattaccaagtgatctaggggagatcagagctgcgatcagctaactgcctgcatggtgccctctgctcagtgatcacagtggtgagctcctgatgccccggaacacacagtttcacccttgcctgtatccctgatatccacgagaggggcctgacccaaggccagcgtgtcatcagaaggctggggggctctaatttgcatggatggaccctcattctcagagaatgaagaggggaagggagagatttggggaagctctgtctcagctgtgggcacagaaggaaggcaggactcaggacaatctccagcatggtctggtttcctctcctcctcactctccttgcacactgcacaggtgactagatataaggccatggctaaagccctaggaagcccatgggccctgctttctccttttgtctctcaacccagaatcaccatgactgtttctctcccacttccaggatcctgggctcagtctgtgctgactcagccaccctcagtgtcttgggccacaaggcagaggctcactgtctcctgcactggaagcagctccaacactgggactggctataacgtaaactgttggcagtagctcccaagaactgaccccaaactcctcaggcatggtgataagaattgggcctcctgggtatctgaccaattctctggttc

SEQ ID NO: 27970 - DNA, 2300 bp, Homo sapien
aattaacctgtgtgtgtactctttcatctataataaaagtagaaactattacacacacacacacacacacacacacacacacgaagaagcttaagagctacataaacaaaaaaataagtaaaatctatagttatccaaacaatccctcactggcaaacacacagaaacactaacctatggacaaaatgagaaagccaaaaatgcagcccaaaattacatatggtgaatgcatttttcaagagaacaccaaatatcacaacagtgaagagagaagtctgctaattgtctttgagtaaaatgaatttctacctgcaaaacactgaaatggatcctcatgttacataagacaaaaaaatcaatgcaaaatacagtaaagatctccacccaaaactgaaaacacagggtgttttcacaccctagaagaaaacacagggtgagcgtttacttcagtgaaactttaatctatgtacacagattgccaaaaggaaagaaaacaaaagggaaaagtaggaggaagaaacccacagacaatgcgatcttttttcctttttttttgtgacgggacaccaaagtcaccacatgcacatgcaaatagaaacacgcaggactatggaaagctttagagatgttccacaggaatgaaaccaatgaaccgaaagagaaggtgtcctacagatttggagacagatctgaaaaactgtatctctgaaagcggttgttatctaacatgtccaagaaactaacaccactgtgtttggaagcaacaacaacaacaaaaaagacaaaacaaaacaaaaacacaacaacacatatgctgaagcaaaactgggcaaaggcccttaatagacatttctgaaaagatgacatgaattgactaatgagtcaaaaagaagttgctcaactttatcatttctcccgcaaaggtaagtccaaaccacagattctctgggattctggagaatgtgaattctgactcagtaggtctggagtgagcctgagattctgcgtttctaaaaggttcatttccccacaaatccacattatgtgtattaatattaccaagtaaataagaaaggtcaaaaataaaatggcaagccattagtagataaccttagtcttcctcctcatcctcctcctccactgcatgggttaggatggtccccagcatcctgatcccccaggtcactgacatcagctcccaaactcatgccaggaatgtccttccctcttcttccttcaggccataatgggtatctatttttccagcatctttctcccaatctgtgctgatttagccaccctctgtatctgcctccctgggacaaagggtcaaactcaccagcactctgagcaagagctacagcagctgccacatagactatccccagcagagctcagtgatggacaccaggttcacaatgccagtgggcagtggtgctgtttactgcatccagtggggatggagtggttgtccaggcacagacagatggacaatcacacagcaggaacaaatgtacattctgaaatttaacaaagacagaataagggactcttggggaatagaggtctcaattgcagacatagtgagtgcctcaaaaattagagaactggggccatctctgtcatggcccggattcctctctccttcatcctcctcagtcatcaaagagattccattagggggcaatcaaaggatgctggggcctgctactagctcccaaaaaacaccacaagcatttcagcagggagaaaagaaaatgctcacaaggatggggttagatttagttataaaccagattgtgtggcaggagggaggacatatcccccatcctttggccactccaaaattgggagagctaatctggggaaaggcaccaacacctattcattagtgtctcggtcctgtgtgatcatgggtctgtgtgagttctcagcagctgcctctctcaaggtctccccacaggacagcagggtgaaacctggggcaggaagagaggggaagctgatttgcataaagaactttttttatcctattgggtctggggaggcatgaaaaggccctgaggaaaacaaaccccagctgggaagcctgagaacacttagccttcatgagtgtccccaccatggcctggatgatgcttctcctcggactccttgcttatggatcaggtcaggggaagggactctatccctgggggaccacagaaaacagggtccaggttactctcatcctcatgatcataactgtgtctctcctgttcgttttaggagtggattctcagactgtggtgacccaggag

SEQ ID NO: 27971 - DNA, 2300 bp, Homo sapien
tttgtgcatgaaggatatggatgtttctaggctgactcccaaatgtttctaggctgactcccagaaactaggatgtttctaggctgttcctggctgagaatttggatggtaactatagtccaaagaaacaaagaacactgaaatcatatcttattttttttaactcacaaaatagaggcaggtagatatttatatgtgttttgttggctcaatgattttttttagtaataaacatatttacttagaaactactgggtgtctgtatgctctgggatttttttctcctgtcctgatgacatctctttcctttctctgggttcaggagttacttcccaggttgtggtgacacaggaacattcactttccacaactcctggaggggcagtcaccttcacctatggctccaaaattggggctgtcatcagagcatctcgacagctgggcccaacagaacatctggcaatgtccccagggcaatggtgggcacaagcagtcaggtcctgggacccctgcacaatcccctggttctcttcatgaagaaaaagccactctggttataatgaggactagaccaagaatgaggcccagtgttacatgctcggtgtggtgatctgaaatatcaccacagggacaaatacaaaaatacaagtgggaaactacactcaaacccttggatcaagcctcagtcctatgcttctgaagcaaatttcttgtttttggagtctggttttcaaccactgtagactcagatcatttattcttcaggcccccaatgggatcatcacaagcactttttctatcaatcatggcagtcacttgagatcaaaggtgaatttcttcttcctcaagttataagcaacactttggcatatttggtgaacttcaaagaaaatggctaagatagaggatgagagacataagaggcttcaggaatatttcagcagatgcaaagcagactacagggtaactcatttcccatatgatttgattgattgcaaaatgtgaaattaaatgcatacaaaggggaatgtgtgtcatttttcctcttaatgacaaagtaaaaaaaaagcaataaaacaaaaacaagcactatttcatgtgtcttgataaacttgtagaaagtcttataatatccacaatatctaggatacagtaaaataactttccatatgaagaaccagaagaacacaacttaaatgagaaaagacaattgatagacaccaatactgaaataatttaggtgctgatgttatgtaactgagattaattaaggagtaattatacaattccttcagtgagcaattttagacattattttttgaagttttaggttcaggggttcatgtgcaggtatgttacgtaggtaaacttgtgtcagaggggacattcttgaaacaagtggaaaagaagcaaatcccgaaaagaaaaataagtcatagaaacaaaccaaattaaaattagaaaacagaaaaatgcaataaattaaaaagaacagtctggagggactctggaacaggtaacagtgaaattaaagttcaggcattagaggaattatttaccgttaagtagggaagaaagtacaaacaatagccatctaagcccagcagagggagctgtggatcttctcagaggtgagcaaggccggaaatgaactcccggggctctcatttatggctcctgggtccatactcactggcccgaattggggtttagagcaggtgctttctcccaaagggcaaactcagagttcccagcagcccatcctccctgacagagcggctgctgcctggctgagcactcagaacttagggagccggtggttttggtagaggccccatgtttgcataatgtcctaaccaaacacacatctacccggggaggtgacgaggagttagaggaactgtcccagggtccagaagtagccgggggttctggggatccttggaaagtccacaccatagcttggatgtctatcctcccctctctccctcctcactgcccaggttcatgtagatttcaaagacaggactttggagggatctgtctgctgtgattcctcacacataacatgtatctgttttagtttcttggttcagttctcaggctgtggtgactcaggagccctcactgactgtgtcctaaagagagagacttattctcatgtgtggcttcagcaccacagcactgaattcagcagaagcctggtcaagtcctcaggacattgatgtgtaacacagataacaaacacccctggatgcccacttgattctctggctccctcctgggggaaagctgccctg

SEQ ID NO: 27972 - DNA, 2300 bp, Homo sapien
gtcaatcctaagccaaaagaacaaagctggaggcatcacactacctgacttcaaactatactacaaggctacagtaaccaaaacagtatggtactggtaccaaaacagagatatagatcaatggaacagaacagagccctcagaaataacgccgcatatctacaactatctgatctttgacaaacctgagaaaaacaagcaatggggaaaggattccctatttaataaatggtgctgggaaaactggctagccatatgtagaaagctgaaactggatcccttccttacaccttatacaaaaatcaattcaagatggattaaagacttaaatgttagacctaaaaccataaaaaccctaagaagaaaacctaggcattaccattcaggacataggcatgggcaaggacttcacgtctaaaacaccaaaagcaatggcaacaaaagccaaaattgacaaatgggatctgattaaactaaagagcttctgcacagcaaaagaaactaccatcagagtgaacaggcaacctacaaaatgggagaaaattttcacaacctactcatctgacaaaggggctaatatccagaatctacaatgaactcaaacaaatttacaagaaaaaaacaaaaaaccccatcaaaaagtgggcgaaggacatgaacagacacttctcagaagaaggcatttatgcagccaaaaaacatacgaaaaaatgctcaccatcactggccatcagagaaatgcaaatcaaaaccacaatgagataccatctcacaccagttagaatggcaatcactaaaaagtcaggaaacaacaggtgctggagaggatgtggagaaataggaacacttttacactgttggtgggactgtaaactagttcaaccattgtggaagtcagtgtggcgattcttcagggagctagaactagaaataccatttgacccagccattccattactgggtatatacccaaaggactataaatcatgctgctataaagacacatgcacacgtatgtttattgtggcactattcacaatagcaaagacttggaaccaacccaaatgtccaacaatgatagactggattaagaaaacgtggcacatatacaccatggaatactatgcagccataaaaaaggatgagttcatgtcctttgtagggacatggatgaaattggaaattatcattctcagtaaactattgcaagaacaaaaaaccaaacaccgcatattctcactcataggtgggaattgaacaatgagaaaacatggacacaggaaggggaacatcacactctggggactgttgtgtggtggggggaggggggagggatagcattgggagatatacctaatgctagatgatgagttagcgggtgcagcacactagcatggcacatgtatacatatgtaactaacctgcacattgtgcacatgtaccctaaaacttaaagtataataataattaaaaaaaaaaaaagagagttaaaggctgagatgaggtaggaggctgccctgaggaagggtctcatcctctggcatctggtcacagacacgatgggcctgggcctgggctgcagagagcacaatggggctgctggtgggggctctgtgcggctctcagctgggaaataaagtccatgaactttgttttgcctcacggctcactggggccagcagctgggtcctctctgggtgcttggggagcttcaggccaagctcagcccaggctgactcctcctagtagtgtcacccagccacagaggctgtacacaggcccagggagagttaggttaagcaggggaagaggagcacatttgcatgaagggcccctccctctcctttgaggctagagggtggataagagagacctgcagcgtggctgcctcagcagagctctggggagtctgcaccatggcctggaccccactcctcctcctcttccctctcctcctccactgcacaggtcaggaggaccctcagcatcctcatgccccagctcactgacaccatctcccaaactcataccagaaatgttgtttgctcttgtccttccttcaggccataatgagcgtctctgttttcagggtctctctcccagcctgtgctgactcaatcatcctctgcctctgcttccctgggatcctcggtcaagctcacctgcactctgagcagtgggcacagtagctacatcatcgcatggcatcagcagcagccagggaaggcccctcggtacttgatgaagcttgaaggtagtggaagctacaacaaggggagcggagttcctgatcgcttctc

SEQ ID NO: 27973 - DNA, 2300 bp, Homo sapien
ggaatactatgcagccataaaaaaggatgagttcatgtcctttgcagggacatggatgaagctggaaaccatcattctgagcaaactatcgcaaggacagaaaaccaaacaccacatgttatcactcataggtgggaattgaacaatgagaacacttggacacagggtggggaacatcacacactagggcctgtcgtggggtgggggtaggggggagggatagcattaggagatatatctaatgtaaatgacgagttaatgggtgcagcacaccaacatggcacatgtatacgtatgtaacaaacctgcacattgtgcacatgtaccccggaacttaaagtataataataataataaaaagagtcagccccctagcctggcagtgctgctctacaggcaccctcagccctgatcccttcactgcacctaggggacacagtttacaggactgagtcagtgggacaccctgttcctttacattcccagtcatgggctcagattctgcacttgtctcactgctggagggaggagcctgcatcagtcaccctcaaagaagacatgaagttatttcacctgtaaaggcaagaaactgttcgcagcactgggggcaggcttggggaagatgaggtttgtgaggatgttgagaattcatgcagctcatccttcagccctatagctttccagagaagtgtataatgggggtcactaggcatgtgagtaactgatttggtgaaagatgccacttcagatcaaaagtgcatttccccttccccaaggtgtcagcaacactgaaacatatttgactaactttatagaggaagattaagatagaggatgagagagacataaggcctcaggaatatcttagccaatagaaagcctgctggaagatgcatttccaatatgattagactgattgaaaaccttgaaactaaacacttccaaaggagactgggacccatttctcctgagaatgacaacacaaaaaatagtagaggaaaccaacaaaccaaaagcagacactgtttcagatctattgaaaatcctcaagatagtctcataatataatattcaaaatatctaggatacaattcaaagaaacacttgttatatcaagaagtagaaaaattcaccatttgaatgagaaaaggcaatccagacatcaacgctgagatgatttagggctgaaattacctgacagatatattgaaatcagccaccataaaatcctgttgatgagcaatttcaggcattcttgaaacaaatgaaaaaggataaattctcagaaaaaatagaagtcataaaatcaaactaaatataaatacaaataaaataaatgaaaaatttaaaaatacctctctggagagactcaagaacaagtaactatgaaactaaaatccacgcattagagaagacacttaacactgttaactagagaagcacaaaccatagttatcacagcccagcagggcgagcaatcagtctgctcagaagtgagaggcctgaaaaaaaactcctggtgtccctgatggtgaaatctggcccctgatcccagggttcctccctcttcgtgctcagagggctagacctagcagtgaagggttcccaacctcaccctatgcggcccctccagaaggcagagcccattcttgctgatattcccgatctccaataacacaaagtgaaagagaatgtcttaaccagagtactgagtcttggcctatctgaacatatttcaaagtttaaatgtacagtgagcataggatgctgagcagaggccccctggacagtggctggagttgggagcagtgcaggatggaaggacaggtcaggggccctgagcacctgtacctgcacctgcacctgcccagggtggacatgactcccgcatccaccagagggcgttgtggtctaagcaactaatcagagctccccagatcctctgctgttttccctccacctgctggtgtttctgtgccctccagatggtgttgctcctcccccttctatgaccacttttcagccataaccttgtctgaggtcaaaggagggggttgtgcaaccttcagaaagggagaaatttgcatggagccctaccactctgaggatacgcgtgacagataagaagggctggtgggatcagtcctggtggtagctcaggaagcagagcctggagcatctccactatggcctgggctccactacttctcaccctcctcgctcactgcacaggtggctgcctgcaaggaattcagggagcgttcctggatgtcacctgggctgatgatctgttcctcctg

SEQ ID NO: 27974 - DNA, 2300 bp, Homo sapien
tatttttaatgtggaacaatagaaagcttatggcccataaagatattggataacatatttttctagcaatatgagaaataagcaaaagtgtaaaacatttaaatacaataatttaattcaaaaatatgaaataatttgtattttttagttgctatgtttatctaccaagaaggcattatattattctgatgttcttacacattgttgaattaaagcttgttaaatacaaatgttatcatatgtgcaaatagcatatcaacatttctttttctctcatatattttcagaaatcactttaaaatgtagcagttcataatgttgacaaaatatcaaaatctataaactctgggtttaaaaaacaatgaaatacacagtacacataagaaaatagtgtcaaagctcactactataagagacaatgatcaatattgaaattttctcttacatgaagacgctcaaaacattttagcagtgactagtgaggttgtatccattctcttatgtttatatttatgtttaaaatattgtccttgagaaggagtgtaggtaggtataagcagaggtggctgtgcggatccaagattctagcctgcccccttgatacagcccattaccctagtcccatccaatctcacacatggcccatcatcatcttctgacttgagcggggagagagacggtgggtagagagggaggaaaggagttagttcagagcataggagacgtggtcagagagttggcagagggagggagggaggcacattctgtgggttcacgtggtgctttgacaactgtggatttacttctgaatgaagcatgaagtcattgagagtgtggaacagtaaaatgatattgcaaaataaaataaactaagattccagtgagcatgttgggaatcacaaacactcacagctgggtgaataaacaagtgctgccatctggagaaaagttcctcagcacacaaggagaagtgtgtttgcctctgtcaagcagaagtccacctatacagagacacaaggaaatgtttataaagagatccttattcggagcaaagtattggaagcaacataggtgttcaacacaagtggaatttataacacaaggagaagataaaatgctagccagttggaagtaatacaacttcttatgcgacacgaataaaaatataattatcagttgaaaaacaataacaacaaactcccaccaaattaaacaaaatcaaaagctctcaagaaaaaaacaatgtgccacttattttaaagcagaaacatgcataacgaattcttcaagcttatataacgggctttttggaaagtagactggaggcacattatttcacataaatgggtgtcttaggaagagatggagacacgtataatggctaaaaaatgaaataaatccatagagaggtttttagtgtctagtgataaaagtactaataatattacgtaattaaattccaaaaaattaatacagaaaaatattcttgatttgggggtggtaacagatgattaagtaaagcgagtctacatgagctgctgatgcagtggatgacaagctctctgcagctcattgttagtgagaaggcactgctttgccagaaaccccttttatttagatttctcatggtccctgggtccctctccaacaccatgagcagcttcagaagaggatcaggataaccagtgactctctggctaccatggcccagttgtgtccgagaggtaagaaaggtttgggatcttggacagagtgggacagtgggagaaattcctgagatggccccaaccagcctggaaaccactcagaacctgcattgaagtttagccatcagggtgctcttgagactcggtttgggctgcaacacagacctgtggggacaggggtcaccataagccaggccacctccacccctgggtcagctcatctcctccctctctgcttcagatctttgagtaaccagcacatggaggcccgggaaaagtcagagagcaagatcttatttaaatgctgtgactccacccccatgaaggctttgggagctataaaaaagagacttaggggagcccagtctccaaacagagcttcagcaagcatagtgggaatctgcaccatgccctgggctctgctcctcctgaccctcctcactcactctgcaggtgagagtggaccttacccagggatctgcacccacctctgctccagcttctccactccctggctcagtggactctgatcctgctctcacattcctttctgtcccctctacagtgtcagtggtccaggcagggctgactcag

SEQ ID NO: 27975 - DNA, 2300 bp, Homo sapien
attctgatgttcttacacattgttgaattaaagcttgttaaatacaaatgttatcatatgtgcaaatagcatatcaacatttctttttctctcatatattttcagaaatcactttaaaatgtagcagttcataatgttgacaaaatatcaaaatctataaactctgggtttaaaaaacaatgaaatacacagtacacataagaaaatagtgtcaaagctcactactataagagacaatgatcaatattgaaattttctcttacatgaagacgctcaaaacattttagcagtgactagtgaggttgtatccattctcttatgtttatatttatgtttaaaatattgtccttgagaaggagtgtaggtaggtataagcagaggtggctgtgcggatccaagattctagcctgcccccttgatacagcccattaccctagtcccatccaatctcacacatggcccatcatcatcttctgacttgagcggggagagagacggtgggtagagagggaggaaaggagttagttcagagcataggagacgtggtcagagagttggcagagggagggagggaggcacattctgtgggttcacgtggtgctttgacaactgtggatttacttctgaatgaagcatgaagtcattgagagtgtggaacagtaaaatgatattgcaaaataaaataaactaagattccagtgagcatgttgggaatcacaaacactcacagctgggtgaataaacaagtgctgccatctggagaaaagttcctcagcacacaaggagaagtgtgtttgcctctgtcaagcagaagtccacctatacagagacacaaggaaatgtttataaagagatccttattcggagcaaagtattggaagcaacataggtgttcaacacaagtggaatttataacacaaggagaagataaaatgctagccagttggaagtaatacaacttcttatgcgacacgaataaaaatataattatcagttgaaaaacaataacaacaaactcccaccaaattaaacaaaatcaaaagctctcaagaaaaaaacaatgtgccacttattttaaagcagaaacatgcataacgaattcttcaagcttatataacgggctttttggaaagtagactggaggcacattatttcacataaatgggtgtcttaggaagagatggagacacgtataatggctaaaaaatgaaataaatccatagagaggtttttagtgtctagtgataaaagtactaataatattacgtaattaaattccaaaaaattaatacagaaaaatattcttgatttgggggtggtaacagatgattaagtaaagcgagtctacatgagctgctgatgcagtggatgacaagctctctgcagctcattgttagtgagaaggcactgctttgccagaaaccccttttatttagatttctcatggtccctgggtccctctccaacaccatgagcagcttcagaagaggatcaggataaccagtgactctctggctaccatggcccagttgtgtccgagaggtaagaaaggtttgggatcttggacagagtgggacagtgggagaaattcctgagatggccccaaccagcctggaaaccactcagaacctgcattgaagtttagccatcagggtgctcttgagactcggtttgggctgcaacacagacctgtggggacaggggtcaccataagccaggccacctccacccctgggtcagctcatctcctccctctctgcttcagatctttgagtaaccagcacatggaggcccgggaaaagtcagagagcaagatcttatttaaatgctgtgactccacccccatgaaggctttgggagctataaaaaagagacttaggggagcccagtctccaaacagagcttcagcaagcatagtgggaatctgcaccatgccctgggctctgctcctcctgaccctcctcactcactctgcaggtgagagtggaccttacccagggatctgcacccacctctgctccagcttctccactccctggctcagtggactctgatcctgctctcacattcctttctgtcccctctacagtgtcagtggtccaggcagggctgactcagccaccctcggtgtccaagggcttgagacagaccgccacactcacctgcactgggaacagcaacattgttggcaaccaaggagcagcttggctgcagcagcaccagggccaccctcccaaactcctatcctacaggaataacaaccggccctcagggatctcagagagattctctgcatccag

SEQ ID NO: 27976 - DNA, 2300 bp, Homo sapien
tacatgggtgtattgcacccgggttgtgagcattgtacccaacaggtagttttttacaccattccctcctctccctccccctcctagcagtgcccagtgtctattgttctcatgtttatgccatgcgtgctcaatgtttatctcccacttaaaaatgagaacacgtggtatttggctttctgtccctgtgttagttgcctaggattatgtccccctgctgcatccatgttgcttcaaaggacattattttattcctttttatggatgcatagtattccatggggtatataaactatattttctttatccaacccaccactgacgggcacctaggttgatcccatgtctttggtattgtgaatagtgtggtggtgaatatacaagtgcatgtggcctttgggtataatgatctatttgtctttggatagataccctgtaatgggattgctgggtcaaatggtagctctgttttaagttctttgagaagtcttcaaactgctttccacaatgcctgaaatacggtgtatacgtgttttctttactctacagcctcaccatcagctgttgtttttttactctaattatagccattctgactggtgtgacatggcgtctcattgtggttttgatttgcatatcttgatgattagtgatgatgagcatttctccacagttttgttggccactaatatagtgcagttttaagttcatagcaaaatacagaagaaggtagaaagatattccctatcctccctggctccacacatgtccagccttcccccttatcaacgggtcccatcagaaatgtacatgtcctgtaattgatgaaccacattgacaggtcattatcactacaagtcagtattttccttaaggaatttttctcgctgatgcacatcctatggctatgggtttgtgcaaatatataatgacatatatccaccattacagtatcatgcagtgtatttcccttccctacaaatcttctggctttactgattcatctctctctctcccctaacctttggaagtcgatgacttttctacttttttcctttgtttgactgtaatacacttgaaattatttccccctttttggactgtaatatacttggaatcacgtatcatgtcatttgcaggtcagctccttttacttactaataagcatttaagtttcttccatgtcttttcgtggtttgatagtgtgttgtccataaacatgtagaatatattaatataaagtactttggagctgatcacatcactggccattcaggtttttcaattactgtttgttgaatgacagtgaccagtcagatgacaggaagtcttagaccccctgagaacacagaagatggactgaggatgtcagggtcaccgaggactgcactgggtgctctcatggagggctcagtaggggtgtcctctagttccagtgagcctggactgtgatgggcactcagagaagggtcctctctagcctagcagagcccctgctcacaggcctaccagctgtcccagcagctttccctcccaggtccttccgtggggcagacagagtctcactgcctgttagcccttcctacccacaagaccctcagcaaaagatccttattcagtgctcagggagaggtggggcagatagcagctggggccacacctgcatgaccagctcctcctcgctgaggcctacagcaggtaataaactcaatccatcccactggaccaaagggagctgtgtctaccatggcctggacccctctcgtgcttgtcctcactccctgcacatgtagggaaaaggcctagagacctggggcagttcccagcttgtgtcagcccctctggctcagacttgccaacagcttaaccctgacacctgctccaacaatgtaaatgtttgcatttccaggttccctcttccaggctgggctgacccaggtgtcctcactcccagcatcttcatgcagatcaaacactcacctgcactcagagcatatcggctttcatatcggtggcaaaaataccttcttttccctacagaatccagggagccctccaactatgttctgagattatgctcaggctaaaatgagtaccaggcctctggggtccccagacaattctctgggttgagaggctcctccagagtctcaagttatttggtcgtctctggccttcaccttgaggatggagcagatcatctctctcagatgggctgacagggcatggcttacactgtgctctaggccaatgggaaaatcccctctgcttgtgctgcctgggctcccactaggcccctg

SEQ ID NO: 27977 - DNA, 2300 bp, Homo sapien
catgacctgcatctaactctagatgctccaggggtctgagaccatctccagcagggtctggaaggcccagtcattccccagcacgcacagtcaccactggatactatcttgctctgtgagtgatgcaaaggtcctgggtcagtgaagcctgtgaaacaaagttgggaccagagtgtctctacggttgagggctgggcttatttgctctctaagtataattgtaagagcaaatagaaacacctatcctctctgagcttaaaaggatcaaaaagctctgacagtgtcagtggtagggctagttcaggggctgcagtagtgctggtgcccacaggtggaaccttctcctgccctgattcccaaggactggtgctctcggaggggtctgggaggtatatttctctttcacaaatacgtgcacaacacatgaatgagctactggatgagggaataaatgaatgaatgagtgaaaaaagcttcctttctcctctccaggagttagcaatcactggttagttccccactgcccaccagcctgtgcagaggagggaggagcaacaggtcatagatgtggttgcagctgttactggacagagtggtcaagacatcctgtgtctgcagaggccctccccagccctcacctggacagtggagctgttggccagagaggcagtgggaagaagggtggggctcccagagtcgacccagcgggctgaaactggtgcagtctgcgcctcaccaggcagagaatggatgtggggcagcttgacaccgagcaggggctcatctgagcctcaggggtggttgctctatcaaagtgtttgcaagtaaacagtcccagtgcacacccagctgctcagtgccacctcgtgcacccagggccacttcagccttgatcacaggcctgcacaggttccaggggaggagacactccagctttttgagggagggtgagcatgtgggatcagagactttaagtccaaatttccccttaatttttttttaaatcttgcaggtagtatgcaaacatacatttaatgtattatttttattctcatttatttttttgaggcagggtctccctctgttggccaggctggagggcagtggcgagatcttggcttgctgcagcctcaactcaacctcccaagctcaagtgattttcccacctcagcctcccaagtagttgggactgcaggtgcctgtccgccatgaccagctaatttttaaattttttttgtagagatggggttttgccatgttgctcaggctagactcgaactcctgagctcaagtgatcctcccaccttggcctcccaaagtgctgggattataggtgtgagacactgcatccggctcccaaatttcccctttttataaggacaccagttgtactgaccggggccccacctctatgacctcatctaaccttcattaactccttaaaggccctatctccaaatacaggcacactgggggttagggcttcaacctatggatttgggggatgcaattcagtctatcacagtgccaagctgcacctgctcggtgagccagaacaggggtggggaaggcaccaggccctggtgcttctttcccatgcctgagtcactctacttggttctaggagggagaggagcatgggctgaaggcagtgctgcaacatggaaggggcagaacatcccaacccgctctgggcccccagtgtcttctgctgtacaaagcaggtgttttcaccccccgaggatgtgtcctcccttcctggctcaccaagcatttaaatgtagacagaaaatttatttatctggggtgcggtttcctcagggggaagttgaggtcacgacccctgaggtaccttaacccaaaggcctccagggcactggccccagagtctccagcaggtgcttcctccctgaatgcttccatatggcaagatcagagccacaaatgctgccccgacactgttccggtaaccgacgttgcagacccaagaaagtctgggatggtagtggccaggaacggggtgtgccacggccccacctctcagagcagggaggaggatgctgggccagcccttggggaccccaggcaccgtggccacaggagtcagagctctgcatgtctgcaccatgtcctgggctcctgtcctgctcatgctgtttgtctactgcacaggtgagggaacccccagatcccaaagactcctgccccttccttcatcctgccctgcccccacggcccacatgcatctgtgtcaccaggttgtggtcctcagccggtgctgcatcagccgccggccatgt

SEQ ID NO: 27978 - DNA, 2300 bp, Homo sapien
gactagcaggtcaatgaagatactaagacagaaattcaaaaatttcatgaaacaaagggtaatgaaaacacagtataccaaaacttgttacgcagaaagccatacaaaggcagagatttacagctacaagtgcctaccatccaaacaaaagaaaaacttcaaataaacaatacatcttaaagaactagtaaagaacaaactaaaccgaaaataagaaaataaataagatcgtagcagaaacaaaattgaaataaaaaacacacaagattaaacgaaaagttggttttctggaaagctaaacaaaattgacaaacttttaaccaggctaagaaaagagacaagattcaaataaataaaatcaacagattaaaaaaaggagacattacaactaatacttcagaaattcaaaggatcataactggctattatatgccaataaattggaaagcctagtagaaattggcaaattcctagatgcatacaacctacttaggttaaacaatgaaaacatccaagaccagaacagattggtaacaagtaatgagattgaagccatcagaaaaagtctcccagtaaagaaaagcccaggaactgatgtcttcactgctgatggcttcacaccaaacaatttaaagacctagtacgaatcctgctcaaactattttgaaaaacaggagggaatacttccaaacttattctatgagaccattattactgtgataacaaaatcagacaaaagcatcaaagaaggaaactacaggccaggatctctaatattgatgcaaaaatcctcaacaaaataccagtgaatcaaattcagtaatacattaaagagataattcatcatgatcaagtgggatgtatccctgggatgcaagggtcactcaacatacaatgtgatacatcatatcaaccaaataaacgacaaaaacagtatgatcacgtcaactgaaaccgaaaaagcatttgatgaaattcaacatcccttcatgctataaatcctcaaagaaacgggcacagaagaaacataccgcaacataataaaaactacaggaaagacacccacagctagaatcatatggaatggggaaaaacggaaagcttttcctctaagatctggaacatgataaggatgccccctgtcaccactgttgtttaacatagtaccagaaatcctagctaaagcaatcagtacagcccctgatatggcccccaacccaccctgccccctaccaccagcagtgtcgcccccccgcaacagcacacccaacatacccaagccgccccgcctccccgcaccatgggcattacagcaccccatagcgccctcaacccgaaaccgccacccacccccccaccgcccacagccgcacagtgcagccccggatagcacacttagcccacctcactgttgccagcaatacagtctgggatagtgcccccaaccggctccccgccaaaggcagtgcagccccggtttgggcccccaaaccatccccccgtgcaggcagcacagccccagatagcacacccaaccagccacccaagacgggcagtgacgcctgagatagggctcccaaccggtcccaggccacccgcagtgcagcctggatagcgcgcttaccccaacgcctttctacgctctggctggctgcagtgtccatcgctgccaccaaccacaaacagggctgcaaacaggaaggattttattcaccgtcgatgcggccccgaggtgtcccaaagcgaggcagtgcccccaaggtctgtgcagagcagaacgcagctccgccctcgcggtgccaccggcccgcccgcccgggtctgtgctgaggagaacattgctctgccttcgctgtatctccgaagtctgtgcaaaggagaactcagctccgccctcgcaaaggcacacagcgccggcgtggcggagaggcggacagcggcggagaggcggacagcggcggagaggcggacagcggcggcgcggcggagaggcggacagcggcggagaggcgcacagcggcggcgcaggcgcggagaggcgcacagcggcggcgcaggcgcggagaggggcacagcggcggcgcaggcgcggagaggcgcacagcgcggcacagcgaggcgccggcccagactccactccccagctgtgaaagggtaagaactgagggtggctgagactcggggttgttcagggcggggtgggctctggacccagcaggcccggcacccaggtcagggctccaggggaggccaggtgggcgaaggccaagaaggggccggggctggtcaggaagggctcc

SEQ ID NO: 27979 - DNA, 2300 bp, Homo sapien
atttttatactgactgttataagtgatgagtcagatggttccaacatctgcctatgtaatttttttatttttgcaggcagtcctcctgtttaggtttagtctgtaggtcttggtctactttgtgggctgtgattccaatggcaatttaatttcagagccttcatggtgttattttggtctctttggcttatatgtatcactgggattctcccaccagtccctgttgttgcccacctgagggaacaggggagccgccctaggctgggccacctgctgcagctaggtgggtggggaatggtggttgtcttggtgtgtggagctggttttcttgttgtggggaagatctcctttgatctgcggggactgagtctgcctgggttgccttctattgctacgttgggagttgggaaactctgggcctgggtcaccttcctattggatgaggtccagggagacacctggccactatgcattccctagtcctagagtccctcagcagcctttttctgtccaccttttggaattctccattgatcctctcctgtctattatttctagagtttgggttacatttcttaggagggtataatgtgttatcttctctagaccagaaatccttagtggtggtttcgggttgtaactgtgctaaagggagaattggcgtatttgtgatgtcgggtctttcttttcaaatgaggacatatcattattcagtatataatatttacaacacctacttccttgggttgaagaatgtggttaaggcaaggaaagtacttaacacagtgcctggtgtggagagcacttacgagtgttggtagtgatgctattccttttgtcctttggtagcctattaaagcttttcttcttttttaaaaaaataaagttccggtgcacttcttgttaggtttattcctattttatccttttttgcttttattgcaaataggagcttcctatcttttataacgtctacctggttctttggcccttacgtgaaaatgttttaatagccttctaaacattgttctctcaaatgagttttaatttgcctctttcttttgttttcctttttttgagacagggtctcactctgtcacccaggctggagttcagtgacgcaattatggctcactgcaacctctgcctcctgggcccccaaagtgctgggtttacaggtgtgggccactgcacccagccttacttgtctgtttcttttaagagtgggaactataattgagcccagagctccaaaaacaaatgaagaaatgaatgagtgaataagctcttcccatgggtttggtgtggtttgggactctactcttaatctaaatgctatgttttatataatctaaaatttcccctaggtgtgttacacgattgtgttgtgttgaacttacattgagactccttttcacatgtgctggttatcagcgtgggacttttccattcactctttgaattattcgtttgggggacacagatagacctctgtgtctttcataaagagtgtccattggccggttgcagtgtctcatgcctgtaatcccagcactttgggaggctgaggagggcagatcacgaggtcaggagttcgagaccagcctggccaatatggtgaaatcccatctctactaaaaatacaaaaattagccaggcctggtggcgggtgcctataatcccagctgctcgggagactgaggcagtagaattgcttgaacctgggaggcagaggttgcagtgagctgagatcgtgccactgcactccagcttgagtgacagagtgagactccgtctccaaaaaaaaaaaaaacaaaaacaaaagagtgtccattatctatactagaaaaattgagattgggattttgacatgaagtgcggaaatgtggattgggtccatttagtttacctaaacagatgatgaaatactaactgttttacgaagcattccctagtgcaaagttttgcctgtgtttctagtgatgggaacagtgagaatcagacttggaacacggagcgcattgtgggcctgtcgtgggtggggccagcagcacatgcatgccgggctgacagagcagcctttgggtgttcttttcccagaggagctctacggtgactttgaagacttggaaacaggggacgtgcacaagggaaaatcgggccccgatactcaggtatgactttgtcgtagctggctgttcttggtcattgtgttctgagagaggcccgcattgagaaatgcaaatcttacttgtgatgtgtgaagattgcagactggatggatagattccttcctaaag

SEQ ID NO: 27980 - DNA, 2300 bp, Homo sapien
tctgcctcctgggtttaagcggttctcctgcctcagcctcccgagtagctgggattacaggtgtgcaccatcatgccgagccaatttttgtatttttagtagagacaggatttccccatgttggccagactggtttcaaacttctgacctcaggtgatctacctgccttggcctcccaaagtgctgggattacaggtatgagccactgtgcccagcctcaagtcacccttgttagtttggcttaccaactttaaagttttggattgcttttgtcaagccactgggttgcaagttcagatggtctttcttgtttttcttagctaattgtaagtaaaattcactttggtaatttattgtgtcacatagaattgaagtttttctcttgctaatattattcctattttcaaattttggggttcctgttagcctgattttcggatagctgccacataagttgtccttgatctggataaatccataaaaattgtgaagaaattaaagctaactggttttccatataaaatttttaagaacacttcatttattaaggtctgtatatctatatattctcatatttataaatctccatattgtttgagaaaaggaatgaaatacctctaaaatatgggcctcatatttttagaaaagtgtttgaaatcttttataaacttcatattttgtttgctcctttatattctgtattacttaaatatgctcagaaaagcagtggtaaacagctatttaggaattgaggctgttactcctgacttccatgtgagactgccacagaactcatattgaaaatatgtcattttatccactaggttttgtttcctactttttaaatttgtgttaagaaagggaaaaaaatcacaagtttgtctaactcagtagaaaaatcgacaaagcatttgcagacaacttggcaagggtacagagaaacggatgtactgtttttcagtatttggggagggtggtttgagcagcatttattgacaatttcattagtggggatgtttctattgaaaacagggttaggaagtcataaaatgttcctgcaatataaggtaataataccaccagcgtttatcttactgttttcatgttctaagtgcatgcatctgagtaaaaggatctgggctgcagtccagtctgagagatgccagcaaaggcttcctaggccagttcagtccagtaaatccctcttcgatcttctcttccacacagacagcagtgatgagcatgcccatgaactcacatgattattttggggaaaatgaaagagttgtattctttttgaggtagtaattccactttcaggggcaaatacattttgattattttatcacccttcagtgagttgtttttgttctttaatcaaggatgtatgtttgaagtaagaagtaaagcataaagtatatgattttgtgtgtgtgtgtgtgtttttatcttgctgtacctgtagggaatgtttaattcagccttggaagtggccaaatttgaaggtgctgtgattcgaactgtcagtgggataagggggcagatcaagaaagcactctgagctccagaaggagctttccgggccagctttgaggataagctgctgatgagcggtgagtgtcttaagtagtgttcagggcagggtgttaccattcatgcttgacttctagccagtgtgacgagaggctggagtcaggtctccggagagttgagcagctccagccttagatctcccagtcttatgcggtatgcccattcgccttgtgtctgcagccccctggccacacccagtaacagttctgtgatctatgagaatagttcccttagcgacctttcccttcaaatactttgcagccaggtagagaagtttggagtgaaggttttgttctttgtttcttcgcaatatggatatgaatcttcttttgaaaatattaaagtaaattacctcttttcagatattgtcttcatgcaaacttggtatcctgtttccatcccagccttctgtaacccagtaacatctttgttgaaaccagtgggtgagaaagacacctggtcaggaacgcggaccacgggccaactcaggcttgcccatggtgtcagactaaaggcaaacaaggactctctgtataaggtactggtcgtgtgtgtgttagtggagatgaagcctgtgctctacagacagggagtcacacagacacttttctataatttcttacgtactttgaatgttcaagtataaagtctaacattaaatttgattgaacaattgtatgtttgtgggatattttggagtggaacac

SEQ ID NO: 27981 - DNA, 2300 bp, Homo sapien
caaggcttaacatggcttttgctccccaaaactgtggcatagcattatctggagcctcttgagccaaggctggagctgaatcagccatgaggttgcacaggactgtggggccctaggccagacccagcaagccattcagttcacctaggcctcaggacctgtaatgtgagaggctgcctcagagatatctgaaatgcctttgaggtctttttcccattgtcttggctatcaacacttggctcctctttagttacgcaaatacctctagcaagtgattgtttcgcagcccacttggattcttttcaggaagaggggatgttattttctgccacatagtcaagctgaaaatttttcaatcttctatgctctgctttccttttaaatataaattccaaattaaagtcatttctttgatctcacatctgagtataggctgtagacacagccaggccacctcttgaactctttctgcctagaaatttcttctgccagatactctaaatgattgttctgaagttccaacttccacagattcctagaacatgaatagaattcagccaaactctttcctaaggcataacatgggagatacttgccccagttcccaataagttactcactttccgtctgagatgttgacagcctatgcttcattgttcctaacaccatcagcattttgatcacaaccatttaaccagtctctataaagtctgaagcattttctaatcttcctgttgtgaacccccaaaattggacacaagtctcagttaactcagaaagcttattttgccaaggttgaggaggcacatctgtgacacagcctcaggagatcctgatgacatgtgtccaagatggtaggggtacagcttggttttatgcattttaggcagacatgagacatcaatcaacatgtgtaagatgtacatcagttcagtctggaaaggtggaacagctccaggtgaaggcaggacaacttgaagtggggaaggggcttccagtcttagatagataagagacacatggttgcattcttttgagcttctgatgagcctctccaaaaggaggcaatcagatatgtgtttctctcagtgagcagaggggagactttcaatagactgggaggcaggtttgctctaagcagttcccaggttgagtggggtcccaagatttgttttcctttcacactgtcttctcctgagccccccaaacccttccaacctctggccatgactgagttccacagctgcttttgtactatcaggtatcttttagccatactttatttaccaattatctgtgttaggacattgttgcattgctacaaagaaatttgttgggaaatttacaaacaaaagaggttgaattggcttatggttctgcaggctgtacaagagtcatggtgcctccatttgcttggcttctgaggacacctcaaggggattttacttggtggaacatgaagtgggagcagacatctctcatggcagggtgggagcaagaaagagagtaaggcaggaggttccacacatctaaacaatcagatcttgcaagaactcactcactgtcatgaggacagcaccaagcctcgcggaatccgcttcaatgacccaaccacctcccaccaggtgccacatgcaacattggggattacgtttcaacaggagattgagagaggacacacatccacactatatcaggaggtgtgtgccttgcaaccatcaggggatgctgcaggactgccctatggtccctacacagctgcttagtaagaaccattcactccaaggaacctgtgccctgtgctcaatgatggggactcaggagctgtgtcctctctggcctggcagagtcccctaagcagagacctgtgtatggtctcggcaggtgcttcctcccagggccctcccgagggggaaaccaaaccttcctcctcctcagtctggagtgtgagctaagcttcagctccagggctcagggaggggctgggcagtccttggatggaaacatatttgcatgagcagcccctcctctggcagaggatggagaagaagaggagacctggggcagctcaggcccactgttagggctcaggggctgtgtccaccatggcctggactcttctccttctcgtgctcctctctcactgcacaggtagggaaagtccttataaactgagtctcagtgtccaacctacaccatcccctgtggctcagacctacaagaagctttaccctgggaactgccttatcacccatgatgtctgtgttttcaggttccctctcccagcctgtgctgactca

SEQ ID NO: 27982 - DNA, 2300 bp, Homo sapien
accgtgcctggccccagataaccctttttatgtgagagtgtagagaatgttgctgcagctggtgtgggatgggggatggctgggttgagactgtgttgtcacctgcagtgtacacctgaggtgacatggttctgaacatcactttccccattgaaggcccgagtgacctatcacttgcttctcaaaattcaggaactaggtgactctaggagagtgcacaggaagctttctgcatattctttcaagagatttcgaggtcactgactcttttttcaagacttaaacacaaaatccacatccatcattcttgcgtaaagagaccattcttttttttttgagatggagtctcgctctgttgcccaagctggagtgcagtggcatgatctcggctcactgcaagctctgtcttctgggttcatgcccttctcctgcctcagcctcccaagtagctgggactacaggcacccgccgccatgcccggctaattttttgtattttttagtggagatggggtttcaacatgttggccagaatggtcttgatctcttgacctcgtgatccacccgccttggcctcccaaagtgctgggattacaggtgtgagccactgcacccggcccaagatggggtttcatcatgttgacctggctggtctcaaactcccaacctcaagtgatccactcacttcagcctcccaaagtgctgggatgacaggcgtgagccacagtgcccggcctagtacattgtttaaatggtgcatgtaaaacctcatggtactacaactgcctggtgacagactcaccagagtaaataactatcctgctgttctccaaccacatgggattccccaaacaaagatttgttgagtccaagatgcatcatgccagaactcttgcagtcatacacataatttgtttcattttaataaatacggttatcttttttcttcagtttattgtttttaatgtatcatcttctaggtttcattacacatcaaagatgaataatttctctcatctttaggacatgctgaaaacactcattagtgattttgaacagtattatttcctaaacatcctagttggaatggttgatcctaaaagctaccatgtgtcaggctcacctgagtgcagactgtggtctaaacaagctaaagttttaattcttccatcttcaaatacggagcatatttgcttgttttgctctttagcaaaacactgcaaagtcattcgccaggatctcctgcagactggcattcagtgatggagaacagactcctaggtgagatccctggtcacaggatccagatgactatgactgcaagtctggaaaagaagagacagaacaaagatttaccagcataaccctctgagaatgtgccccagccatcctggagggaagagctccctattgacccagcactgcagaatccacagaggaaggacagctctggccaccagggagcagccacacgacaagagaggacccggtgtccccacaggtgaggaaatgagtccatggggctggtcagtgctctcgatttcattctgccataacaggactttgtgtagtcaccacctgagtcctatacagtgaacagccaaggagacatggacagattcacccctgaggaacccagtagaatgtgaagtctgccctgaggtcacgaagaaaagactcggggggctgcctggcctggccctgatggagggggccatggacagaacaacggggaggcaggggtgtctctgagaggctctggtcaccttgtcatacaatggtggtgtacaatgtcgcaccatggacactagggggcgcctgcgcaccattcctgagaagactgggtgtgatgagagcaggaccagcgccacctgtcctgcttggtgccctatgcttagggctcacagatgtcaactctccaccccctgggaccacacagccccacccctggcactctctgacatcctcaggcagaggagcttgacccagggcccagggtgggatcagaaagctggagggtctgatttgcatggatggaccctccttctctcagagtataaagaggggcagggagagacttggggaagctctgcttcagctgtgagcgcagaaggcaggactcgggacaatcttcatcatgacctgctcccctctcctcctcacccttctcattcactgcacaggtgcccagacacagggtcaggggaggggtccaggaagcccatgaggccctgctttctccttctctctctagaccaagaatcaccgtgtctgtgtctctcctgcttccagggtcctggg

SEQ ID NO: 27983 - DNA, 2300 bp, Homo sapien
agacacatccatgctcatcaagaaggcattgataggagaatcaggtagcctccagagagacaggaagcagataaacaccctcatgttggcctcctaagcccagaggagaaaaaaaaaagttggaggggaagaagttcaagaagccacactagaagccactgattaccatcacctcggcacctgtcctccatctgcccctctttcaagtgaggaccagactcaggggacagcacctgcacctccccctctgtccatgcactgtgtagggagcctccttctgctctcatctcaaggtggctgctccgccaggtcagccgtatcactgctgagagtcttccctgggtcctggtcacagggtctgggatcagcagcaacctggctttgattcagctctgaccctgccccttcaggacacaaagcccattattaaagggataactgaactctcctagttcactcaaccttagattttccttctcagtgtccttctagaaagtgccgcctctactaaatgatttcatgttatttcctcaggtctagagctatttgatttccaaaattctatactcttctgttctcattcccggtcatggctcattttccctcagcagctaatgatgctaatcatgtatctaccccccattgtcacaaaaaagagagatggaagagttccttagataaatacagggttagcaaagaaaagtttcattatctcttaagaattactccaagatctggccaggcgtggtggctcatgcctgtaatcctagcactttgggagtccaaggtagacaggtcacgagatcaggagatcgagaccatcctggctaacatggtgaaaacccatctctactaaaaatacaaaaaattagccaggcatggtggtgggcacttgtagtcccagctactgaggaggctgaggcaggagaacagcgtgaacccgggaagtggagcttgcagggagccgagatcatgtctctgcactccagcctgggcaacagagcgagactccgtctcaaaaaaaaaaaaataaagaattactccaagatctaagaaaattaattccagttcttcaagagtttactcctcagaaacaacagcatgaatacattaggtagtgaatgttcttggtcttctcaatgaataacgtctgaaaggttcagagtatatgtttcaaaaaggtaagtgcataactttcaaaaaaatgtagtattaacatgtcaacaattttaattggtatatatatttctgaaaaaaaagcagtatgatggtaaaagaaatgtaaaaaagcctttgtaaaacccagtgcttacagtccaccaggatagcacctgtgaagcaaatttcctttgctgaagatacaccgccttttagaataatagcaagatagtttgaatttgtcttcttctctcacagcaatctaaaaattaacttaatcccatttatatgacatatctagaaatattcctgtacatgtggacattcccatcgcacacctcccatccaggctgtcctaaagtggcatctcctcttcttctgctcatgttctccccctctcctcacctctcctgctgacacgtggctcctccctgccttcctctccagtagccccagcagatcaggcccaaccagtgaacaagctcctggacttcttggatttctgaggacttgccctgccagggtgtctttctcaatcacaatctctccttcccgggagtccaattctcctagatcctgttatttatctaatgttatacatctgtatctacttggtggacttccctacatcttcacccgaaccccaggaatcttcaggtcatgcccatatgaccttagttctcctggagtcccttcttccttcttcccctgtgatcccaccaagtggagatctcttctcagaccctggagtgcagcagggacttctctggtctctgccccagggattaagggggtggaattgaggactcctgtgcccttcctatgcctgtgttttcatcagggtcagctgcacaaggtagggattcccactctcagagtatgaagaggggcagggagagatttggggaagctctgcttcagctgtgggcacaggaggcagcactcaggacaatctccagcatggcctggtcttctctcctcctcactctcctcgctcactgcacaggtgactggatgcagatcgaggggagggtccctgggaagcctatggattcttgctttctcctcttgtctctagaagcagaatcatgatgcctgtgtctctcccacttccagggtcctgggcccagtctgtgctgacg

SEQ ID NO: 27984 - DNA, 2300 bp, Homo sapien
tcctccaaaggatctcacttactgccctatgagtgacatgggctgggatgctctggtagagcacactctggctggtgtcttggtgctagaaatggattcaatcactggacaagaaagtccttcaggggcaaacataaggacactgagggtcatcttattctacctgccttctctccttacttgtatcctaggccagcctatgctagcgcaactgtccacagatctctctctctctttctgtctctctctcgtgtgtgtgtatgtgtgtgtgtgtgtgcatgtgtgtatcaaatgatcaaacatcttcattcaaaagtccaagccctgcagcatcatgagacagtgctaccacacatgaagaaaatgttcaaagggcaccaaatagagatcgcatgatccaaagttatttctgatcccagaaaagaatggcacacaatcaatatgaatagtattagatatcaaaattatagtacaatctcatttgtttttaccatagattcaaactctctttagcatattggaaagcagaatccatgttctactgatgcaattccccttgaccatcatgaaagaattggactgaaagcaggacatttctgaagtctctggaggatacgtaacatgactgttggagggaatgcacataggaagaggtagtgaattatgtgtcaagtgccccaacaaaaggctgtcagtgtttgtctctgacacattgttggggagaaaggtggagtcacaggacacactgccatgggacccacgagacttgatcctacatcccacagcgggcagcctgcatcaacgtggtcatgcagggatagaaacacagccacagaaagctttcacctgcccaagcagcatctcccaagagccagcatgggtgctgtctctgctctgcttcttcctggactgtgtctcagagccctgagttctccctcacccagtttcccaatccccctcttctccactggttaccaggggttaggggagtggggaggggaaataaacgtttaaagggtacaaacttttcacttgggatgatgagaaagttatggaaattcataatggtgatgactgtatcacttttttttcagaggtggtaacttgctctgttgcccaggctggagtgcagtggtacaatgatagctcactgcatccttgaactcttgggtctaggcaagcctcctgcctcagactcctgagtagctgggactacaggtgcaagccaccatgccaggcaattctatcacattgtgaatatacttaacaccactgaattttacagttaaaagtgatttaaatggcaaattttatgttgtgtgtattctatgacaattaaaaatacacttgttcaaatgtcaaaatatatatgatgttatattcataaaattttccttttcacacttatatatttatcctattctaactcattctcatcaattaaaaaagtactgtaattactggtcattatgtactaaattttccataattcacattgaagccttaacccccaatattactgtatttggagacagagcattacagagggtaattaagatgaaatgagatcataaggaccggcatccttataagaggagattagaaaatggacaacataaaatgagatgaggacagagtgagaaggtggtcatctacaagtgtggacacatcttcagtttgtgtggagtaacagttgaagggctcgcccatcctataatgaaagttggaacaggtgccttgggcgggctccaggattaactgatctagtcactgcatcccactgtgggaccccagagggaaagaagcactgtggagattcctgagacattagaaatggagcctgagaaatttccaggacacccacatgggctccaggtgaagcaggggcccagaaggccttgtctgagccctgagtgtgacgcagcacctggccactagggggaggcaaactctgtgaatcctaagggacctgagctcttgctctgagccctgcccttgttaatcaccagccctgggagggagccgatttgcatggaatgtgatgtccctgcccacttcttcactgagggaataagaggctttagggcctcaggctcagctgagagactgaagaacccagcattgcagcagctccaccatggcctgggctcctctgctcctcaccctcctcagtctcctcacaggtcagggtgggcagtgggctgggcccccaaagggacccccacctcccagcctccatctccccatccctgctcttcctcctccaacagctcatcagccacccaccaacaggagccctc

SEQ ID NO: 27985 - DNA, 2300 bp, Homo sapien
tatccagtgtttaaaatatccttgtttgtaactgttctgcttttaaccggtgtacaatgtggacaaaatgtaagcttacactctgactttgagtagaagcccatcttctcccaacaggcagaggagaagctggtgtggagaacatggaaaacacaggagctcagggtttcccaggacagagaagcgagtgagcctggagccctaaaagcaagggtggggctgtgagttgggctgtgggtgtgtgcaggggccacagtgtgaagggcatgcttcagaggccacaggatttggattttataataagaatgatgagttactgaaggggtttaagccaggtagtaccttccctgcctcatctatatgagagggatctgtatccaaatgcctggaggagagcgtgcctgagaaaagtgagtgatcctgattctagattattcactaaagcacctcgtgagtctagaaacccaagggccatttgcacagttagcacaagagtagacgtggcaacattgagaagtgatggtctctgcctttgtctcctctggcattcaatacttgcaaaaacactttgcaggtaaaataaatactgatatttcaaataacctgaaagcatccagtaaaaaaataaaggtggcaatatcaagatacaaacaaattgtataacatttaggacaaatcgtttaccaaaaaatatgacacgactgtgaagaaagtgacgttttacttagggagataatggctaacctcttaaaacagagatatatgtcacactgtgacaggaaagtctacaaaatctcttaatgttcctacatcacaaaattgagtcaaatctctataaaacatatgaaaccattagatgtataacttttgctaaattgctgtctttaacatgtattggatcatttatttttcctggaaaattctcattcttcactgtccttttgaacaaccccagctgcccttcaacccagctcctcagctgacccatttttcatgatgcccaccctgatggcacatgtgggcaactcgatttttctagaatgccatgcaggggtgctgacaactttaaaagttatatagtacatggctgcacatcccacagaccaagactacttctgggagtgagaaatcacagtaataatgcatagcatgatagaagcagtgtctgggaatcagaccatggatatgtgaatacagacagtgactggagagctgcagagaccagctgggttctgaagtctctgagctttgggaaagtgtgtttcctgggaccagcgtcggatgttgtggggctgccctgtggttctgacacagctgctcagtaaggagcattcactccaagaaatccaggccttgaggctgggccctgtgctcactgatggagacttggcagctgtgtcccctctggcctggcagagttccctgagcagggacctgtgtatggtctcaacaggtgcttcctcccagggccttgcaaaaagaaaagcaaaccttcctcctgctcagtctgcagagagagcagagctgcatccccaggtctcaaggaggggcccggcaatccctgggtggaaacacatttgcatgagcagcccctcctctgcaagggtgggaagaaaaggaggcctggggcagcccagtcccactgtggggtaagcggctgtgtccaccatggcctggaatcctctcctcctcctgttcctctctcactgcacaggtaggaaaaggcctcagagaccagggtcagccacacagcctgattctgactcttgtgtcaaagatcactaaaaaaaatattaccttggtttctgtcttaaagcctatatatgcctgtgttccaggttccctctcgcagcctgtgctgactcagccaacttccctctcagcatctcctggagcatcagccagactcacctgcaccttgcgcagtggcatcaatcttggtagctacaggatattctggtaccagcagaagccagagagccctccccggtatctcctgagctactactcagactcaagtaagcatcagggctctggagtccccagccgcttctctggatccaaagatgcttcgagcaatgcagggattttagtcatctctgggctccagtctgaggatgaggctgactattactgtatgatttggcacagcagtgcttcttacagtgacacacacagatggggaagtgggacaaaaacttcaccctgatctgggtcttgttctgtaacagtttttaaattttaaaataaccagccaagggacaaactaaatttggaaataactttctagttgtaaaagg

SEQ ID NO: 27986 - DNA, 2300 bp, Homo sapien
tgccctcagcctaagagctgatggggcatccaccaggaagcgcatccgtgggcagggaggaggccgtgggcagccttctcctgtatgtgagacactgctcagcctcggtgaccccctgttcattaaggtgggaggaaaggaaaacaaaattcactgtgaacatctatgcatcatcaaagaaaaagcaatgagaagaaacaggaagtgaagcccagctctaatagtttatttctacttggaaataaataaaacaatatgcctgatgtgttatataaacacaataaactttttataaaaactatgaaaattatgtaaaggagcatggcttacactaaaaggaacatttaaaataatgacacccttgaaatgcaatcccaaaacacagcatccattttatttcagttacatatacggactggttttatttaaatgcctgcaataaatctcactattttgttgtttaaatggagcatttaaaatctcattgtggccaggcgcggtggctcacgcctgtaatcccagcactttgggagtctgaggtgggctgatcacaaggtcaggagttggagaccagcctggccaacatggtgaaacccagtctctactaaaaaaatacaaaaattagccgggcatggtggcgcgtgctggtaattccagctacttggaaggctgaggcaggagaattgcttgaacctgggagatggaggttgcatttagctgagatggtgccactgcactccagcctgggcaacagaccaagactccggctcaaaataaataaataaataaacaaacaaataaataaaaaatctcattgtattgcaactgtctgatgatacattcacaagtataaatatcaacataaccatccagctgtttccctccatccacgtaaaattccccaaacaaatatttgttaagagtccagggtgtatcatgccagaactcatgcaatcataaacacaatctatttcatttttcattttgattaacagaattatcttttttcttaagattattgtttttagtttattagattctagatgtcattacagaccaaagatgaataattttcatcatcttcaagccacccccacaagactcactactgaatttgaaccataatttttccctggaaatcctagttggggtgctcgatgctaagagctatcacatatcaggctcacctgaggacagactctggtcgtcaaaccaagttaaaattttaattcttcccatgttcaaagactgaacatctttgctctttttgctcataagtgaaacactccaaagacatttgccaggatcccccacagactggcattcagtgcttggaggacagactcctaggcaagatccttggtcacagtatccggatgactatgactgcaaatctggggaagtagagggagaacaaagatttaccaggaaaaccctctgggaattcctccccagggcatcccagaggtaagagctccctttctcctcagcgcagcaggatccacagaggaagtggagccctggccaccagggaggagtcacatgagaggagaggacccggtgtccaacactggtggggaagtgagtccatggggccggtccccgctctgggcttgatcctgaaataaaaggactttgtgtagacatcacctgagtcctctacaatgtacagccaaagagccatagacagattcactcctgaggagtccagtagagcgtgaagactgccctgaggtcacaggagggagacacaggtgccaccttactgggccgggacttgggagcgggggcagtggccagaaaacagggcggggcggaggcagcggtgaatctcagaggctctggtcacctgatcacagaacggtttgccttagtctggacactagggggcgcttggggaccatttctgagaagacttggggtaatcagagcagaaccaggcacctgccctgcctgatgtcctctgctcagggctggcagctgtgtcctgtgtcctccccaccccctgggaccacaaagctccacccctgccacaccctgacatactcaagcccaggagcctgacccagggctcagggtggggtcaaaaaccggggggatctgatttgcatggatggactctccccctctcagagtatgaagagagggagagatctgggggaagctcagcttcagctgtggtagagaagacaggattcaggacaatctccagcatggccggcttccctctcctcctcaccctcctcactcactgtgcaggtgacaggatggggaccaagagaggggccctgggaagccca

SEQ ID NO: 27987 - DNA, 2300 bp, Homo sapien
taatattttataaaaatggtgtcaattaatatgttgaataaaaggtatttttgagggggttgatttccagccatctcacaggaaaacaactgcatggtttgcattaactttggactgtgctgcgagtgtcctccaaaggatctcgcttactcccttatgagtgacatgggctgggatgctgtggtagagcacactctggctgatgtcttgtatctcctggagacagaagtggatggaggcacagtcctccatgggaaccctgaacaggtccctctttcttttcaaatatggactttctggggaatgatactggacggcttctgtagttgttgttgttttttgaactgtctcaaatgttttcccaaagatgctacagaacatagcctatccatttagcaagtgaaaaggctgaataagactgggagagactccctgctcatcatcattcttcttccacttccagtgactgctcatattctgtgccataagccaacagctactgatcccaagatcttgtaatccctctgtaaaactggtgctgtactgcataccttgccagctgggactttttatcttactgcattttccaggaataaataaccttgtcccaaaaacaaacatatttaaagacatttccttctgtggacactgattccatgctatctgttttccaaggaagtggtgagcccgtttctgagaacacctggtatcaatggctgtcccttccaaaccaagcaaaaagtgatttcttgtcggtgtggatttggttttgttattaattttaaaacatacctttgaagacttagatctctgaaactactagatctctagaagtgtaattgtgaaaaaagtttgcttgcatcatcaacaacatgaaaaactctttctaaataaaatttgttttgaagttaaaaaaaagaataatgcaagattggaaactgggaggtctgaagattcccaagagcactctcaattctgaagctaattttcagctcagggaccccaaacagcccttcacttcttatgagtccctagaaggactcacatgactcactgaaaactgtgacattcattaatgtgatttttctacagtgaaataatacagattaaaataattcaaggaaagagacacatgggcagagttcaggagaattccaagcacaagcatccatttgtcctctcccagtggagtaatagacaacgctgcattctgccggcaacaatgtgtgattctatgtaggaagcattgccaaccagcaaagctcacccaggcttggtgtccagaaaaattttgattggtggggtgggtgagagtggggttgttatgtagaccttgatgaccatcctcatggctcacttgagtttccactgaattgacaataaaacttcaatcttcaacctttggtcattttcttttaaaaaattttctaaagaaaattattttaaaaagtctcatataaacgagctgtttatccaatatgaggctcaacgcaaatagtttcaaaaagtcagtaggtcattaaaacaattatttagtcattcaaactaaatatttagtcattcaaacgttgttatctggtgttcagatagcaacgaacaccatgtagcactaaaatcgcattatagtcacaggggcaggatttcagcaacagcaagagaaagtaatacaaacaggaatgagcaaagaatagacaagtaatgggtatgaattggcctgggaaatattgtggcaatgtccaaagacaaatcaatagttatttgttaaagaagtgaaagacaacacattctcagtccaggaaagccaccagggggtggtctgggtctcttggattgtaagaagctcaagaggttcaaacttaatgaaccctgcacagatgctcactgactcatggaaatgttagagcagctgcttcctcccacaggacaaatccacagcacacagccaccctgggctggccccccacagtgtagctgctctcagggctgtggacccaggtggtgataaaggcagtaaagatttgcataaagcagcacacagcacaccccctccgtgcggagagctcaataggagataaagagccatcagaatccagccccagctctggcaccaggggtcccttccaatatcagcaccatggcctggactcctctctttctgttcctcctcacttgctgcccaggttaagagagatttcaaataccagcctttggagggatccctttttctccctttctaattcctaatatatgtctgttttttttgtttcagggtccaattcccaggctgtggtgactcagga

SEQ ID NO: 27988 - DNA, 2300 bp, Homo sapien
taaaaatcacctagaaagggagtaagttgatgggtaaaatgggttgaaaaattaaacaagatgaaccatattgatgatggtcaaagttggctgattggtgcaaacaattcatcagaaaattctctgtatatttgtatgactcaaacgtttccatgctaaccagtgaaaatatccttttttgcaatgagatgtttatgttctgcttttaccaggtgtacaatgtggacaaaatgtaagcttacactttgacttcaagtggaagcccatcttctcccaacaggcagaggagaagctggtgtggagaacatggaaaacacaggagctcagggtttcccaggacagagaagtgagtgagcctggagccctaaaagcaagggcaggggctgtgagttgggctgtgggggtgttctggggccacaatgtgaagggcatgttgctgaggtctcagggttcaggtttcataataacaacgaggagttactcaaggggcttaaaccagggagtgccctgcctgccctatctgagtgacagggatctctctgaatgccttgagaagagagtgtctgagaaaagtgagtgatcctgattctagattattcgctaaagcacctcgtgagtctagaaactcaggggccatttgcacagttagcacaagagtagatgtggctaaattgagaagtgatggtctctgcttttgtctcctgagacatccaactcatttgcaagagaattttgcaggtaaaatacatactgatctttctaataaactgaaaacacctagtaaaaaaatacacgtggtaatagcacaatgcaatttgtataacagctagaacaaattcttgaccaaaaaatatgatgcaactgtgcagaaaatgacgttttacttagggagataatggctaatttcataaaatagtgaaatatgtcacactgttcactggtaaaggtaagtctagcaaatctattagttttcctgtatcacaaaatcgaatcaaatctctttaaaacgtatgaaaccattgtaaatataacttgtgttgcattgctgtctttttttttttttttttttttttttagacagaatctcgctttgtcgcccaggctggggtgcagtggcccaatatcagctcactgcaagctccacctcccgggttcccgggttcacgccattctcctgcatcagcctcccgagtagctgggactacaggcgcctgccaccacgcccagctaatatgttgtatttttagtagagacggggtttcaccgcgttagccaggatggtcttgatctactgacctcgtgatccgcccgccttggcttcccaaaggaattgctgcctttaacatgtcattgatcctttatttttcctggaaatttttcattattcaccatctttttgaacaaccccagctgcccttcaacccagctcctcagctgaccccttttccatgatgcccactctgatgacatatgtgggcaaatagatttttctaaaatgccctgttggggtgctgacacctataaaagttatgtatgtacaggtctgcacatcccacagaccaagactacttctgggagtgagaaatcgtagtaataatgcatagcatgatagaagcagtgtctgggaatcagaccatggatatgtgaatacagacagtgactaaagagctgcagagaccagctgggttctgaagtctctgagctttgggaaagtgtgtttcctgggaccagcgtcagatgttgtggggctgccctgtggttccgacacagctgctcagtaatgagcattcactcagagaaatccaggccttgaggctgggccctgtgctcactgatggacactcggcagctgtgtcccctctggcctggcagagttccctgagcagggacctgtgtatggtctcaacaggtgcttcctcccagggccttgcaaaaagaaaagcaagccttcctcctgctcagtctgcagagagagctgagctgcatccccaggtctcaaggaggggcccggcagtccctgggcggaaacacatttgcatgagcaacccctcctctgcaacagtgggaagaaaaggaggcctggggcagcccagtcccactgcgggggtaagaggttgtgtccaccatggcctggactcctctcctcctcctgttcctctctcactgcacaggtaggaatagacttcagagaccagggtcagccacccagcctgattctgactcttctggcaaagatccctgaaaaactttaccctggtttctgccttagcacccattaatgtctgtgtttccaggttccc

SEQ ID NO: 27989 - DNA, 2300 bp, Homo sapien
ctcagtaggatgcaaaaatgctaatggaagtgagcaggggatggtttatgggggaatgaggggacggtgtggggtcaggtgtggtaaggagggtgcaccctgaagaggagagtgtccattgtgactcacaggaggaggaggcccggggcccagagcagtgacaaaaggaggacctggaaggacctgggccctcaagacacacagagactggggttttggtctgtccctgagggtccctcaggaggatcacataaaaaatccatagtcagtgtcctctgtccaaggctcactgtcccagctgttgtccctcccggatcctctgggtgtccacatcctgtagttttggacctgttcttctctctgccctcaacctaacagctgatggggcatccaccaggaagcgcatccgtgggcagggaggaggccgtgggcagccttgtcctgtatgtgagacactgctcagactcggtgaccccctgttcattaacgtgggaggaaaggaaaacaaaattcactgtgaacatctatacatcatcaaagaaaaagcaatgagaaaaaacaggaagtgaagcccagctctaatagtttatttctacttggaaataaataaaacttaatatgcctgatgtgttatgtaaatacaacaaacatattttaaaaactataaaaattatgtaaaggcacatggcttacactaaaagaaacatttaaaataacaacacccttgaaatgcaatcccaaaacacagcatacattttatttcagttccatgtatggactggttttatttaaatgtctgtattaggtttcactatttggttgtttaaatggagcatttaaaatcttattgtattacaacttatatcaacataatcatcttgctgtttttctgtatccccttaaaattccctaaacaaatatttattaagagcccagggtgtatcatgccagaactcaggcagtcacagacataacctgtttcatttttcattttgatcaacagaattatgttttctgttaagcttgttgtttttagttcattagattctagacgtcattacagatcaaagacgaaaaatttctatcatctttaagccacccccacaacactcactactgaatttgaaccaaaatcttctcctagaaatcctcgttggcggctcgatagtaagagctgccatgtatcaggctcacctgaggacagacgctggttaaaccaagttgaagttttaattcttcccatcttcaaagactgagcatctttgctctttttgctcataagtgaaacactccaaagtcatttgccaggatcccctgtagatgggcattcagtgtacagactcctaggcaagatccctggtcacagtatccaaatgactttgactgcaaacctggggaagtagagagagaacaaagatttaccagaaaaaccctctgggaatgtcttcccaaggcaccctagagggaagagctccctttctcttcagctccacaggatccacagaggaaggagagctctagccagcaggaaggagccacatgagaggagaggaccaggtgtcccacacaggtggggaagtgagtccatggggctggtccccgctctgggcttgatcctgacataagaggactctgtgtagacaccacctgagtcctctgcaatgtacagccacagagccatggacagattcactcctgaggagtccagtagagcgcgaagactgccttgaggtcacagcgggaagacacaggtgtcacttgagctggcctggacctgagagagggggcagtggacagaacagaggggaggcagtggtgtgaatgagaggctctggtcaccttatcatagaatggtttaccttggctggacaccaggggacgctgggggaccatttctgagaagacgcgcggggggcgggggtgggcggtgatgggagcacaaccggccacctgttgtgcctgttgtcctctgctcagggctcacaactgtgttctccccaccctctgggaccacagagctccacccctgccacaccctgacatcctcaaggcaaggagcctgacccagggctcagggtggggtcacaaagctgggggggtctgatttgcatggatggactctccccctctcagagtatgaagagagggagagatctgggggaagctcagcttcagctgtgggtagagaagacaggactcaggacaatctccagcatggccagcttccctctcctcctcaccctcctcactcactgtgcaggtgacaggatggggaccaagaaaggggccctgggaagccc

SEQ ID NO: 27990 - DNA, 2300 bp, Homo sapien
tgtaatgttcagaatacaaaatcaccatgtaaaaacacctcatggctgggcatggtgactcacgcctataatcctggcactttgagaggctgaggtgggaggattacttgggatcaagagttcaaggacagcctgggctacaaagcaagagcctgtctcaagaagaaaaacgaaagaaagagagaaacaaagaaagagatagaaagaaagaaagaagaaagaaaatctcttatatttcaatacttagaaaatctcttatatttcaatatttaaacaaggacacaggaaaaaacccaaaacaaaattaataaaacaaatcaaattgcaacatcattagagagagtaaaatatggctgggcacagtagctcatgcctgcaatctcagcactttgggaggctgatttggacggatcatctgaggttagaagttcaagaccagcctcaacaatatggtaaagcctcgttcctacaagataaaataaaataaaattgctagctgtggtggcacatgcctgtaatcccagctactcaggggtccaagtcacaagaattgcttcagcctaggagggagaggttgcagtgagccaagatcttgccactgtactccagcctgggtgacagtgagacattgtctcaaagaaacaaataaataaaaatgaaacagtaaaatacttaagaataaagttattcaaagaggtgaaagacttgtagattgaaaagtataaaacattactaaaagaaattaaagaatacacaaataaatggaaagaaatcctttgttcatatactggaaaactcagtattgttatgctaacaaaacaaaccaggaggaattgacagattcatttcaatctctgaaaacattccagtaatattttatgcaagaatagaaaaaaattaaacctaaaatatatatagagtatgaagggaacctaaacagtcaaagtcatcttgtaaaagaagaccagtgttggaggtctcacactttctgatttcaaaacatactacaaagctacactaatcaaaacagagtggtatatatgtaacatacatactgacaaataaaatagaactgagtgcctagaaaaaaaactcttagttatacagtcaaataattttaaacaaggttgtcaagacttttcagtggaaacagtacagtctttcacaaatatagacgttctgggaaataatactgaatggcttttgctgttgttgtttttgaatggtctcaaatgttctctcaaagatgctgcagaacatagcttattgattttgtaagttaaaaggctgagtaagactgtgagagactccctgctcatcatcattcttcttccacttccagtgactactcttatattctgtgccataagccaacagctactgaccccaggatcttttaatccttctgtaaaactgtcattaaaaaaaaattgtctaaagtaaattttttaaaaaattctcacttaaaccagctgtttatccaatataaggctcaacacaaatagttacagaaagccagtaggtcattaaaacaattaatttagtcattcaaataaaaatgaacaccatgtaacactaatatcaaattatagtcacaggggcaggatttcagcaacagcaagagaaagtagcacaaataggaatgagcaaagaatagacaattaatgagtgtgaattggcctggaaaatattgtggcaatgtccaaagataaatccacagttatttgtgaaacaagtgaaagaccacgcattctcagtccaggaaagccaccagggggtggtctgggtctcttgaactgtaagaagctcaagaggtccaaacttcatgaaccctgcacaggtgctcattgactcatgtaaacgttagagcagctgcttcctcccacaggacaaatccacagcacacagcctccctgggctggcccctcacagtgtagctgctctcaggcctgtggacccaggtggtgataaaggcagtaaagatttgcataaagcagcacacagcacaccccctccatggagagagctcaataggagataaagagccatcagaatccagccccagctctggcgccaggggtcccttccaatatcagcaccatggcctggactcctctctttctgttcctcctcacttgctgcccaggttaagagagatttcaaataccagcctttggagggatccttctgtctgcccttctaatttctaacatgtgtctgttttttgtttcagggtccaattctcagactgtggtgactcaggagccctcactgactgtgtccccaggagggacagtcac

SEQ ID NO: 27991 - DNA, 2300 bp, Homo sapien
gcagtctccagctcccaggttcaagcacttctcctgcctcagcctcccacgcacctgggaccacaggtgcgcaccagtatgcctggctaatttttgtgtttttagtagagatggggtttcttttttttttttttttttttttgagaccgagtcttcctctgttgccaggctgaagttcagtggcgcaatctcggtacactgcaacctctgcctcccaggtttaagcaattgtcctgcctcagccttctgagtagctgggactacaggcacccgccaccatgcccagctaattttcacatttttaatagagatgggatttcaccatgttgcccaggatggtcttgatctcttgacctcgtgatccgcccaccttggcctcccaaagtgctgggattacaggcgtgagccactgcacccggcctaagatggggtttcatcatgttgaccaggatggtctcaaactcctgacctcaagtgatccactcacctcagcctcccaaagtgctgggatgacaggcgtgagccacagtgctcgacctagtacattgtttaaatggtgcatgtaaaacctcatggtactacaactgcctggtgacagactcaccagagtaaataactatcctgctgttctccaaccacatgggattgccccaaaaaatatttgttgaatcccaggtgtatcatgccagaactcttgcagtcatatatacaatctgtttcattttaataaataggattatcttttttcttcagtttactgtttttaatgtatcatattctagatttcattacacatcaaagatgaataatttctatcatctttcagacatgcccaaaacactcattagcgattttgaacagtattctttcctaaacatcctagttggaatggttgatcctaaaagctaccacgtgtcaggctcacttaagtacagactctggtcaaaacaagctgaagttttaactcttccatcttcaaatactgagcatatttgcttgttttgctctttagcaaaacactgcaaagtcatttgccaggatcccccgcagattggcattcagtgatggagaacagactcctaggtgagatccctggtcacaggatcccgatgactatgactgcaagtctggaaaagaagagacagaacaaagatttaccagcataaccctctgagaatgtgccccaggcatcccggagggaagagctccctatcgacccaggactgcagaatccacagaggaaggagagctctggccaccagggagcagccacacgagaggagaggacccagtgcccccacaggtgaggaaatgagtccatggggctggtcactgctctcgatttcattctgacataagaggactttgtgtagtcaccacctgagtcctatacagtgaacagccaaggagacatggacagattcacccctgaggaacccagtagaatgtgaagtctgccctgagctcacgaaaaaaatgactcagggggctgcctggcctggccctgatggagggggccatggacagaacaacggggagtgaggggtgtctctgagaggctctggtcaccttgttatacaatggtggtgtacatgaccaaaatggacaccaggggatgcctgcgtaccattactgagaagactgggtgtgatgagagcaggaccagcgccacctgtcctgcttggtgccctatgcttagggcttacagatgtcaactctgcaccccctgggaccacatagccccacccctggcactctctgacatcctcaggcagaggagcctgacccagggcccaaggtgggatcagaaagctggagggtctgatttgcatggatggaccctccttctctcagagtataaagaggggcagggagagacttggggaagctctgcttcagctgtgagcacagaaggcaggactcgggacaatcttcatcatgacctgctcccctctcctcctcacccttctcattcactgcacaggtgcccagacacagggtcaggggaggggtccaggaagcccatgaggccctgctttctccttctctctctagaccaagaatcaccgtgtctgtgtctctcctgcttccacggtcctgggcccagtctgtgttgacgcagccgccttcagtgtctgcggccccaggacagaaggtcaccatctcctgctctggaagcagctccgacatggggaattatgcggtatcctggtaccagcagctcccaggaacagcccccaaactcctcatctatgaaaataataagcgaccctcagggattcctgaccgattctctggct

SEQ ID NO: 27992 - DNA, 2300 bp, Homo sapien
ctgaagttcagtggcgcaatctcggtacactgcaacctctgcctcccaggtttaagcaattgtcctgcctcagccttctgagtagctgggactacaggcacccgccaccatgcccagctaattttcacatttttaatagagatgggatttcaccatgttgcccaggatggtcttgatctcttgacctcgtgatccgcccaccttggcctcccaaagtgctgggattacaggcgtgagccactgcacccggcctaagatggggtttcatcatgttgaccaggatggtctcaaactcctgacctcaagtgatccactcacctcagcctcccaaagtgctgggatgacaggcgtgagccacagtgctcgacctagtacattgtttaaatggtgcatgtaaaacctcatggtactacaactgcctggtgacagactcaccagagtaaataactatcctgctgttctccaaccacatgggattgccccaaaaaatatttgttgaatcccaggtgtatcatgccagaactcttgcagtcatatatacaatctgtttcattttaataaataggattatcttttttcttcagtttactgtttttaatgtatcatattctagatttcattacacatcaaagatgaataatttctatcatctttcagacatgcccaaaacactcattagcgattttgaacagtattctttcctaaacatcctagttggaatggttgatcctaaaagctaccacgtgtcaggctcacttaagtacagactctggtcaaaacaagctgaagttttaactcttccatcttcaaatactgagcatatttgcttgttttgctctttagcaaaacactgcaaagtcatttgccaggatcccccgcagattggcattcagtgatggagaacagactcctaggtgagatccctggtcacaggatcccgatgactatgactgcaagtctggaaaagaagagacagaacaaagatttaccagcataaccctctgagaatgtgccccaggcatcccggagggaagagctccctatcgacccaggactgcagaatccacagaggaaggagagctctggccaccagggagcagccacacgagaggagaggacccagtgcccccacaggtgaggaaatgagtccatggggctggtcactgctctcgatttcattctgacataagaggactttgtgtagtcaccacctgagtcctatacagtgaacagccaaggagacatggacagattcacccctgaggaacccagtagaatgtgaagtctgccctgagctcacgaaaaaaatgactcagggggctgcctggcctggccctgatggagggggccatggacagaacaacggggagtgaggggtgtctctgagaggctctggtcaccttgttatacaatggtggtgtacatgaccaaaatggacaccaggggatgcctgcgtaccattactgagaagactgggtgtgatgagagcaggaccagcgccacctgtcctgcttggtgccctatgcttagggcttacagatgtcaactctgcaccccctgggaccacatagccccacccctggcactctctgacatcctcaggcagaggagcctgacccagggcccaaggtgggatcagaaagctggagggtctgatttgcatggatggaccctccttctctcagagtataaagaggggcagggagagacttggggaagctctgcttcagctgtgagcacagaaggcaggactcgggacaatcttcatcatgacctgctcccctctcctcctcacccttctcattcactgcacaggtgcccagacacagggtcaggggaggggtccaggaagcccatgaggccctgctttctccttctctctctagaccaagaatcaccgtgtctgtgtctctcctgcttccacggtcctgggcccagtctgtgttgacgcagccgccttcagtgtctgcggccccaggacagaaggtcaccatctcctgctctggaagcagctccgacatggggaattatgcggtatcctggtaccagcagctcccaggaacagcccccaaactcctcatctatgaaaataataagcgaccctcagggattcctgaccgattctctggctccaagtctggcacctcagccaccctgggcatcactggcctctggcctgaggactaggccgattattactgcttagcatgggataccagcctgagagcttgcacagtgctccaggccaatggggaactgagacaagaaccctcttcctcctccgccaggagggtgagtgc

SEQ ID NO: 27993 - DNA, 2300 bp, Homo sapien
agcaaagaaaagtttcattaccccttaggaattactccaagatctaagaaaattaattccagagcttcaagagtttactcctcagaaacaacagcatgaatacattaggtagtgaatgttcttggtcttctcaatgaataacctctgaaaggttcagagtatacgtttcaaaaagataagtgcataactttcacaaaaatgtaatcttaacttatgtcatcaattttaattggtatatatatttctggaaaaaaaagcagtatgatggtaaaagaaatgtaaaaaagcctttgtaaaacccagtgcttacagtccaccaggatagcacctgtgaagcaaattttctttgctgaagatacaccgccttttagaataatagcaagatagtttgaatttgtcttcttctctcacaacaatctaaaaattaacatgatcccatttatatgaaatatctagaaatatatctgtacatgtggacattcccatcgcacacctcccatccaggctgtcctaaagtggcatctcctcttcttctgctcatgttctccccctctcctcacctctcctgctgacacgtggctcctccctgccttcctctccagtagccccagcagatcaggcccaaccagtcaacaagctcctggacttggggaacaaaagtacatcttcttggatttctgaggacttgccctgccagggtgtctttctcaatccaatctctccttcccggcagtccacttctcctagatcctgtaatttatctaatcttattcatctgtatctacttcgtggacttccttacatcttcacctgaacaccaggaatcttcaggtcatgcccatatgcccttggttctcctgtagtcccttcttccttcttcccctgtgatgccaccaagtcgaagtctcttctcagaccctggagtgcagcagggacttctctggtctctgccccagggattaagggggtggaagagtggactcctgtgcccttcctatgcctgtgttttcatcagggttagctgcaaaaggtagggattaggctgtctaggtagggattatggcattaggtagggattatggcatttccagagctgagctctatgcccagcaaaagatacgtgctcagcaactacttgacagagacctacctcttatcacatgggacacattatactggacccaggatggggctgaactgggagaggtagctgtggacctgctcctcgctctgccctcaccctaagagctgatggggcatccaccaggaagagcattcctgggcagggagagggccatgagcagccttgtcctgtatgtgagacacagctcagcccggtcacaagatccagatgactatgactgcaattcaggggaagtagagaatgaagattgaccagaataaccctctgggaatgtgccctgggcctcctagagggaagagcttcccttctattcagcgctgcaggatccacagaggaaggagagccctggccaccagggaggagccacatgagaggacccggtgtccccacaaatgggaacgtgagtccatgaaagtcggtccctgctctgggtttgattgtgacctatgaggacattgtgtagtcaccacctgagtcctctacaataaacagtgagagcgccacggacagattcactcccgaggagcccagtaaagtgggaggactgaggtcacagggagaagacacaggcaccacctggcctggccctgacagggggcagtggacagaacagtgcggaggcagtggggtctctagaggctctggtcaccttgtcataccatggtttgtctcggtctggacactagagggcacttggggatcattcctgagaagactgaggttgatcagagcagaaccagccacctgtcctgcctagtgtcctctgctcagggctcacagctgcgtcctttacacccgtgggaccacacagccccacccctgccaccccctgacatcctcaggcatagggacctgacccagggcccagggtgggattagaaagctgggggtctgatttgcatggatggaccctcccactctcagagtatgaagaggggcagggagagatttggggaggctctgcttcagctgtgggcacaagaggcagcactcaggacaatctccagcatggcctggtctcctctcctcctcactctcctcgctcactgcacaggtgactggatacaggtccaggggaggggccctgggaagcctatggattcttgctttctcctgttgtctctagaagccgaataatgatgcctgtgtctctccc

SEQ ID NO: 27994 - DNA, 2300 bp, Homo sapien
atgtggtaaggagaatgcagcctgaagaggagactgtccattgtgactcataggaggagtagggccggggcctacagtagtgataaaaggaggacctggaaggacctgggccctgaagacacacagagactggagttttggtctgtctgtgagggtcccatgaggataaaaatccatggtcagtgtcctctgtccagggctcactgtcccagctgttgtccctcctggatcctctgggtgtccagattccgtagctgtggacctgttctcctctctgtcctcagcctaagagctgatggggcatccaccaggaagcacatctgtgggcagggagggggccatgggcagccttgtcctgtatgtgaggcactgctcagcctcggtgatccctgttcattaacgtgggaggaaaggaaaacaaaattcactgtgaacatctatgcatcatcaaagaaaaagcaatgagccaaacaggaagtgaagcccagctctaatagtttgtttctacttggaaataaataaaacttaatatgcctgatgtgttacgtaaatgcaataaacattttttgaaagctataaaaattatgtaaaggaacatggcttacactaaaaggaacacttaaaataatgacacccttgaaatgcaatcccaaaacacagcatacattttatttcagttccatatatggactggttttatttaaatgtctatattaaatctcactattccatttttaaatggagcacttaaaatctcattctacggcaactgcctggtgatacatttaccagtggaaatatcaacaaaaccatccagctgttttcctccatccccatagaattccccaaactagtaattattaagagcccaggatgtatcatgccagaattcatgcagtcgtaggcataacctgtttcatttttcattctgatcaacagaattacaatttttcttaagcttgtttttagcttattagattctagttgtcattacagatcaaagataaataattttctatcatccttaagccacccccataacactcactactgaatttgaaccataatttttccctaaaaatcctagttggggtgcttgatgttgagagctaccacgtatcaggctcacctgaggacagactctggttaaaccaagttaaaattttaattcttcccatcttcaaagactgagcatctttgctctttttgttcataagtgaaacactccaaagtcatttgccaggatcccctgcagatgagcatttagtgtacagactcctaggcaagatccctggtcacagtatccagatgactatgactgcaaatctggggaagtagagggagaacaaagatttaccaggaaaaccctctgggaattcctccccagggaatcctagaggaaagagctccctttctcctcagcgccacaggatccacagaggaaggagagctctagccaccaggaaggagccacatgagaggagaggacctggtgtccaacacaggtggggaggtgagtccatggggctggtccctgctatgggcttgatcctgacataggactttatgtagataccacctgagtcctctacaatgtacagccaaagagccatggaaagattcactcctgaggagtctgaagactcctcagtagagcgtgaagatagccctgaagtcacagggaggagacacagacaccacttggcctgccttggacctgagagagggggcagtggacagaatggggggaggaagccatgtatctgagaggttctggtcaccttatcatagaatggtttaccttgatctggacaccagagggcgcatggggatcattcctgagaagacaggggtgatcagagcagaaccagccgcctgccctgcctggtgtcctctgctcagggctcacagctgtgtcctccccaccccctgggaccacaaagctccacccctgccaccccctgacatcctcaagccaaggagcctgacccagggctcagggtggggtcacaaacctggggggggtctgatttgcatggatggactctccccctctcagagtatgaagaaagggagagatttgggggaagctcagcttcagctgcgggtagagaagacaggactcaggacaatctccagcatggcctggtcccctctcttcctcaccctcatcactcactgtgcaggtgacaggatggggaccaagagagaggccctgggaagcccatgcgaccctgctttctcctcttgtctccttttgtctcttgtcaatcaccatgtctgtgtctctctcacttcca

SEQ ID NO: 27995 - DNA, 2300 bp, Homo sapien
gaaacaaattcctagaaagacaggaactaatgaactgactcaagaacaaacagaaaatatgaatggatccaaaacaagcaatagaattagtaatcaaaaaacttccccaaataaaagcccaaaatcagatagctatgctagtaaattcttaacgtttttaaaagaattaacaccaatccttcattaactcttccaaaaattagaagaggagagaaaactttgcacatctttctatgaggctagttattactcttacaccaaaatcaaaccaagaaatcatatataaaaaaagaaaactacaggccaatatcctttttttttttttttttttttttttttttggagacggggtctcgctctgtcgcccaggctggagtgcagtggcgtgatctcggctcactacaagctccgcctcccaggttcaggccattctcctgcctcagcctcccgagtagctgggactacaggagcccgccatcacgcccagctaatttttttgtattttttagtggagacggggtttcactgttttagccaggatggtctcaatctcctgacctcgtgatctgctcgccttggcctcccaaagtgctgggattacaggcgtgagccactgtgcccagccaatatcccttacagaggcaaaaatcctcaacaaaatgttagcaaacaaaatctaacaacatatataacgattacataccatgaccaagtgggatttatttaaaaaatacaaggatggttcattctatgaaaatcaaccaacaataattttatttttattatttttaattttaattttttttttgagtcggaatttcattcttgttgcccaggctggagtgaaatggcacgatcttggctgaccacaacctccgcctcccgggttcaagcaattctcctgcctctgcctcccaagtaggtgggattacaggcatgcgtcaccacgcccagctaatttgtttgtatttttagtagagacatggtttctccatgctggtcaggctggtctcgaactcccgacctcaggtgatccgcctgccttggcctcccaaagtgctgggattacaggcgtgagccaccatgcccagcctataccattttaataaaggacaaaaactacacctgcctgcagaaaaaacacttgacaaaagctaacatccttttatgatttgaaacaacaaaacgattaggaatagaaggaaactttctccaccagacaaaggcatctgtatgagactcacagctattatagtatcatacttaatggtgacactgaaagtacccctgcccctaagatcaggaacaagacagatatccactttaaccacttcaactcaacaccgtactagaggttctatagccaaggtaattaggcaagaaaaggaagcaaaaagcattcagattggaaagcaagaagtaaaaccataatggagatgacaaatacaaataactcaattttttaaaaggccaaagaacttgaatagacatttctccaaagatgatacacaaaagaccaagtaaatatattcagtgtcattaatcataaaagcaatgcacattaaaaccaccttgagataccacctcacacctagtaggatgactactattaaaaaacaaacattgttggaaagaaattagaatcctcatgcacagtcactggattgtaaaatggtataactactatggaaaacagtacagaaatgcctcataaaattaaaaacagaactactatatgttctagcaatcttacttctgggtatatatctaaaataattgaaagcagggtctcgaagagatactggcacacccatgttcacagaaggactattaaaatagccaaggggtagaagcaacccaaatgtctacccaaaaatgaataaacaaaatattatatatatatatgcacacacacacaatagaatattattcaacctcaaaaaggaagaaaatctgtcacatgctacatgtttgaaccttgaggatattatgccaaataaaataaaccagtcacaaaaagacaaatacttttgtatttgtataattccacctatatgaggtaactaaaatagtcaaattcatagaaacagaaagtagaggccggaagcagtggctcacacctgtaatcccaggactttgggaggctgaggtgggcagatcatctgaggtcaggagttcgagatcagcttggccaacatggcaaaaccctgtctctactaaaaaaaatacaaaaattagccagatgtggtggcaggcacctataaacccagctacttgggaggctgaggcaggagaattgc

SEQ ID NO: 27996 - DNA, 2300 bp, Homo sapien
attagccagatgtggtggcaggcacctataaacccagctacttgggaggctgaggcaggagaattgcttgaacccaggaggcggaggttgcagtgagctaagatcacgccactgcactccagcctaggcgacaagagagaaactctgtttcaaaaaaaattagctgggcgtagtggtggcacacacctgtagtcccagctactcgggaagctgaggcagaagaatcccctgaatctgggaggcagaagttgcagtgagtggagatcgcaccactgcactccagcctgggcaacacaccaagactccgtctcaaaaaaaaaaaaaacaaaaaacaaaaaacaaaaaaccaaaaaaacaaaaaacagaaggtagagtaatggttaccaagggctaggggcagaggaaaagggtgagtctgttgtttaatgggcattgtttcagttctgcaagatgaaaaagttctagagatctgtttcacatcaatgcttgaaactactgaactattaatttagaaatggttaaggtggtaaattatatgcgtttttaccacaataaaacaattcattttaaaaacaggccccaatcggcatggtggctcacgtctataatcccagcactctgggaggccaaggtgggagaatcacttacagtcaggagtttgagaccagcctggccaacatagcaaaaccctgtctctactaaaaatacaaaaattagccggcatggtggcacgcgcctgtaatcgcagctactcgagaggctgaggcaggaagaatcacttgaatccaggaggcagaggttacagtgagccgagatcatgccaccacactccagcctgggcgacagagtgagactctgttaaaaaaataaaataaaataaaaaataaaaaataagctagacacagtggctcacgcctgtaatcccaacactttggaaggctgagatgggaggatcgcttgagcccaagagttgaagatcagtccaagcaatgtagtgagaccccttctctacaaaaaatttaaaaacacaggcacagtggctcatacctgtaatcccagtattttgggaggctgaggcaggaggacttagtcagctcaggaattccagaccagcttgtacaacatagtgagaccctacctctacaaaaaattaaaaaattaaccgggcgtggtagagtgtgcccgtgatcacatcactgcactacaaccttggtgccagagcaagactgtctcaagaaaaaaaaaaaatttaaatttagctgggcatcatggcacacgcctgtagtcccagctactcaggggtggaatgaggcagggtggcagctgagatgggaggatcactggagcctgggaggtcgatgttgcagtgggccataattgtgtcactgtactgcagcctgggcaacagagcgagaccctgtctcaaaaacaaacaataaaaaatgggcgaaggatttgaacacttctccaaagatacacaaatggccaagcagcacatgaaatgctgctcaatatagtcattaaggaaatgcaaatcaaaatcacaatgagctattacttcacatccactaggttagttataagcaaaaacaatctcaagcgttgcagaggatgtgcagctatctgaaccctcaaatactgctggtgataatataaacttgtactttggaaaagtttggcaattgctcaaaatttaaatatggcgttaccatatgacccaacaatatcactcctaggtatatacccaagagaattgaaaatataacacatatataagctagctggaatatagccataatgctgctacaaagtgcaaacaaccgaatgtaaattaattgataaatgaataaacgaactgtggtatatccgtacaatgaaatactattcagccataaaaaaactaagtacaaacaagcatacaatacggtgtaccttgaaaatacactaagtgaataacaccagacacaaaaggccgcatattttattattttacttatacaaaatgtccagaataaggcaaattcatacagacagaaataaagtagcagctgccatgggctcgatgaagaagaatgaaaggaatatagcaggtttgaaaaatggcccccaaaatatcaggtcctaatcccttaagcctgtaaatgataccttatttggaaaaaggatctttgcagatgggaaaattatcctggactatacaggtgggccctaaatgccaccacaaatgtccttgtaagagaagcagagggagatttcacacatactctaggaaaaggtgatgtgaagacagaagcaaagat

SEQ ID NO: 27997 - DNA, 2300 bp, Homo sapien
tctggaacaaaaaggatgatgggaaaaactagtgacatttgaataaagcctggagcttagttgatactaatttactgatggacattggaattattatgaagccaaaagaagatcatttctcatagatttatttttcatgttattattttttgagacggagtctcgctctgttgcccaaggctggagtacagtggtgcaatctcagctcactgcaacctctgcctcccaggttcaaacagttctcatgcctcagcctcccgagtagctaggactacaggcgcgtgccaccacacccagctaatttttgtattttttgtacaaaaatggggtttcaccatgttggccaggctggtcttgaactcctgacctcaagtgatctgcctgccttggtctccaaaaatgctgggattacaggtgtgagccaccgtgccaggcctcttacgtacattttagatattgcaaatatcttctttacatatcagcctcatatatacattttagataatgcaaatatctttacatatcagcctcatatatacattttagatactgcaaatatcttctttacatctatgatctcttcattttgactatggtacacttcactgaacagaaatcttcaaatgcaagggtgagtaatatttaggccatgtgatttgattataatacaattaaaaaatcttttaaaaatctcatagatttcaaaaataaataacatatactatataacccttgtgttagaaagaatcactatgtaaaaaataaagtagaggttcctcttcaaagactttcctccctgtctaattacgaataaatagtaacttctcttagaagtaaaatttattcaaagacctgtgctaacattcttagatatctgctagccgtaataaagaaattaatatactttgtgttcttagctcccacaatttagcctaaatatttgcccttgcatgcttatactggtccaagcaagcattaggtcatagcctgttcctcttcctatttggaggtgtttttacctttctcagcattctacaagttacatcctccttcctttgttctcctctgcctttgcctcttttagaaagttctaagttgttagccaatcgggacaaacacagaatgtgaggtcctgttccagccaatggaaaccggacacagcagtagggtggatgcgtcaggttataaataaccctgtatcctttgtttggggtactctcgtggcaaaactgctggcgagtgtaccctttctgcagaaagtgaaaatggccttgctgagaaaattaaatttatgttcaagtgctatttctttgcggcaccagggaacaagcatttctaacaactagcaaaattaggacatatctaattgaaggataatgaacatattaccaagcggactggtgagacacagttaaactggtacttaaaggtaaatttatagcattaaatacaagagaaacaaaaaagtttacaagcaaacgaggtaggcatttttctccaaaagttgtaatgagaagtaacagaacaagcctatgaagtcacgaaggaagaaaataacagaatggaagaaatagataaaatagataagaaaataacattatagattaattaaaccaaaagcgatttacccgccccccaaaaagattgctaaaatagacttttggcagaattggtcaattcaaaaaaaaaatcaaagctgcaagtaaactgagtgggcaaactttctgtaaagggccagacagtaaatattttaagcttttcatacatggtctctggcaattaatcaactttgctgttgaagcaggaaaacaggcataaataataccgaaaggaatgggcatgtttgttgttccaataaaactttatttatggacactgaattttgaatttcatataattttcacatgccacaaaatattctctttttagccattaaaaaaacgtgaaatcggttcttagcttgctgccagctgtacaaaaacaggtggcaggctggattcaactggccccagatgtaactagaagaggacagatgttaggttcagttgtttcctcacaatcccttaagcatggatagtcaacaaagggaccacacctgagaattataacagctggccttctggtgggcaaaccatcccctgatggactggaagcctaccccccaccccaagccctggctgcgacagctctggaaccctgactgcctgggtgcccctcagctctggaaccctgactgcctggatgctcctcagctctggaaccctgactgcttggataccccctcagctctggaaccctga

SEQ ID NO: 27998 - DNA, 2300 bp, Homo sapien
ttagtgggttagaatagcttggttagaacagctagatgtggtcttatttgggacttttaaaactgagcaaaagaaaataagatgcaactccgagctatttctagacactcctctcaattttctcacctcccacaagcattgttgccacaaccttctgtctcaggggaagggcctgctttatacctgagccagcccctgaccactgcctaggcttcctggaatcttcctagcaggattctgcttctggaaaagaggaaggagtgaatatcagttctgcagaatacacatttcctttcctttctttccttcctttttttctctttctttacttctttctttctctgtcttcctttcttttttctttttttatttttttgagacagggtttcactctgtcacccaggctaattttttgtattttcttgtggagacacggttttgccaggttgcccaggctaatctcaaactcctgggctcaagccacctgcctgcctctgcctaagcgctgggattacaggcgtgagccaccacgcccggcccctgttagaactttactgtctaagtcttgcacttcatttcactttgcttgcttatttatttatgaatgaatgaatgagacaaggtctctctcttccatccaggctaaagtatgtgatgcaatcatagttcactgcaacctcgatctccctggttcaagcaatcctcccacctcagcctcccgggtagctgggactacaggcacgtgctacaatgcctggctaattaaaaaaattttttttttcttttgtagaaacagaggtcttgatattttgctgaggtttgtctggatttcctgggctcaaagatctttcacctcagcctttgatagctgggactacaggtgtacctcagtagcgggcctcatttcaccttcctttccaggggcatgctcttggctacttgcaatgccctcaagcagcctttccccagtccctagacaagaataaagaccatgggtcacacacttttataccaccttgggctctgcctactgggttcaagtgattattctgcctcagcctcccgagtacctgggattacaggcacgcacggccacgcccaggaaatttttgtattttactttataaagaataagagacaggttttcatcatgttggccaggctggtctcaaactaatgggctcatgtgatctgctgcctcggccttcaaaagtgctgggattacagatgtgagtcaccacatccggcccagaaaggtatttttaaagttttatcaggagatggtactttagaacattttaatttgcaaatgattttcgttttaattttgagacttgattgcattgcgttggaatgggggtggaaatataaatatttcttacctgtcaagggactcttgaggctccccctcccccgctttctaatctgtgttgcaaagcctgtaaagagagtgaaagggtgggcctgaaattcagctgagaaggttccagggagggggtagtgaaggaggagggaggagggagagacagagggaaggaagtgagagggcatgggagggaaccaggatagacctttgacccctggaaatggattaagaagggagtgggctgctgcttggagaaagctgttgaagactcacagtgaggaccctgtttggacacctggaaactcctacgggagctcggtcttcaagggctgtgagacccaccctgtcccctggggctcctactggaaagacatctgctttttaactcgctcacctctgagctttgttggaacagacatgtggactgcctcccactccgcatcccttctcatccccaatagctgagggcccaggcacactgcagagaaagtggtagactctgaacaagagagagaggagggaggatgcccatcagcagctcaatcaacctggaaagcagccctgaagccccaccctcattctttcctttgagtagcaattggaggaaaacttttggcaatcaagctggacaacaactgaaaatccaatcaggataaactgcttcagacacgtgactggaaaaatgattgggcaataaggggcttaaaaggagtgggaccttctgatctggcctcagaaaggactttgaagagcaagcggcgttgttcgcctgcggaagcagtgctgccggtctctggacaaatttctcccggaggtggagacaaggaagctccagcttcgctttcccttgtggcccagagtggaacatactgagctgcactgaatcatctggatgcactcgcaactttaggaactggtgagctgagaaatttgc

SEQ ID NO: 27999 - DNA, 2300 bp, Homo sapien
gtccccaacccccagcaccttcagaggggccgagtcccagagcatccaccgcattacaaatgcgcacccaccctggagagctccaaccacgagcaccgccgcctcggttcaaggcatccttacagccacaactcctcaactggggccaattttccggggcaggcggcccggggtgacccaagtggcgcacattattttctttggtcttcaacccatttccagagagaaaacagggacccgggacaggggtggtgccgggggcacaagcccaaggtcaccctgcggggaagcggaggaatcagggctcgaacttacgtttttcctcagagagttcaccacaccgcgaagttgctggaaggaaagaacgagacaatggctcagctaagcgccctagccgctgcgtggggcggggggggcggcggtgggggccggggggctgggcagcctggtctgaccaatccccgtttctcagtccttccagggcaaaatctcacgagatccagtgaggtcgcccagagagtcgagaggggcttgttttcaaagactgggaggaggaggggcagtgggggaggggcagtggggggaggagcagaggagaagggagcaggaggaggggaaaaggggagaggaagttggagagcagaggaggctgggggtggggagcagatgggggtggggaaggaggggagatgggggtggggaaggggggcgggaggagggttaggaatgggggaaggaagacagggtgggggaggggtgggcatgggggaaggaagacagggtgggggaggggtgggcatggggaaagggagacagggtgggggaggggtgggcatgggggaagggagacagggtgggggaggggtgggcatgcgggaagggagacagggtggggaaccgagaagaaagacagtggggggggatggaggaaggaacacagggtggggtggggggtcgggatgggggaagggaaacaaagagtggtggaggcgtggggattaggaacggagacagagggtgggggaggggtggggtgggggaagggagacagggtgggggaggggtgaggatggcggaaggtagacaaggcgggggaggggtggggatgggggaagggagacagaagggggggaggggtggggatgggggaagggagacagaaggcgggccagggcgggaatgggggaagggaaacagggtgggggtggggatgagagaagacagaggttgggggaggggtggggatgtgtaagaaaaacaaagggttggggagggggagggaaaagaggcagagagtgggggagggggtggggatgtggaaagaaagtcagaaggtggggggtgaggggtggggatgggtgaatacgtgatggctgcggcctttcccaccagacagtagggtgggggcagggtggaaaaagggggtgcggtgggcgaatggggaggcggggggctgactgggagtgtgggacggggtgttctgggatcacggagacgtccaagtctggactctgtcctgggtctgtgcttctggcgacctcccttttcttcagtgggatgcggggtgcaggggccggttccaggtcccctgagctcaagtctcgccccaccccgccccgcaagtctagaaaagatgcccctgcccttggctgggtaatctctggatttacctactgtctgtaaccccccgggctgaagagaccaccccccgggagtcaattaacttactctctggagcgcgcgttcctccctgctcccaggagtcggtttcccaaaactttctgaggcccgcgcatgctcccctcgactccccgtgtttccactctccacagaaatccacgcattcacgcccctcccctcccccgagcctgcagaggactccgccctgctttccctacattcagggctgctccttttgtcgccaatacaaacctgttgacaggtcacgcctgggaagcgggtggggtgtcccggagcggtgctgaggcgctgcaggcccggcttctggctgcgggggagctgtaccctgaagcctcgccggaactcgcgtctggggccagcagggggcactagagtcaacagggactgtatgcaaaacccacttcctcccaggccctctagggggatggtcaggcttctgcagagatggggaggatcctttcctggtaaggggagagggacgggctaggagccaagcggaaggaccccgtgttcaaggcccttcaagggacgggacaggcgaggaatctctttgagtcttttgaattgttttatcagtcaggcctgggaagtactccgcc

SEQ ID NO: 28000 - DNA, 2300 bp, Homo sapien
ccgcagctctgttcactggcatggggatgcctcggggaatggcagggcagagccacaaaaagccagcctcaccacgcggcctgttgctcttagccaccatgcccatcatagcctgtggcaggagatgttggggtcccccccccgacccctttcaggaaaacagagtttgtggaggcggagtacttcccaggcctgactgataaaacaattcaaaagactcaaagagattcctcgcctgtcccgtcccttgaagggccttgaacacggggtccttccgcttggctcctagcccgtccctctccccttaccaggaaaggatcctccccatctctgcagaagcctgaccatccccctagagggcctgggaggaagtgggttttgcatacagtccctgttgactctagtgccccctgctggccccagacgcgagttccggcgaggcttcagggtacagctcccccgcagccagaagccgggcctgcagcgcctcagcaccgctccgggacaccccacccgcttcccaggcgtgacctgtcaacaggtttgtattggcgacaaaaggagcagccctgaatgtagggaaagcagggcggagtcctctgcaggctcgggggaggggaggggcgtgaatgcgtggatttctgtggagagtggaaacacggggagtcgaggggagcatgcgcgggcctcagaaagttttgggaaaccgactcctgggagcagggaggaacgcgcgctccagagagtaagttaattgactcccggggggtggtctcttcagcccggggggttacagacagtaggtaaatccagagattacccagccaagggcaggggcatcttttctagacttgcggggcggggtggggcgagacttgagctcaggggacctggaaccggcccctgcaccccgcatcccactgaagaaaagggaggtcgccagaagcacagacccaggacagagtccagacttggacgtctccgtgatcccagaacaccccgtcccacactcccagtcagccccccgcctccccattcgcccaccgcaccccctttttccaccctgcccccaccctactgtctggtgggaaaggccgcagccatcacgtattcacccatccccacccctcaccccccaccttctgactttctttccacatccccaccccctcccccactctctgcctcttttccctccccctccccaaccctttgtttttcttacacatccccacccctcccccaacctctgtcttctctcatccccacccccaccctgtttcccttcccccattcccgccctggcccgccttctgtctcccttcccccatccccacccctcccccccttctgtctcccttcccccatccccacccctcccccgccttgtctaccttccgccatcctcacccctcccccaccctgtctcccttcccccaccccacccctcccccaccctctgtctccgttcctaatccccacgcctccaccactctttgtttcccttcccccatcccgaccccccaccccaccctgtgttccttcctccatccccccccactgtctttcttctcggttccccaccctgtctcccttcccgcatgcccacccctcccccaccctgtctcccttcccccatgcccacccctcccccaccctgtctccctttccccatgcccacccctcccccaccctgtcttccttcccccatgcccacccctcccccaccctgtcttccttcccccattcctaaccctcctcccgccccccttccccacccccatctcccctccttccccacccccatctgctccccacccccagcctcctctgctctccaacttcctctccccttttcccctcctcctgctcccttctcctctgctcctccccccactgcccctcccccactgcccctcctcctcccagtctttgaaaacaagcccctctcgactctctgggcgacctcactggatctcgtgagattttgccctggaaggactgagaaacggggattggtcagaccaggctgcccagccccccggcccccaccgccgccccccccgccccacgcagcggctagggcgcttagctgagccattgtctcgttctttccttccagcaacttcgcggtgtggtgaactctctgaggaaaaacgtaagttcgagccctgattcctccgcttccccgcagggtgaccttgggcttgtgcccccggcaccacccctgtcccgggtccctgttttctctctggaaatgggttgaagaccaaagaaaataatgtgcgccacttgggtca

SEQ ID NO: 28001 - DNA, 2300 bp, Homo sapien
aggcaggtgttctttcaaaagcatcttatctaaattgttgtgattccaaaacaggaatgtcttgcagggctatttcgaaaagtcccgagacagccaaccctttttaaaaatatagatggggtcttgctatatcactcaggctagtcttcaattcctggcctcaggggatcctccaaccttggcctcccaaagtgctgggattacaggggtgagccaccacacccagcttcctgagacagcttttatctcagccatgtaagcatgagcccttccctttcataccctcagggttttactttgggtcaacaaatagtgagtttattttggtatgtgcaactttcaaacacccatcgccataaaagaaaggaccagccttggccaggcacagtggctgatgcctgcaatcccagcactttgggaggccgaggtgggcggatcatgagttcaggagatcaagaccatcctggctaacacgtgaaaccctgtctctattaaaaacaaaaaaattagccaggcatggtagcgggcacctgtagtcccagtacttgggaggctgaggcgagagaatggcatgaacccgggaggcggagcttgcagtgagccgagatcgcgccactgcactccagcctgggcaagagcgagactccgtctcaaaaaaaaaaaataaataaataaaggaccagcctcgactgacagtcggcactccgcaggcatcctccacaatcctctctcctctctgcctcttgccctacaacctggccatgccatgattcctccctacctgtcctcctctgtggacttcatgaccacgctctgtcctatgaggctggaccagggtcatgttcactcacttctctcccctccctgccatttgttccactccccaacttgttctccacgcatcgatctcaatggagcaacagcaatcagatgatgaaaataaataatggtggccagtcttcaaatggatccccttttcaatcccgcactatccatctgctgccttctcatcagccctctgctcccgtttctttcccttctcaaactggacaagcaccgtactccgtgaagatgtgtgcagcctgttcccatgccctgaacaccatcccttcaagctcctctggctgctccctgctcaggtctcagaaaaggagagctgggcaaccctcccagggagccgcccgcctgtgtaactttcagtaccagcctgtttgctttcttgagataattagctacaacggccactttaaaacaatggtctccttattttgttttttgttttcaccctaaactttataaagtcagaaatcgtaagtccttgagcatccacagccactcaaggacaaacctttgctgaatgcctcaagcaaagagggggaggctgagtctctgtttccagggtgaaaacacgacggtttttatcagccctgttttatgcgacaatcccaggtcgaatctggatcaatgcaatgacttcctttgtatggacctatgttttgttcgtgcattcatctgtgcagctgggaacccgcagctctgttcactggcatggggatgcctcggggaatggcagggcagagccacaaaaagccagcctcaccacgcggcctgttgctcttagccaccatgcccatcatagcctgtggcaggagatgttggggtcccccccccgacccctttcaggaaaacagagtttgtggaggcggagtacttcccaggcctgactgataaaacaattcaaaagactcaaagagattcctcgcctgtcccgtcccttgaagggccttgaacacggggtccttccgcttggctcctagcccgtccctctccccttaccaggaaaggatcctccccatctctgcagaagcctgaccatccccctagagggcctgggaggaagtgggttttgcatacagtccctgttgactctagtgccccctgctggccccagacgcgagttccggcgaggcttcagggtacagctcccccgcagccagaagccgggcctgcagcgcctcagcaccgctccgggacaccccacccgcttcccaggcgtgacctgtcaacaggtttgtattggcgacaaaaggagcagccctgaatgtagggaaagcagggcggagtcctctgcaggctcgggggaggggaggggcgtgaatgcgtggatttctgtggagagtggaaacacggggagtcgaggggagcatgcgcgggcctcagaaagttttgggaaaccgactcctgggagcagggaggaacgcgcgctccagagagtaagttaattgactcccggggggtgg

SEQ ID NO: 28002 - DNA, 2300 bp, Homo sapien
aatataaatttacaaaaaaaaattaaaaaagagaaaaagcattataacctaagatgctcagctatggcaagccatatatgcatctcaagaggggagggcaaagggaaggttgtattggcaaaaaaagagatttaaataagctgcttgcaaacagttcaccggttatgaagactcaaaaccacagttggcatcagttcattggtggagacgctgtgcctaggcaggtgttctttcaaaagcatcttatctaaattgttgtgattccaaaacaggaatgtcttgcagggctatttcgaaaagtcccgagacagccaaccctttttaaaaatatagatggggtcttgctatatcactcaggctagtcttcaattcctggcctcaggggatcctccaaccttggcctcccaaagtgctgggattacaggggtgagccaccacacccagcttcctgagacagcttttatctcagccatgtaagcatgagcccttccctttcataccctcagggttttactttgggtcaacaaatagtgagtttattttggtatgtgcaactttcaaacacccatcgccataaaagaaaggaccagccttggccaggcacagtggctgatgcctgcaatcccagcactttgggaggccgaggtgggcggatcatgagttcaggagatcaagaccatcctggctaacacgtgaaaccctgtctctattaaaaacaaaaaaattagccaggcatggtagcgggcacctgtagtcccagtacttgggaggctgaggcgagagaatggcatgaacccgggaggcggagcttgcagtgagccgagatcgcgccactgcactccagcctgggcaagagcgagactccgtctcaaaaaaaaaaaataaataaataaaggaccagcctcgactgacagtcggcactccgcaggcatcctccacaatcctctctcctctctgcctcttgccctacaacctggccatgccatgattcctccctacctgtcctcctctgtggacttcatgaccacgctctgtcctatgaggctggaccagggtcatgttcactcacttctctcccctccctgccatttgttccactccccaacttgttctccacgcatcgatctcaatggagcaacagcaatcagatgatgaaaataaataatggtggccagtcttcaaatggatccccttttcaatcccgcactatccatctgctgccttctcatcagccctctgctcccgtttctttcccttctcaaactggacaagcaccgtactccgtgaagatgtgtgcagcctgttcccatgccctgaacaccatcccttcaagctcctctggctgctccctgctcaggtctcagaaaaggagagctgggcaaccctcccagggagccgcccgcctgtgtaactttcagtaccagcctgtttgctttcttgagataattagctacaacggccactttaaaacaatggtctccttattttgttttttgttttcaccctaaactttataaagtcagaaatcgtaagtccttgagcatccacagccactcaaggacaaacctttgctgaatgcctcaagcaaagagggggaggctgagtctctgtttccagggtgaaaacacgacggtttttatcagccctgttttatgcgacaatcccaggtcgaatctggatcaatgcaatgacttcctttgtatggacctatgttttgttcgtgcattcatctgtgcagctgggaacccgcagctctgttcactggcatggggatgcctcggggaatggcagggcagagccacaaaaagccagcctcaccacgcggcctgttgctcttagccaccatgcccatcatagcctgtggcaggagatgttggggtcccccccccgacccctttcaggaaaacagagtttgtggaggcggagtacttcccaggcctgactgataaaacaattcaaaagactcaaagagattcctcgcctgtcccgtcccttgaagggccttgaacacggggtccttccgcttggctcctagcccgtccctctccccttaccaggaaaggatcctccccatctctgcagaagcctgaccatccccctagagggcctgggaggaagtgggttttgcatacagtccctgttgactctagtgccccctgctggccccagacgcgagttccggcgaggcttcagggtacagctcccccgcagccagaagccgggcctgcagcgcctcagcaccgctccgggacaccccacccgcttcccaggcgtgacctgtcaacaggtttgtattggcg

SEQ ID NO: 28003 - DNA, 2300 bp, Homo sapien
aaattttcctaaagctgttattttttaatgcctcaggaagaatcacacccggagtctcatccacactttatttggaggtatttgggtctcagagtttgtgctgagttagttaatgatttgggctactgggatggggtgaatgtgttttacaagtgagaaagaaataagctttggagtccacagggtggaggcttattggctaaattgtgtccctcaagattcatgcaatgaagccttaatcacagtgtgtgactaaatttggagacagggtctttatggaggtgattaagtgaaaatgaggtcatgagggtgggttcttatccagtctgactggtgttctccttagaagagaaaatttgcacacacagaaatcagacaccagagatgagcaggcggaggaaagaccatgtgaggtcacagcaaggaggtaacgacctgcaagccaaggagagaggcctcagggaaaatcagtcctaccaacactttcaccctggactttccagcttcagcactgagaaaataagttttgctgttgaggccactagttctttggtatcttgtgatggcagcactggcaaatgaaaacaagagggaccccaaagaccttgggtagggggaacagatggagcagggtgcaggaggcagggcagggaggggctggaaggtcatgctctgaggttcgtttcctggatggaactgggactccactcactactgtctggggaacttggggaaaaaacttcacctcccaatattgattccctaataaaatctgggccctgagcatagggctcctcatcttcctactccatatgatgcaagttttcttgaagttatgcttgtaaaacactcaccaatgcatctggcatatattaagggctcaaaagtaggccaggcatggtggcttatgcctgtaatcccaatactttgggaggccgaggtgggggatcactggagtccaggagttccagaccagccaggccaacatggtgaaactccatctctactaaaaatacaaaaaaaaaaaaaaatagctaggcatggtggtgcccttctgtaatctcagctattcaggaggctgaggcaggggaatagcttgagcctgagaggcggaggttgcggtgagcccagatggtgccattgcactccagcctagatgatagagtgagactccatcacaaaaaggaaaaaaaaaaggttgtcattctgcagcccagatcgtgccattgcactccagcctggacgatagagtgagactccaccacacacacacacaaacgcacacacacacaaaaactaacccccgccccgcaaaaatcgaaggtagccattctgctgtatgatctattgatacatacaggatgacatttgtcctgtgggcaccagggggcactgtgacccctggtttgggacactaatggctccaagtccctggtagtacttgagtcatttcctttctggccccttctattgagtggaatcctgaaacccacctgactcttctactcttgaaaaattacgcagagaatgtcctcagacatagggtcagacaagaacttcgacatacattttaaagaatggagagcagatttacatccgctgcttaacagggaaccaactaacaaagaattaagaataaaggaagtagagttgcatgaagagactcccctttctatgataagaaaggcctgaaggtcccttcccagctgtggactcagaggcagagctctggggcatttccattatggcctggacccctcccctgctcgtcctcactctctgcacaggtgctgcctcccagggctcagcccccagtgggatcaagatcagcctggccctgaccttcaactcaacatagggagtgatgcagggtgtggggttctgggaatgaggccctcatcctcagactcacctctcctgtcctctcttgtgggctccgttatttcctctgggccaactcaggtgcctgcagtgtctgtggccttgggacaaatggccaggatcacctgccagggagacagcatggaaggctcttatgaacactggtaccagcagaagccaggccaggcccccgtgctggtcatctatgatagcagtgaccggccctcaaggatccctgagcgattctctggctccaaatcaggcaacacaaccaccctgaccatcactggggcccaggctgaggatgaggctgattattactatcagttgatagacaaccatgctactcaactcacagtgacacaggcagatggaaaagtgagacacaaaccctttttctgtctgtgtcactcacttcc

SEQ ID NO: 28004 - DNA, 2300 bp, Homo sapien
tcccaaagtgctgggattacaggcatgagccaccacacccgaacacttggggtggttttaagcccccagcaagatgcaccagcaggaccaggaggtggcctgggcaccccctatcactcccatccatgcaaacctaggcaagtccctctctctgaatctcagccaccaccacatacaatgcaagtgggaagatgggcaggactgggggtggggcaggcagaggccacctctgtcaggctggggttgcatgggctggaggctgtcttcccatacctgggacatgacctccaaggacctgctgtcagtcatggtgatgggctggctggggttggcagggagcttgctctccttctcggagggccagagcagcgtggggccaaacaccgtgccaaggttgtgcagggacatcttattgactgcctccttctctgccaccctgtagaggaccgaagcagagggtgctgtttcaacgccaccaccaggagagaggcagaggggctgtgccatgctagagtcctcagggagggagtgacctcgaccctggctgtgctgcaagctgactccagccttggtacttctgggtctcagtggcccgggacaaggggccagctctgggctgatggggaggtcttcatgatgtgcttgggagggaagtgggggcggtccaaatgcactgctggccacggccaaagctctgagctctttgttaaggccacagtgcagagggaggcgggtggcaaagaggagaggcaggggcaggggtggcagtggtgctagtccttagaagcagtgagttactgcagacaggggtcgggggaaaaggtccttggtgctgggggtctggtgggagcagaggggcaccccaacggcctggagacctggagtcctgggcagccacaagagagctgggctacctttccaggtggtctagaaggaaaaggaaggtgagcaggttggcctccggcagggacgacagcaggttgagcatgcagctcttctttgcaactgggtctgaaagagctgcaggaggcagtgggtcactcccctgggttacgacaagccggagacctctcccgaggtggtcacatggagcgcccgggacacgagtccttgcgcagtttaggcttgtcatcatcgtcacacccacagcgctggccgccagtgaggaccctgtgaggggcacctgtgtggggtgtgaaccacctgaacgccttttctctacctcgcaggggtcagcagcacctggcgaacagcagcaggaggagccgctagagcagctgctcatgggcagagcagcccttgggcaactcctgccaccaccccctccccagggagcccaaggcaggggaggctcagcatggaatgaaacagcggagtgagggacacaaggaggtgggaagtgggagggtcccagccccaccaagtacgcagagaccccctcgtcgtcctggacaccacaggggcacctgcaggctgggagaccaggtcctctgtgcatgggcccgggaggcagacctgccctaagggtgatgcagaggccacaggtgctgcacgctccagcgcccactctagacatcagcctccaggttgactaagggtcaggtcatgtttgaaaccatgcttggctggaccaggacccatggcaagagcacctgggcaccagtgtttagccctggtctgcaggaaggaggacagcagactttaggaccccacagcacggcagtgctgaccatttcacccacttggcctccttgaggaatagggatggggagccctctggggatgggcaaggccttccaggacaggctcggttctggtcccctgctttttgaggttgggttaaaatgccgaccatggcagaggggttacaactcaggttcccacacctcgcttttcacagcctccgagggcagcagtgcacatgggggagacatctcccacgaggccaaggcctccagtgctcaccgatgccctctgtgaagttggggtagaactcgtcagtgaaaaggggctcgggcagctcacggaagtacagcttcagcatgcctgcgatggcgttcacgtccatctcgctcatcatcaccgacacgtccttgttatctggaaagagcatggaaatgcagcggcctccttgaagatcctgagtgagtcacccgccatccctgccttggctaaagcaccgtccctgccacactgaccactgtgcgggtccctcctgggctttgagcagctcatctgactcctcccaagagctgtgcatggttctgtgtctgcagagttgataggggtgcgtgggcatt

SEQ ID NO: 28005 - DNA, 2300 bp, Homo sapien
gggccactgagacccagaagtaccaaggctggagtcagcttgcagcacagccagggtcgaggtcactccctccctgaggactctagcatggcacagcccctctgcctctctcctggtggtggcgttgaaacagcaccctctgcttcggtcctctacagggtggcagagaaggaggcagtcaataagatgtccctgcacaaccttggcacggtgtttggccccacgctgctctggccctccgagaaggagagcaagctccctgccaaccccagccagcccatcaccatgactgacagcaggtccttggaggtcatgtcccaggtatgggaagacagcctccagcccatgcaaccccagcctgacagaggtggcctctgcctgccccacccccagtcctgcccatcttcccacttgcattgtatgtggtggtggctgagattcagagagagggacttgcctaggtttgcatggatgggagtgatagggggtgcccaggccacctcctggtcctgctggtgcatcttgctgggggcttaaaaccaccccaagtgttcgggtgtggtggctcatgcctgtaatcccagcactttgggaggccaaggcaggacaaccgaacccaggtgtttgagatcagtctgggcaatgcagcaaaccccatctccagaaaaaatagaaagaaaaattagtcaggcattgtggcacacatctgtaatcctaggtatctgggaggctgacacaggaggattgcttgagcccaggagttagaggctgcagtgatccatgatggagccactgtactccagcctgggggacagagcaaggccctgtgcatctctaaaataaataaccaccccccacccaacaagtcatgccttgtcaggaccccaccccacccccgtctcactgtaaggggttcatgacaccagcaggggtttctagcacctgaggtggacttgggggcttgggccccaaagacctccccaccagcagctgtgagcccccctctgagccactctcctcttccccactctgcgagggcaggtcgaggtgctgctgtacttcttgcggctggaggccatccctgccctggacagcaagagacagagcatcctgttctccaccgatgtctaaaggtcccagtccatctcctggaggcggacagatggcctggaaacctctggctaatcgggccatctgtagagtgggaatcaagattttctgaggcatccttgggccacccccaggtgtcaggccatctgccaagagacagtggcccaaagcagaaggacaggtggcctgggcagatcccgcccaggtctgaaagccccaggctggcctcagactgtgggttttttatgtggccacccgagggcgccccaagccagttcatcttggagtccaggcctggccctgggagacagggtgaaagcagtggtttttatgaacttaacttatagagtctaaaagatttctactgaatcacttgtcaagaagcgccctctctggggagaagggaacgtgaccggattccctcactgttgtatcttgaataaatgctgctgcttcatcctgtgggggccgtggccctgtccctgtgtgggtggggcctcttccatttccctgacttagaaaccacactccacttagaacagggtttgagaggcttagtcagcactgggtagcgttttgactccattcttggcttgcttctttttctttccagaaggatttttgtgcagaaatgggtcttttgttgccgtgttagtcctccttggaaagcagctcagaaggcccgtgaaatgtcgggggacaggacccccagggagggaatcccaggctacgcaccttagggttcgttctccagggagagcgacctcgtcccccgatcctgaccgcccttccggcccacgctctcctgtttggcttccacaggcctggacttctctggcttctctgcccacacactccctgcccccagtgtccctgcccctgccccagcacaggtgacttcatttctgtcctctcagctcagtggactcgctcaacttttgtataagtctccacttggtggtagcagcttgctgatgacttgttttaaaactttcatcctaaataaccttttgatgcttgaatatttttaagttttatacatagtttctaatttttttcccagcagatccagatacctaataagatgctggaatgtaatccctggacaatccgtgtcctggcagcatttggtcttcctctaagcgcctggctccgctgttctcaggagtgggttctgaagtctctggaga

SEQ ID NO: 28006 - DNA, 2300 bp, Homo sapien
ggatcaccgaaaaccttcttagagttgtcttgacaccactgatgtcaagtgtctgggtacttgtaggatggcctgccactcagtgcacgggcaggagcaacggggagatcccacaggcaaagtgaactgggggatgggctgaacgggctccaggcaactgagccctactggcaggtcctcggcctgggcccgaacaggaaggaggggcacagagtgcccaggtaaccgctcctgggagcagtggggaaccgtcggttgcttgaactctcgagagctgggctctgagcgtcctcgtccagccgccaactcggccaacggctaagccagcagtttcttctgttgccgggcaacgcgccttttaaacctgagggagcgggcgcgtgagcacatcacggcgcccgtgacagagccagcttaacggattaataagcgcagccaggtacccgcgcgaggcacttgctggcaatggcgggaggcggacgtggggggtcatgcaataggtactggaaggagagaggcgggcacaaaggtcgcgggaggaacaggtgcccacaatggcggcagatctgcccgtggatcactgaagattcctgctctcctgctgaggtggagattgcagtgagctgagatcgcaccattgcactccagcctgggcaacagagtcagactctctctttttttttttttttttttttttttgagatggagtctccctctgtcgcccaggctggattccagtggcctgatctctgggctcaccgcaagctccgcctaccgggttcacgccattctcctgcctcagcctctggagtagttgggactacaggcgcccgccaccacacccggctaattttttgtatttttagtagagacggggtttcaccgtgttagccaggatgatctccatctcctgacgtcatgatccgccctcccaaagtgctggcattacaggcctcggcctcccaaagtgctgggattacaggcgtgagccaccgcgcccggtgttgaaactcccttgaggcattttcttcggccttcgggtccatcctctgtctcctccttgacctcctcatctcctcctcgccactgccttggggaccttggccaggctcatggcatccagcagccactcaatgtcaatacctccatgttcatctctcagcccgcccttgcccgtgaacccatgcttatttatttattttttttatacgtgcacccatgctcttcaggtctgatgaagtatccaaaatcaagctcctgaccatcctcaaacctgccccttctgcagggtttacctcgctagtcggcgccatccttgattcttctctttctcccacccaggccatcatctcttgcctggttgatacccacagcctcccctttgggctttatccttatccccgtcatagctgccagagggaccctgtgaaaacactccccagcctgctcattcttctgccctaagcctgcatggcacagagcaaaagccagttgttatgggacctaggaggtcctgtgggatgggccccagcctgcatcttcatcctcttctccccaccccactccattcactctctgcctatcgctcaccagcctataccacctgcctcagggcctttgcactgaccatttaggcaacattccaggctcttttcacacgttgcctcctctgagaagccctccctgaccactctgcccatacctcatgcctcttgattccccttacctggcttgtggtttcagcactttccctgtgtgtgtttgtttttcttggcatgagggcaggacctaagtgtctgttccctgttgattccccagttccaggcatgcagtgcaaattctagaaatattttttgcatgaaggaatgagtgattgaatgcagcaagggtctggaggctgaggaccaggcagacagacattcagagttgctggaatgcgacagagacagggagtcagactggtcatgcaagatcctgggcctgcccttgggtcctggggagccacggaaggttgtgggtgccagagggttgtggtcagagccacagtcaggggccttctgagacctgtgtcccctccccaccctccctccccacctcctcaggccagctctggggtctcggcaggtggtccacaacatgacctctgagttcttcgctgcccagctccgggcccagatctctgacgacaccactcacccgatctcctactacaagcccgagttctacacgccggttgatgggggcactgctcacctgtctgtcgtcgcagaggacggcagtgctgtgtccgccaccagcac

SEQ ID NO: 28007 - DNA, 2300 bp, Homo sapien
accagccatccccaacacgggccatgagggagctgaagaggccactgtacactagaaagcatcagtttactcttaaattaccactgcgagtctgcaaatgcccagcgagacctgagtggttttttttttcatttgtgtgaaatgaaaagggagactgacatgccagatgctctgggttctgagggagagttggagtcagatcctcctgcaggaatccaggggcagcaggagcagcctcgccccatgcagggaccacagatgcacccagagggtgagctgcaggatggacactgcccacctccaatctgtatatcctgtgcaaaaaaatcattgttttcaccccttcttcagcctatcaaagttgtcacttaaaaagccactacatctcatcctgtgaacaggaaacccatccacatctccatcagccacataatctccacataaagattcttcaaaaaatagtaataatagctgtgaaaaagtatctaaaatattgcatgacaatcatacttagattacatatgaaaatggcactatttttgatatgctaggtaaataaaatatattatttgaagtcatttaccttcttctctttatatgtctaatgtggtgactagactagcctagtgggattcccattaggctcatcatactgtgattgaacagtgctggtctgcacctcttcaggttaacaggggctgtggagtgacctggtgcaggaaatatcatctccatccataggatatcagtgtgaacccagggagaggcactggtgcaagagagatgagaacaggggtgtggagtaggggactgagccttcactttgagccgaagaagtttcctttcctatcctcaatcctgaacaagagggatttctggacttctttttgttttcaagtttgtgccccttcagatttggggctgtctggaatcctgccaggggacaccgagaaaaaataggagtctcacactgactgttgtatttcatctgctggggccatcccaaaccactgcgtacaatttcctttcctggtgctcaaatagctgctccacgcacttgttgtggtttcagagatgaatctgggtgggaagacaggacagtgtatgttataatatttaaatggaacccaaatccattaatatttattttaatatggaacattaaaagagttttgtaataggcaatgggaaaaggtaaaaaagataaaagctttttgagaaaaaaaacaaaaacaaacttatagaatgtctatgtgtcttcagtgttgcagggttgagagagatcagctttatggtgccccatggatgtgctgagatggggaaaatcaagaaagaaggaagtatgtaccactgtgactcaacaaataaatcaaagtaaaatggacttaaatctttcaataagtcattcacaataaatatcactctggtgcacacagaaatgcctgttagcaaactttcccttccccctggccatgtctccatggatcacctgtgtgcagagtggctccggtcagtgctctgtgttccctccacagggctccccacaacatgtgccctgtgtggatgtgggtgcatcgcctggggtggctgatgtgctccagggattcgatgctgcagatgcctcagcaccaagggtgggggtgggaatgggacaaggctgcagctggggagaccaaggatcaaccacacacagcaggggtttccacggggtgagcagcctcatttcctgacagtagagcgagcctaaaggtaggtgccaggcagtggtatctgtggggtggcccaggcctggagggtcacagagacacaggcaccacacagcagagacactgagggccaggagctcactcaggtgagggacttcagcagatctttctctcctggtacaaagagatcaagttcctaccatcagaatagacaaacaaggactttaatctcctcagctgagccccactgtccagggaagaagtctctgagcccaggcccaggtgagagtgggatgaggagaggagccaggacacagattttcatggatgccccgccctcctctgaggcagagcggataagacagggctgggggcatacccagtgcttgagtctcaggaggcagcgctctcgggacgtctccaccatggcctgggctctgctcctcctcaccctcctcactcagggcacaggtgatgcctccaggaaaggggcctcagggacctctgggctgattcttagtctcctgctcctcaggctcacctgggcccagcactgactcactagagtgtgttttttcctttttccgggctctc

SEQ ID NO: 28008 - DNA, 2300 bp, Homo sapien
atcaggaaggcagactaggctagtgtagaaatcctctccgtacaaactctgagaggtgttgaataaaataaagataaacataatttcatgttttcatggtgccgatgatggtgatgttagctcacaactaagctgcagtgcctggaacatcaggaaatcacagtgaatcacagctgctcttattgggtgggaggtgcaccagtttgatgcctaagtacatagaaagcctgggtccctgtaggatggcacatgcatctctctggactttgaaagctttgcagaagagcttcagttgactcactctaattagtccggactgaacaaaaccactagaggagggcatttcaaccctgagacacttctatagccccaacttcctaccctgcgtgtgcgaactctctgtgctgggctgggcagggcagattgggtcaccctgcacagaatggggctggactgtctggtcctcaacttctgaggtgacaggtgctgtggaggcacgtggaagaaaaaagctcctgggctgagtctcctccaccagctgggggcagcagagctgcagccaggagcagtcaggattaaggctggggctgcccagctggggcaaagagaaggccagcctggcgttcaacaggtgtccaagaatcagtcttcagactgaaagtgagtgcagttcatcctatcccctcaggctgcagtgaccattctctgagggtcagactcatacagtgtcaccccaggacactgacagaagcccggcacagtgaaggcctcacctgggaaatgcagctggaggaggctgggaccaggtgtcaactggggcagcttactcaggaaggggatttctttggagacatcccaaggttgaggtgctctaggagggggcacagcgtgaggtgacggggctcccagggcccgggttcttcacccaggatggctgtctgagcctcctgccactctcagggccttgtccctctcagtccagcagcaacctggggagctgagccctctgtcctgggcacttccagatacaccatacctcacttccttctgcctcaccttccagctccaggcggactctgactcagggggaaactcctgtgctcaggggagtctcgggtgggtggggtgaagcatttgggatcctgatcccttcatggggcatccccagcatccttaaggagacactcttcagagggacagggcttctcacctgcctcagctctgaccatggggctgtccacactcagtgacaggacactgaccagggatctgactggagtgaccaggaacctggctggggcaaccagggaccacccaccctctggagctcacatgctgtgcagagaccatgaccctgggaccccttcagagaccatggggcctgaagttagattttcagtccagtgtggttttctcctgctttttgcaagtttacataaaacattgatgagaaaaacatacataaataacagacgagctgagggtgccaattgctaatctcttgtggcaatgaggggtgatgtagcaggagcagcaccatggctgaaatgagaccagaggccctgttgactccacaggggtgtgtggttgcttaaatgacccaactattcccactgaataatcagcaagtgtcccaatgacacagcacagcatttagatgaaatgaacaagaggggactgagtctgagggaccagggggaggaagatcatgggtccctgggccacctgctgctgagtcaggtgtcagcaagatctctccgcagagcccagctcagcccatggccaacctcctggaaggtccacagctctgctgagcctggcccaggacagaccccaggtcagcgaggtttgggacagtggtcatgagattaattcccagaaaggtgactgtgatcacagggcttgaaggctgcagctgattttctaatctgagaccctgcttcttcctcctgttgcctgtgctgccctcacagctggtttgagtgacatctctccaggaggaatcgcagaggatgtaaatttgcataaacgccaaacactgactgcccccaaaagctggagagggaataagagaggcctggggagcccagctgtgctgtaggctcaggaggcagagctctgaatgtctcaccatggcctggatccctctcctgctccccctcctcattctctgcacaggtgctgcccctaggctcagtctccacagaccccaagttgagcctgacctgaatcctgagcaaagccctgccactgcctctgggggggattcctggcaatgcgtcctttgtcctcaagccccc

SEQ ID NO: 28009 - DNA, 2300 bp, Homo sapien
cagactaggctagtatggaaatcctccctgcagaaactctgagaagtgtggaatgaaataaacataaacatgaaattaatctgccaacgatggtgatgttagctcacaactaagctgcagtgccagaaacatgcggtgattgcagtgaatcatagctgctcttactgggtgggaggtgcaccagtttgcttcctaagtgcatagaaagcctggcacgcacgtctctctggactttgaaagcttggcagaagagcttcagttgacttactctaattagtcctgacggaacaaaaccactagagtagggcatttcaaccctgagacacttctgtagcaattgctcctgccccacatccctgcactgcatgtgtgacctctctgtggtgggctgggcagggcagattgggccacactggcacagaatggggctggactctctggtcctcaacttctgaggtgacaggtgctgtggggtcacctggaaggaaaaagctcctgggctgagtctcctccaccagttgggggcagcagagctgcagccagcagcagtgaggagagaggctggggctgcccagccggggaaaagaggaaggcctgcctaaggttcaacaggtgtccaagaatcagtcttcagactgaaagtgaagacagttcatcctatcccctcaggctgcagtgaccacgctctgagggtcagactcatatagtgttactccaggacactgacagaagcctggcacagtgaaggcctcacctgggaaatgctgctggaggaggctgggcccaggtgtcagcttgggcagcttcctcaggaaggggattccctggaagaagtcccgaggtcaaggtgctctaggaggggcacagtgtgaggtgacggggttcccagggcctgggttcttcacccaggatggcggcctgagcctcctgccactctcagggccttgtcctgccctgtccagcagtgtcctggggagctgagccctctgtcgtgggcacttccagatacaccctgcctaccctccctctgcctttccttccagctccaggcagactctgactcaagggcagctcctgtgcttaggggagtctcaggtgggtggcgtgaagtatttggggccctggtccctgcatggggcatcaccagcctcattgaggagacactctccagagggatggggattctcacctgcctcaggccacagccctgaccccggacctgtccatgctcagtgacaggacaataaccaggaacctggctggagtaaccagggaccacccatcctctggagctcacatgctgtgcagagaccatgaccctgggaccctgggaccctgggaccctgggaccctggaaccgtgacagaatccatggggcctaaagttagattctcagtccactatggttttctgctgctttttgcaagtttacataaaacattgatgagaaaaacataaataaataacagacgagctgagggtgccaattgcttatctcttgtggcaatgagggaatggtatagaaggagcagcaccatggctgaaatgagaccagaggccctgttgactccacaggggtgtgtggttgcttaaatgacccaactattcccactgaataatcagcaagtgtcccaatgacacagcacagcatttagatgaaatgaacaagaggggactgagtctgagggaccagggggaggaagatcatgggtccctggtccacctgctgctgagtcaggtgtcagcatgatctctcggcagggcccagctcagccccatggccaaactcctggaaggtccacagctctgctgagcctggcccaggacagaccccaggtcaacgaggtttgggacagtggtcatgaagtcaattcccaagaaggtgactgcgatcacagggcttcaaggctgcagctgattttctaaccagagatcctgcttcttcttcttcctcttgtcgcctgtgctgcccccacagctggtttgggtgacatctctccaagaggagtcccagaggaagtaaatttgcataaacaccaaacactgactaccctaaaaagcctgagagagaataagagaggcctggggagcctagctgtgctgtgggtccaggaggcagaactctgggtgtctcaccatggcctggatccctctacttctccccctcttcactctctgcacaggtgctgtccccaggccctgctccaggccctgctccagtcttattccccacagatcccaagttgagcctgccctgaatcccgagcaaagcccagacgcagcctctgggtgcgactcct

SEQ ID NO: 28010 - DNA, 2300 bp, Homo sapien
cccttgtacctgatcttgagtcaggcaggggccacacagagaagaggtgttcctcccctgggaccagcagtcctcggatcagggcatcagggacctgaacagcaggttctgaatccacacctagacccaggaagtccctgagcccccagcccacagtgtggagcggccaccagggggaagcagagagttacctggcaaagccacctggcgatggggcgggcctgggtgacagggagacgctgacatgcagcaggagccagtgaccatgatctcacacctggaatgaaagggtctttattttcatagagtattgtccttgtgtacttgacactcatgtagaaattctagaataggattttaccttcagctcttgcagatgctgcctctttctctgccacagctccaggcacttgacttctcacagtgccctctcctcacacacccagttgtgctaaaatggtgtccctgccatgtgcagtgtcctccctgaggtcacaggtgtcccctttatctcccctttgctctgggagcccctgtcctgcagacacagtggcttctcctttcctggctgctcctccactttcattgtccctggtctttccggactctctcctggggaagctgccaaatcatggctcttgatttcctggtgagtcacaaaatagttgctcattaacctttagttgacttaagttcttaatcattgatacattttccccaacaactgacgacaacttagttataataaacattcacttctgggggtcttggagtttgcagccccctctcattctctcatggagcaaacatttccttcgcctcctcatctgtctctgatcctgacagcatcctggagatactgaggcacagcagctatgacctacccaggagcttgcagccaaggcagaaacttccatcacctcatggatcttccagcactctgtgtgcacttgacaaataagaaattccattgtcctctaccactcaggagctgtgccctgcggtgggacctgcacctttccaaggtgtgtgttatcatctgcacagtggagatgaagagggaacctgcattgggttctggaaagtaccatctaaaaatatatttagacctgcaacagaaatctcctctctaacataaaatatttatgatcaggacacactgagaggcctagaccaaaattaagcactgccctcctgagccaggatagaatggaggaggggactggggaccccagataattccacagttaccagcatgactctatgatcacctcctggaccagatcaaagatcatcccatatgaaggacttcatattccttaggaaatacaaagtcacctctgagctctgctgtgaccaagtgagcccaggaatgaggctgagcacagtgtgatgtggagatgtctgcagagaatatggaatcaattgataaaggagatcctgtgggcaaagggtgggagggcaaggccacccctaacctctttgggtcccttggggctgagtccttctggaaaccacaaagctcctccagcagcagcccctgactctgctgattggcatcacgggctgttctctccaacaaggggttaagagagacctgggaggagcctgcccagcctcagacttgagaagcagcattggaggcacttcagccatggcctggcccctcttttccttggtctcctgactcactgcccaggtgctgcccccagggtctcacccacctgcccagccccaggcctccaggttcagcctggccatcagtctgagctcagcagggccctgtgtgtggtgggcaggatgctcgtgaccctgctgcagggggaggggctggttgggctgaaatgcccccactctgtgctcctgtgctcatgggtgccctgagagctcttttattcctggggctcactccagccctggcaagtagcaagatatcctggggttgagcctctcagtttcaaattttttatctcccctttccttcttgcaggctctgtcacctcctgtgagctgacacagccaccctcagtgtcagtagctccaggacagatgactaggatcacctgtggggaaaacagtattggaagtaaaagtgcttaatggtaccagcagaagccaggacaggcccctgtgtgggtcatctatggggatagcaggcggccttcagggatctctgagattctctggctcaaactcagggaacaggaccaccctggccatcaacagggcccaggctggggaccaggctattactgtaagatgtgggacattaggactcctcatcccacagtgacagaggt

SEQ ID NO: 28011 - DNA, 2300 bp, Homo sapien
gaaaaggtatctaaaatgttacataaataattgaacttagattacatatgaaaatgatactatttttggtatgctaggtaaataaaatatattatttggactcctttactttcttctctttgtatttctaatgtggtgactagacattgggattccaatgaggctcacatcatattgtgattgaacagtgctggtctgcacctcttcaggtaacaggggctgtggagtgacctggtgcaggaagccccatctccaatcataggacatcagtgtgaacccagggagaggcactggtgcaagagaaatgagaacaggagtgtggaccatctgcttgtacaggggactgagccctcactttgagccaaataaactttttttctattttcaattctgaagaagaagactttcctggacttctttccgttttcagatttgtgccccttcaggtttggcctgtctggatcccagccaggggacaccgaggaaatccaggagtctcacactgactctgttgtatttcatctgctggggtcatcccaaactgctgcgtatcgtttcctttcctggtgctcaaatagctgctccatgcacttgtcacggtttcatagctcagtctaggtgggaagacaggatagtgtatgttataatatttaaatggaacctgaatccattcattgtttttgtttttttgtgtttttgtttgtttttgttttgtttcgtttttgagagagagagagagtcttgctctgtcgcccaggctggagtgcaatggtatgatctcggctcactgcaacctctacctcccaggttcaagcgattctcctgcctcagcctcctgggcagctgggattacaggcccccgccaccacatccagctagtttttgtattttagtagagatgaagtttcaccattttggtcaggctggtctcaaactcttgacctcaggtgacccacctgtcttagcctcctaaagtgctgggattataaaggtgagccaccacgcccgacccaatagtttttttaaaatatgaaatgttaaaagagttttgtcataggcattgggaaaggtgaaaatagattaaaaacattttaagaaaaaaaccaaaaatgtacttgtagactgtctgtgtgtcttcagtgttgcagggttcagagaggtcagttttatggttcactaaggaggggctaagatggaggaaaccaagaaagccaaaaacacacatctctgccactcaaaacataaatcaaagtaaaatggaaaaaatctttcaataaatcattcccaataaatatcactctggtgcacatagaaaggcctgttagcaaactttccctttcccctgctggctcatatccccatggatcacctgtgtgcagagtggactctgtggtccccatttctcaggctgagaaccagagactgggaaggacaagtcacctgctcatgagtgggaagggcaggattgggagcagctggcttgggttcaggactgtggccctggtcggtgctctgtgtccctccagagggtccctcccacatgtgccccgtgtggatgtgggtgcactgcctggggtggctgatgtgctccagggattcgatggtgcagatgcttcagcacaaaacgtggaggtggggatgggatgaggctgcagctggggagaccagagaccagcgccacccagcagaggtttccacggggtgggcagccccatttcctgacagtagagacaggctggaggtgggtgccaagcagagggcgctgtggggtatgcccaggcctagagagtcacagagacacaggcactacacagcagaggcactgagggccaggagctcactcaggtgagagacttcagcagatccttctctcctgagcaaatcaggtacaaaaaaaattaagttcctgccatcagcatgcacaaacaagaacattcatctcttcagctgagccctgctgtccagggaagcaaaagtctctgagcccaggcccacgtgagggtggggtgaggagaggagcccaggatgctgattttcatggaggccccgccctcctctgaggcaaaggggataagacagggctggggcagggccagtgctggggtcacaagaggcagcgctctcgggacgtctccaccatggcctgggctctgctgctcctcactctcctcactcaggacacaggtgacgcctccagggaaggggtcttggggacctctgggctgatccttggtctcctgctcctcaggctcaccggggcccagcactgactcactggcatgtgtttctccctctttcca

SEQ ID NO: 28012 - DNA, 2300 bp, Homo sapien
aagtgttgcagaagagcttcagttgactcactctaattagacctgactgaacaaaaccattagaggagggcatttcaaccctgagacacttctatagcaattgcacctgccccaccccactgaactgcgtgtgttacctctctgtgctgggctgggcagggcagattgggtcacactggcacagaatggggctggactctctggtcctcaacttctgaggtgacaggtgctgtggggtcacctggaagaagaaagctcctgggctgagtctcctccaccagttgggggcagcagagctgcagccaggagcagtgaggagagaggctggggctgcccagctggggcgaagaggaaggccagcctggggttcaacaggtgtccaagagtcagtcttcagactgaaaatgaagacagttcatcctatcccctcgggctgcagtgaccacgttctgagggtcagattcatacagtgtcacccaaggacaccgacagaagcccggcacagtgaaggcctcacctgggaaatgcaactagaagaggctgggcccaggtgtcagcttgggcagcttccttaggaaggggattccctgggagaagtcctgaggccgaggtgctctaggaggggcacaatgtgaggtgacagggctcccagggcccaggttcttcacccaggatggcggcctgagcctcctgccactctcagggccttgtccctccctgtccagcagtgtcctggggagctgagccctctatcgtgggcacttccagatacacccgacccctcctgcctctgcctttccttccagctccaggtggactctgactcaggacgcagctcctgtgctcaggggagattcaggtgggtggcgtgaagcattttggggccctggtccctgcatgaggcatcaccagcctccttcaggagatgctgtccagaggaacagggcttctcacctgcctcaggccacagctctcaccacggggctgtcctttgatcagtggcaggatctgcatggctggagggactactgaccacatgctctctggagctcatgtcttgtgtggagaccatgacctggggaccctcagaaagaccaagcagcctaaagttagattttcagtccagtgtgattctctggttcttttcgcaagtttacgtaaaacgttgatgagaaaaagtgaataaataaaggaagagttgaggatggcaattgctggtctactgtggggctgggggataccatggaaagagcagcaccacatgtcaaatgagactagagattgggatgcatccgaaatatgtgtggttgctcaaatgacaaaactcttccaactgcaatgattcataagtgtcctacagacacagtacatcatgtacataacattaccaggatggggccaagtgactcgggggtatcaggagcagggatgaaagaggagaaagatgatgcatctttggtgtacttgctgctgagtcaggcgtcatcagtgatttctcaacagggcccagctcagccccaggccaggctcctggaaggtccatagtcctgctcaatgcagcccaggacaggccacatgacacagaggtttgagacagggaccatgttgtcaatccccaggacggtgactgtgatcacaggccttggaggccaaggctgattttctgactggagaagcagacgaaggaagctggggattcaccccttcattttaagtttctcatgctgcccccagagctggcttgagggatatcccgccatgaggagtcccagagaagtaaatttgcataaacaccaaggatgcactgccccagtgggcctgagaggaaataagagaggcctgggaagcccagctgtgctgtgggctcaggaggcagagctgtgggtgtctcaccatggcatgggccacactcctgctcccactcctcaacctctacacaggtgctgcccccagaccctgccccaggctcagccctcctaagcccctggtcttaccctgaaccctgagctcagcccaggcatagcctcagggcgatactactggaatgggtttgttatcttcaagccccctctcttgtcctctcttgcaggctctgttgcctcctatgagctgacacagctaccctcggtgtcagtgtccccaggacagacagccaggatcacctgctctggagatgtactgggggaaaattatgctgactggtaccagcagaagccaggccaggcccctgagttggtgatatacgaagatagtgagcggtaccctggaatccctgaacgattctctgggtccacctcagg

SEQ ID NO: 28013 - DNA, 2300 bp, Homo sapien
tgggcatcaggtagaggggagtgaccaggaccaactcccctgagtgtcttcagggccaggtgaactagggagggtctgggacctggtgtggacccatgcactgacccaggaataggacaggaaactcctcagagcaaggactgtgttttcctcatgctgagctcctgaaaagcagtcttgccaggatagagtgggccagggtggatatatgttgggtgaatgagcttctgtctctgttttattgcaggagtcactacgaaggtacgctggccctgtatttgtatccagaaccagtcaaagccacctgtgagtcctgcatccctcagtaccaagccccagtcccccttcaggaccacccaccacacagagagacagacgtgcagggagcctgaggaagaacctgaaacctcctctactacatggagtgtttgtatttccatcaggaatcttgagcaccttgtgccgggtcttgaggcaggaaggggccacacagagaagaggagtttcttccctgaggtcagcagtccatgaacgaagggatcagggacttgagcagcagattctgaagcaacacctggacccaggaggcccctgagcctccagcagcccgcgtagagtggccaccagggggcagcagagagtaacctggcagaagcacctggagatggggtgggcctgggcatcagggagatgcccacatgcagggagggtcggtgaccatgacctgagatctggagggaaagaggttcttcttttcttagagtatttgtccttgacaccgatgtttacattcttctggcttcctggttctcagatctgactcttggagatgatccttatttttctgacacacattcaggcactttgcctcttcccatcgacctggcccccatctcactgtcacacatgccatcccatcctgtagtcagacgtgtcccacctccctgcctttgctctgggagcccctgtcctgcagacacagccacttctccttccctggccacccctcaacgtccactgtccccggtctttcctgactctgttctggggaacctgccaattcgtagttcttgatttccttatgagacacacaatacttactcattaatcttttgttgacttaagtttttatccattgttacattttcccagcaacagaagacaacttagttataataaacacttacttcctgggtcttggagtttgcagccccctctcattttctcatgaagcaaacatttccttcacctcctgatctgtccctggtcctgacagcaccctggtgatactgaggcacagcacccatgacctgacactagaactcgcagccaaggtagaaacttaccgcatcccatggatcttccaaaattctatgtgcccttggcaaccaagaattgcattctcctctagcacagaggagctgtgccctggaatggggcctgtacctgtccaaggcttgtgccgtcccctgtgggagatgagaagcgtccctgcattgggctcttggggacccgtcttggacatgagtgagaatgaagagggtccctgcattgggctctggcatgtgactttaaatggatttaggcctgtaccagacatctcatgtctgacataaaatatttacaatcaggacattactagagaagcagaaaaaagctaaccacctccctcctgagccaggatggaatgaaggaggggactgtggaccccagataattcccctgtcaccactgtgactctaacaacctcttaaatcacggccaacatctatcccataggaaggtctttatatcccctagaaaatacagaggaagtcagctctgagcttttccacgaccaacccagccaaggagcaaggctgggcacaacctgggtaaagatgtgagcccagaccatgggaccagtgggtgaaggaaaatcgcatgggctgagggggtgggtaagcaggggccagccctcctctctctgtttcctttggggctgagtccttctctggaaaccacagatctcctccagcagcagcctctgactctgctgatttgcatcatgggccgctctctccagcaaggggataagagaggcctgggaggaacctgctcagtctgggcctaaggaagcagcactggtggtgcctcagccatggcctggaccgttctcctcctcggcctcctctctcactgcacaggtgatccccccagggtctcaccaacctgcccagcccaagggttctgggtccagcgtgtccttgattctgagctcaggagggcccttcctgtggtgggcaggatgctcatgaccc

SEQ ID NO: 28014 - DNA, 2300 bp, Homo sapien
tttttgtattttttgtagagacatggtttcacaatgttgaccaggatggtgtcaatctcctgacctcatgatccacccgtctcggcctcccaaagtgctgggattacaggcatgaactaccgtgcctggctgagtttgagattttaactgtaagtcctccaactaagttgccatgacaagaacagggatgatgagagtggaaatatgttatcctgcaaattatcgttttatgtaaaagaatattttccctcttttaggtaaaggaagcatcttctggagcaccttctctctgactatcaaagcaccattaagccacaaataaactgtaacatgaagtaggaaacaactgcccttttatataaccattgagaggtggctttatatgcataccaaaatgttgatgctcaatgctaaaattggatttagtaatttaatatgcctacaagaaattaattttctttggattatattatttctgtgtacgatttatcttagttaacttggaaatattctgctctaaaaacaactcttgttttttgggttatattttctgtatcaactatagctcttttccaaatgctgtcagagatagcccatggctactgatcacaaaattcaattttatggcatttaaattattctatactctaaattattttaaaagtgcacagatgtgaatttttcacatctgactcaaaaatgttgctgatgttgactcacttttttatttcaatcttattgaagtaggagtttacttttctggaacctggatgataacaggagactggagaggaaaccccccaaattgttttcctttaaaccctcaggatgaatcatcctggataatcacccacacttgatttgggtgatatctaaatgagagttgggtcttagagtaggtgctgagttagtttaggacttgcgctgttggaatgagttgaatgtttttacaagtgagaaagacatgagttttttggagtccagagggtggggggttattggctgaattaagtcccccaaaatgtatgcattgaagctgtaacacacaatatgtgactgaaattgtgcatagggtctttaaagaggtgactaagtgaaaatgaaaaaattagggtggattcttctcaaattggactgatgtcctcctaggaagaagaaatttgcacacacagaaatgaggcaccagaggtgagcgtgcagagaaaagaccaggtgaggattcagcaaggaggtagcaacctgcaagccaaggagagagtcctcaggggaaaccaaacccactaccacctttatcttgggttttccagcttcagaactgtgagaaaatatgtttctgccatttcggtcactaattctttcctatcttcttgtgggagctctagcaaaaacaagagggaccccaaagaccttggatgagggagaaggaggagatggagcagggtgcaggaggcggtgcaggaaggggctggaaggtcgggctctgaggtgcatctcctgggtggaatcttgactccactccctattgtctggaggacttgggaaaaacatttaacctcctaatattcactcactaataaagatgggcttgaagcacaaggctccccatcatcctattctatattacaaaagtcttcttgaggtaacacttgtaaaactctcgctaatgcatctggcatgtattatggactcataagtagcccttctgagtgatctagtgatgtgcagaaaatggcattcatgctgtgtgcaccagggggcactgtgaggtttagtctgaggcccctaatgagtccaagcccctagtaatgctcaagggcgaagagcctgactgttgcttcctatgaggccccttctagtgggtaaatctgaaaatgcacttggcccttcttctgatcttgagaaattactcagagaaggccatcaggctcagggctcagacaagaaccaggacaaatgttttagggaatggagaacagatttgcatccactgctcaccagagccacctaacgacgacacaagaataaaggaagtagatttgcatgaagagacttcccttcctatgataagagaggcctggaggttcctccttagctgtgggctcagaagcagagttctggggtgtctccaccatggcctggacccctctctggctcactctcctcactctttgcataggtgctgcctcccagggctcaaccccatattatcatgctagctgtgccaacctggccctgagcttcggctcaacacagggagtagtgtagggtgtgggactctaggcgtgaaacccttatcctca

SEQ ID NO: 28015 - DNA, 2300 bp, Homo sapien
caggacacctgggccagctcctggacttgcccccactgctctctgttctcctgagccacttagtctcttttggcctcagtgttacctgctgtgaagtgaggagccttatactgaactgaggaagctctttcttcattcaaaattaaaagacagaaaaacaacgaaagtcatgcgaattaaagcctgatgaggggatgtcacttaatgggcttcaatgggcttcagacaaaacttcttgtctttcctctgcagggattccaagaaagggactcaaaaagagcttgctttctgtatggtgggaagagcagtccccagctgagaataagcaggagagtcccagtttaatcaggaagacagactagggtagtgtagaaatcctctcagcacaaactctgagaagtatggaatgaaataaagacaaacaagaaattaatggtgccgacggtggtgatgttagctcacagctaagctgcagaaccagaaacatgcggtgatgggctgagtctcctccaccagctgggggcagcagagctgcagccaggagctttcaggagagaggctggggctgcccagctggggcaaagagaaggccagcctggggttcaacaggtgtccaagaatctgtcttcagactgaaagtgagtgcagttcatcctatcccctcaggcttcagtgaccacgctctgagggtcagacacacggtgtcaccccaggacactgacagaagcctggcacagtgaaggcctcaccagggaaatgcagctggaggaggctgggcccagatgtgagcttgggcagcttcctcaggaaggggaatccctgggaggcgtcccaaggtcgaggtgctctaggagggggtatagtgtgaggtgatggggctcccagggcccgggttcttcacccaggatggcggcctgagcctcctgccactctcagggtgtcatccctcctggtccagcagtgtcctggggagctgagccctctgtcctgggcacttccagatacacccgacccctcctccctctgcctttccttccagctccaggcggactctgactcagggggcagctcctgtactcaggggagtctcgggtgggtgtggtggggcatttgggaccctggccctggatgggcatccccagcctccttcaggagacactcttcagagggacagggcttctcacctgcctcaggccacagctctgaccatggtgctgtccacgctcagtgacaggacactgagcaggggcctggctggagtaaccagggaccacccaatctctggagctcacatgctgtgcagagaccatgaccctgggacccttacagagaccatggacctaacgttagattctcagtccagtgtggttttctgctgctttttgcaagtttacataaaatattgatgagaaaaacatgaataaataacagacaagttgacggtgctgattgctaatctcttgtggcaatgaggggtgatgtagcaggagcagcaccacgactgaaatgagaccagatgccatgttgactccacaggggtgtgtggttgcttaaatgacccaaatattcccactgaataatcagcaagtgtcctaatgacacagcacagcatttagatgaaatgaacaagaggggactgagtctgagggaccaggaggaggaagatcatgggtccctgggccacctgctgctgagtcaggtgtcatcatgatctctccacagagcccagctcagccccatggccaacctcctggaaggtccacagctctgctgagcctggcccaggacagaccccaggtcagcgaggtttgggacagtggtcatgaggttaattcccacaaaggtctatgatcacagggcttgaaggctgcagctgattttctaaccagagaccctgcttgttcctcctgttgcctgtgctgccctcacagctggtttgagagacatctctccaggaagagccacagaggatgtaaatttgcataaacgcttaacactgactgcccccgaaagcctgagagggaataagagaggcctgcggagcccaactgttctgtgggtccaggaggcacagctctgggaatctcaccatggcctggatccctctcctgctccccctcctcactctctgcacaggtgctgaccccaggcccttccccaggctcagtccccacagattccaagttgagcctgacctgaatcctgagcaaagcccagacacagcctctgggtgggactcctggaaatgggtcctttgtcttcaagccccctctcttgttcttccttgcaggctctgaggc

SEQ ID NO: 28016 - DNA, 2300 bp, Homo sapien
ccatctcagagtctgcttccaggcatcccaaaataacataaccagtcatcccgaacgtgagccatcaggaacctcaggaggccacagtataccagaaagcaccagtttattcctaatgatcattgtgagtttgcaaatgcccaatgagatctgagtgtttcttgcatttgtatggaatgaaaagggccctggcatgccaggcactgtggggtctgagggagagttggagtcagatctccctgcagggaaacctggggcaggaggagcagcctcatcccatgcagggaccacagatgcacctgcagggtgagctgcaggatggacactgcccacctccaccctccacattctgtgcaaaaaatcattctttccacccctccttcagcctatcaaagttgacacttaaaaagccaccacagcccacccttgtcaacaggaaacccattcacatctccatcagccacacaatctccacataaagattcttcaaaaaataataacacttgccatgcaaagtatatatataagatgtctcaaataattgtacttagattgcatatgaaagtgatactattttgatatgctaggtaaataaagtaaattatttaactcatttacttcttccctttgtatttttaatgcgatgactagacattcagatttccatgaggctcacatcatattgtgaatgaacagtgctggtctgcaccccttcaggttacagtggctgaggagtgacctggtgcaggaagccccatctccatccataggacattggtgtgaacccagggagaggcgctggtgtaagagagatgagaacacaggtgtgaaccacctgcttgtgcaggggactgagccttcactttgagccaaacaagcttcttttcctatcttcaatcctgagcaagaggactttccggacttctttttgttttcaggtttgtgcccctccaggcctgaggctgtctggatcccagccaggggacacagaggaaatccagaagtctcacaccgaccctgttgtatttcatctgctggggccatcccaaactgctgcgtaccatttcctttcctggtgctcaaatagctgctctatgcacttgtcatggtttcagagatgactctaggtgggaagacaggataatgtatgttattatatttaaaaggaacttaaattcattaatatttattttaatatgaatcattaaaaaaatttgtcataggcaatggggaaggaggaaaagatattaaaattattttgaggaaaaaaccaaaattgtatttctcgaatgtctgagtgtcttcagtgtctcagggttgacagcggtcagctttaggttgtcctgaggatgtactccattgggggaaagcaagaaagcatgaaacacacatctctgtgacctgacacataaatcacagtaaaatggaagtaaatcttttaataaatcaaacactcacaataaatatcactctggtgaacacagaaatgcctgttaacaaactttccctttcccctgctggctcatatccccatggatcacctgtgtgcagagtggactctgtggtccccatttctcaggctgagaaccagaggctgggaaggacaagtcacctgcttgtgagtggcaggggaaggattgggagcagtggactcggtctcaggactgcggccctcaggaccaatgccacctagcagaggtttccacggggcgggctgccccatttcctgacagtagggacaacctggaggtgggtgccaagcagagggcactgcagggtgtgcccaggcctggagggtcacagagacacaggcaccacacagcagagacactgagggccagaagatcactcaggtaagggacttcagcagatctttctcctgagcaaatcaggtacaaaaaaattaagatcctgccatcagaatagataaacaaggactttaatctcagctgagctccactatccaaggaagcagaagcctctgagcccaggcccaggtgagggtggggtgaagggaggagctcaaggtggagatttgcatgcaggccccaccctcctctttggcagaggagataagacagggctgggggcaggcccagtgctggggtctcaggaggcagcgctctcaggacatctccaccatggcctgggctctgctgctcctcaccctcctcactcagggcacaggtgacgcctccagggaaggggcttcagggacctctgggctgatccttggtctcctgctcctcaggctcaccggggcccagcactgactcactggcatgtgtttctccctcttt

SEQ ID NO: 28017 - DNA, 2300 bp, Homo sapien
cagtgtagagtggccacctgggggcagcagagagtaacctggcaaaaatccctggaaagggggtggagctgggcatcagggagatgctgacatgcagggagggtcagtgaccatgacctgagacctggagggaaagaggttcctcttttcttagaatatttgtcattgacactgatgtttaaattcttctgacctcctgtctctcagatttgactcttggaaatggtgcttatttttctgatacagattcagacaatttgcctcttctcattgccctggcccccatctcactgtcacacatgccattccattctgtagtcacgcgtgtcccacctccctgcccttttctctggtagctcgtcctgcagacacaggggcttctccttccctggccactcctccacgtccactgtccccagtctttcccaacactgtcctggggaacctgccaaatcacagctcttgatttccttatgaggcacaaaatacttgctccttaatcttttgttgacttaagtttttatccattgatatattttcccagcaagtgaagacaacttagttataataaacattcacctccagggtcttggagtttgcagccccctctcattctctcacaaagccaacatttccttcacctcctgatgtgtccctggccctgacagcaccctggggatactgaggcacagcacctatgacctggcattagaactcacagccaagtagaaacttatcacatcccatggatcttccaaaactctgtgtgcacttggcaaccaagaattgcattctcctctagcactgaggggctgtgccctggggtggggcctgtactggtgcaaggcttgtgctgtcccctgtagagtgggaagtaaaaggtccctgcattgggttctggattgtgtcttcaaaatgaatttaggcctataccaaacatctcatgtctgacataaaatatttatgaccaggacatttctagagaagcagaagaaagttaaccacctccctcctgagccaggatggaatggaggaggggactgtggaccccagataattcccccatcaccactgtgactctggtaacctcttgaacagggccaaccactatcccataggaaggactttatatcccctagaaaatacagagaaactcagctctgagtttttccatgaccaactcagcccaggggcaaaagtgggcacaatctgggtaaagatgtgaactcagaccatgggaccagtgggtggaggagaatcccatgggctgagggggtgggcaagcagtggtcaccccttttctctctctctctgtgtcccttgggactgagcccttctctggaaaccacaaagctcctccagcagcaacccctgactctgctggtttgcatcatgggctgttctctccagcaaggggataagagaggtctgggaggaacctgcctagcctgggcctcaggaagcagcatcagcagtgcctcagccatggcctggacccctctcctcctcagcctcctcgctcactgcacaggtgctctgcccagggtatcaccaacctgcccatccccagggctctgggtccagtgtggccatgactatgagctcaggagggccctgcctgtggtgggcaggatgctcatgaccctgctgcagggtgagggactggcggagctgaagtcccctcaaactctgctcagaggcttgtgagagcctgaggggctgcacctgccaggagagagtactgggttttcagttcaaaggctccatgcagagggaaagtccatgggccactggggctagggctgattgcaggggataccctgagggttcacagactctctgaagcttttccaggacagcagggcaggggatttcatacggatcttttacctaaaagccatcctctcctttttttttttttttaatctttgcaggctctgcgacctcctatgagctgactcagccacactcagtgtcagtggccacagcacagatggccaggatcacctgtgggggaaacaacattggaagtaaagctgtgcactggtaccagcaaaagccaggccaggaccctgtgctggtcatctatagcgatagcaaccggccctcagggatccctgagcgattctctggctccaacccagggaacaccgccaccctaaccatcagcaggatcgaggctggggatgaggctgactattactgtcaggtgtgggacagtagtagtgatcatcccacggtgacacaggcagatggggaagtgagacaaaaacaccctcccagcctcggtcaccctcttg

SEQ ID NO: 28018 - DNA, 2300 bp, Homo sapien
aatggaaagggagcctgacttgccaggtgctctgggtctgagggagagttggagtcagatctccctgcagggaaacccgggacaggaggagaagcctcaccccatgcagggaccacagatgcacccacagggtgagctgcaggatggacactgcccacagggtgagctgcaggatggacactgcccacctccaccctccatgccctgtagaaaaaatcattctttccacccctccttcagcctatcaaagttgacacttaaaaagccaccacaccccacccttgtcaacaggaaacccattcacatctccatcagccacacaatctccaagattcttcaaaaaataataacactagctatgcaaagtatatgatatatatcataaataattgtacctagattatatatgaaaatgatactttttgatatgctaggtaaataaaatatattatttaaactcattgacttcttctctttgtatttataatgcgatgactagacagtgggattcccatgaggctcacatcatattgtgattgaacaaggctggtctgcagggcttcaggttacaggggctgtggagtgacctggtgcaggaaaccccgtctccatccataggacatcagtgtgaacccagggagaggcgctggtatgagagatgagaacacaggtgtgaaccacctgcttgtgcaggggactgagccttcactttgagccaaagaagtttcttttcctatcttcaatcctgaacaagagggctttctggacttctttttgttttcagatttgtgccccttcaggtttggggctgtctggagtcccagccagaggacagtgaggaaatccaggagtctcacactgactctgttatatttcatctgctggggccatcccaaactgctgtgtaccatttcctttcctggtgctcaaatagctgctccattcacctgtcatggtttcagagatgaatctaggtgggaagacaggacagtgtatgttataatatttaaatggaagctgattccattaatatttattttaatatgaaacattaaaagaattttgttataggctatagggaaagatgaaaagagattaaaagtattttgaaaaaatgtatttatcgaatgtctgtgtgtcttcagtgttgcagggttgagagaggtcagctttaggttggatgtgctcagatgaggaaaagcaagaaagcaggaaacacgcggctctgtgacctgacacataaatcacagtaaaatggaaataaatctttcaataaatgaaacattcaaaataaacgtcactctggtgcacacagaaaggcctattagcaaactttccctttgtcctgctggctcatatccccatggatcacctgtgtgcagagtggacactgtagtccccatttctcaggctgagaactagaggctgggaaggacaagtcacctgcttgtgagtgggaggggcaggattgggagcagtggactcgggctcaggactgcggccctggtcggtgctctgtgttccctccacaggatccctcccacatgtgcccgtgtggatgtgggtgcactgcctggggtggctgatgtgctccagggattcgatggtgcagatgcttcagcacaaagcttgggggtggggatgggatgaggctgcagctggggagaccagggaccaatgccacccagcagaggtttccacggggtgggcagccccatttcctggcagtagagacagcctggaggtgggtgccaagcagagggcactgcagggtgtgcccaggcctggagggtcacaaagacacaggcaccacacagcagagtcactgaggaccagaagctcactcaggtaagggatttcagcagaactttctctcctgagcaaatcaggtacaaaaaaattaagatcctgccatcagaaaagacaaacaagaactttttatctcctcagctgagccccactgtccagggaagcagaagtctctgagcccagcccaggtgagggtggggtgaggagaggagctcagggtggagatttgcatggaggccccaccctcctctgaggcagaggggataagacagggctgggggcaggcccagtgctggggtctcaggaggcagcactctcgggacgtctccaccatggcctgggctctgctcctcctcagcctcctcactcagggcacaggtgacacctccagggaaagggtcacaggggtctctgggctgatccttggtctcctgctcctcaggctcacctgggcccagcactgactcactagagtgtgtttctccctcttt

SEQ ID NO: 28019 - DNA, 2300 bp, Homo sapien
cagtgtgtgatgaaataaaaataacagtcatagaaaaagatggcgatgatgatgataatgacttaagtacacaactaaggtttagtgatagaaacatcaggtgttcccaaattcaatgcagcttttcttataaaatgggggcaccagtcttagttcccatatatttaggaattgagggtccccatgaggtgtcgctgcatttctctgggcttttatgtttatcacagaagagctacagcttaccctgcactctccagcccgcaatcaaaaatcatggaccaaagaacaacatttcagcacaagactccattatgggaattgaatctgcccaccctcccgaaaccatatacacctttctgtgctgacatgagaaaaccacagtggatcacactggctcaaagtgaggctggactcctttgtccccaacctcccagatgacaggtgctgtggggtcacccggaggagaaaagctctcctaggctcagtcttgtccaccagcaaggggcagcagagctgcagccaggagcagccagaggctggggctgcccaggtggagcctaaggggtaggcagccctgggaggtctacaggtgtccaaggttcagtcctaggattggaagtcaggacagtccatcctattgcttctggttacagcgaccatgttctgagggtcagactcaaacagcatcacccaggacaccgacaggagccggggcacaatgagagcctcacctgggaaatgcagccggaggcacctgggcccagatgtcagcctgggcagctcccacagtgctggaattccctggaagatgccccaaggttgaggtgctctaggagggggcccagtgggagaggatggggctcccagggctcaagtccttcacccaggatggccatctgagcatcctgccactctcggggcctcgcccctccctctccagcagtgtcctggggagctgaaccctgtcccaggcacttccagggacgcctgacccctcctccctctgcctctccttccagctcgagactgactctgactcatggggcagctcctgtgcgcaggggagtctcaggtgggtggggcggcacattcagggccccggttcctgggtggggcttcccgggcctcctagaggagatgctctccagagggaagggggttctcacctgattcaggccagagctctgaccacaaggctgtccttggctcagtgacaagagtctgctgcattgcagagaccagggaccacccaccatccagagctcacactctgtgcaaaggctgtgtccctgggatatttgcagagaccaccgggcctaaagttgaatttcccatcaatatttcatgtaaacttgtaaaaagcaccagaaaaacacactggactgagaaccccgatgcttttctggggccttttacaagtttacacaaaatactcataggaaaaaataaataaataatggaagagctgaggatggcaatggctgatctatgtggggatgggggatggcctaaaaggagcggcaccatggctgaaatgagagcagacgtccagatgatgccacaagggtgtgtggttgcgtaaatgaaccacctactcctactgaaataattaacaagtatcctgacgacacagtacgttatttagatgaaatgaccaggatgggactaagtaatgctgggggacccagagaggagggggaatatggtgggttcttggtccacctgctgctgagtcaggtttcatcaatgatctctcagcagggccaaactcagccccaagccaggtttctagaaggcccgcagccctgctgagcctggcccaggacagaccacaggtcagagaggtttgggacagtggtcatatggccagtccccaggaaggtgactgtgatcacaggcctcagaggtcgaggctaattttctgaccaaagacccaactccttcttcagtcacctgtgctgcccccacagctagtttgagtgacatctttcaatgaggagtcccagaggatagaaatttgcatgaacaccaagcacttactgccccatagggcctgggaaggaataagagaggcctggggagcccagctgtgctgtgggctcaggaggcagagctctgggaatctcaccatggcctggacccctctcctgctccccctcctcactttctgcacaggtgcttctcccaggccctgccccaggctcagtgcccatagaccccaagttggccctgccctgaaccctgtgcaaagcccagacacagtcttagggtaggacccctgggaatgggctcttgatctt

SEQ ID NO: 28020 - DNA, 2300 bp, Homo sapien
actcttcccctcacactcctgttccaggttactcttctccaatatgatgggggtttgctttcattgtttctgtattttttgtatttttatgggtaagctgagccccttttacctggtcttgagtcaggcaggggccacacagagaagaggaattcctccccaggggccagcagtccacggatcaaggcatcagggacctgagcagtaggttctgttcctatgcctggacccaggaggcccatgagcctccagcagtcagtatggagcagccaccaggggggcagcaaagagtcacctgggaaagccacctcgggatggggtggacctgggcatcagggagatgctgacatgcagggagggtcagtgaccacgacctgacacctggagggaaaataggtccttctttttctagagtgttgtccttgacactgatgtaaaaattctagcatcaaattttatcttcagcttttgtagatgctcctatttccctgacaaaggtccaggcacttgacttccccacacatcctctcctcacacacccagttgtgctaaaatgctgtccctgtcatgcacagtgtccttcctgaggtgacacgtgtccccctccctgccctttgctctgggagcccctgtcctgtagacacagcagcttcttcttccctggctgctccccatctccactgtccctgggctttcccatctgtctcctgggaaagctgccaaatcacaggtctcaatttccttgtgaggcacaaaatagttgctcattaaccttctgttgacttaattaagtttttaattccttgatttgttttccccagcaactgaagacaacttagtcataataaacattcacttccaggggtcttgcagtttgctgacccctctcattctctcatggagcaaacattttcttgacctccttatctgtcattggtcctcacagcaccctggggacactgaggcacagcatgtacgacctgccctggagctcacagccaacgaggaaacttaccgcatcccatggatcttccaacactccatgtgcacttggcaaccaagaaattttattcttctctagcactgaggagctgtgccctggggtggggtctgtacctatccaaggcacatgctgtcacctgtagagtgtggatagagggtccttgcattaggttctggaaagtgtcttcaaaaacggatttaggcctacacccaaaatctcctctctggcacaaattattcatgatcaggatacatctagaggcctagaccaaaattcaccacctccctcctgagccagaatggaatggaggaggggactggggaccccagataatttccccatcaccactgtgactctatggccacctcctgcaacagttagggataatcacataggaagggcttcatgtatcctaggaaaaacacccaaagtcatttatgagctctaccatgaccaagtgagcccaggagtcgggttgagcacagcgtggtgtggagatatctgcagagaccgtggaaccagtttgtaaaggagatcctgtaggctgagggtgagagtgcaaggccactcctccccctctctgcatcctttggggctaagcccttctctggaaaccacaaagctcctccagtagcagcccttgactctgctgatttgcatcacaggctgctctcttcagcaaggggataagagagggctggaaggaacctgcccagcctgggcctcaggaagcagcatcgggggtgccgcagccatggcctggaccgctctccttctgagcctccttgctcactttacaggtgctgcccccagtgtcccagccacctacccagctccaaggctctgggtccagcctggcctgacagtgatctcagcagggccctgcctgtggtgtgcaggatgctcatgatcctgctgcagggggaggggctgctggaggtgaaatccccccacactgttcttctgtgctcatggtcccctgaggacacttctattcctgaaactcaggccaggcaggtgggaaggcattgttgggttgagcctctcagtttcaagtctattctattctctccccttttcttgcaggttctgtggcctcctatgagctgactcagccactctcagtgtcagtggccctgggacagacggccaggattacctgtgggggaaacaacattggaagtaaaaatgtgcactggtaccagcagaagccaggccaggcccctgtgctggtcatctatagggatagcaaccggccctctgggatccctgagcgattctctggctccaactcggg

SEQ ID NO: 28021 - DNA, 2300 bp, Homo sapien
tgcatggaatgagaagggagcctgactcgccaggtgctctggggtctaagggagagttggagtcagatctccctgcagggaaacctggggcaggaggagcagccttaccccatgcagggaccacagatgcacccacagggtgagcttaagtatggacactgcctacctccaccctccacatcctgtgtaaaaaatcattctttccacccctcctccagcctatcaaagttgacacttaaaaagccaccacaacccacccttgtcaacaggaaacccattcacatctccatcagccacacaatctccacataaagattcttcaaaaaataataacaatagccatgcaaagtatatgatatatatcataaataattgtacttagattatatatgaaaatgatactctttttgatatgctaggtaaataaaatacattatttaaactcattgacttcttctctttgtatttataacatgatgactagacagtgggattcccatgaggctcacatcacattgtgattgaacaaggctggtctgcagggcttcaggttacaggggctgtggagtgacctggtgcaggaagccccgtctccatccataggacatcagtgtgaacccagggagaggcgctggtataagagagatgagaacacaggtgtgaaccacctgcttgtgcaggggactgagccttcactttgagccaaataagttttctttcccaagttcgatcctgaacaagagggctttctggacttctttttgttttcaggtttgtgccccttcaggtttggggctgtctggagtcccagccaggggacagtgaggaaatccagcagtctcacactgactctgttgtatttcatctgctggggccatcccaaactgctgcgtaccatttcctttcctggtgctcaaatagctgctccatgcacttgtcatggttttatagctcaatctagatgggaagacaggatagtgtatgttacaatatttaaatagaacctgaatcccttaatagttattttaatatggaacattaaaagagttgcatcataggcaatggggaaagatgaagaaagattaaacgcatttggaggaaaaactaaaaatgtctttattgaatgtctgtgtgtcttcagtgacgaagggttgagagaggtcagctttaggttgtcctgaggatgtgctcagatgggggaaagtaagaaagcaggaaacgtgcatctctgtgacctgacacataaatcacagtaaaatggaagtaaatctttcaataaacctttcaagataacatcactctggtgcacatagaaaggcctgttagcaaactttcccttttccctgctggctcatatccccatggatcacctgtatgcagaacggactctgtggtctccatttatcaggctgagaaccagaggctgggaaggacaagtcacctgctcatgagtgggaggggcaggattgggagcagcggactcaggctcaggactgtggccctggttggtgctccttgttcccttcacagggtcccacccacatgtgcccgtgtggatgtgggtgcactgcctggggtggctgatgtgctccagggatttgatggtgcagatgcttcaggacaaagcatgggagtggggatgggacgagctgccgctgggcagaccaaggaccaacgccacccagcagaggcttccagtggggttgggcagccccatttcctgagaatagagagaacctggcaatgagtgccagaaagaagttacttcgaggtgtgcccaggcctggagggtcacagagacacaggcaccacacagcagagacactgaaggccaagagctcactcaggtgaagggcttcaacagatttttctctcctgagcaaatcacgtgcaaagaaatcaacttcctgtcatcagaatagacaatcaggactttagtctccttggctgagccccgctgtcaagggaagcagaagtctctaagcccaggcccaagtgagggtggggtgagaagaggagctcaggatgcagatttgcatggaggtcccgcccttctctgaggcagagggataagacagggctgggggcaggcccagtgctggggtctcaggaggcagcgctctcaggacgtcaccaccatggcctgggctctgctcctcctcaccctcctcactcagggcacaggtgatgcctccagggaaggggccacagggacctctgggctgatccttggtctcctgctcctcaggctcacctgggcccagcactgactcactagactgtgtttctccctttccagg

SEQ ID NO: 28022 - DNA, 2300 bp, Homo sapien
tgggatcacctggagaaggcaagtgcctgggctctgtcttttccaccagcagagggcagcagagctgcagccagaagagaggctggggctgcccaggaggagcctatgaaggaggccagcctttgtggggggtggtcaacaggtgttcaagggatcagtcctcactttggaagtttggtatagtccctcctgtcacctggggctgcagtgttcatattctgagggtcagacacacagcatcacccaggatactgacaggggcccaggcacagtgacggcctcagctgggaaacacaactggaggcacctgggccctggtgtcagcctgggcagctcccatagggctaggatttcctaagagacgctccgaggtcaaggtgctctaggagggggaacagtgtgaggggacagggctcccggggctcaagcccttcacccaggatggctgcctgagcctcctgccattctaagggtctcattcctccgtgtccagcagcatcctggggagctgagccctctacacttggcacttccagagacaccctaccaccccctccctctccctctccttccagctccaggccgactctgactcagaggcagctcctatgctcaggggattctcaggtgggtggcgtgggacatttgggatcctggtccctggatggggcattcccagcctccttgcggagatgctctccagagggaagggaatgttcacctgcctcaggccacagctctgaccatgggactatcctgggctcagtgacaagatctgtctggctggagggaccagggatcccccaccctccagagctcatgggtgttcagagaccacgacgctggaaccctcacagagaccaaataacctaaagttagtttctcagtcaggtctgggtttctggtgctttttacacatttatatgaaacactgatgagaaaaaataaagaatcaaagagcagaggatggcaatttctagtctattagagagatggggggtgtcatacaaggagcaactcaggtgagaaacgagactagactgtgtaatgaatccacatgagttgtggctgctcaaaggaccaaaccatggtaatggaaatcaagtttaggatataagtatcctaaagacacagaaccacattctaattaaactaccaggacaggaccaagtgagtctgggaaacccagagctgacttggaggaggaggaagatgatgggttcctggcccacctgctgctgagtcaggtgtcattgatgatctctcagcacggcccagctcagccccatggccaggctcctggaaggtccacagccctgctgagcctggcctaggacacagcacaggccaggatggtataaaacagtggtcatgtggccaaactccaggaggtgactgtgatcacaggccttcaaggatggagtctgatcttctgaccagagaagcagataaagtgagctgggacccacttcttcttcctcagtctgctgtgcttcccacagagctggtttgagtgacatccttcagtgaggagtcccagaggatgccgatttgcatcaaacactcactgcctcaaacggcctgagaggcaataagagagagctggtgagcccagctgtgctgtgggctcaggaggcagagctctgggtgtctcaccatggcctggatccctctcctgctccccctcctcactctctgcacaggtgctgcccccaagcccttccttcaggctcagaacccataggatcctgagctgggcctgcccaaacatgagttcatcccaggcacaacctcagggtgggaccccctgggaacagattcatcatttacaagcctcctctcctgtcctctcttgcaagctcctatgagcttacacagccaccctcagtgtcagtgtcaccaggacaggcagccatgatcacctgctcttgagataacctcaaagatgagtatgtttactggttctggcagaagccagaccaggcccatactggtgatatatgaaggcagcaagcggccctcaggaatttctgattttctgagtccagctcagggaacatggccaccctgaccatcagcagggctcagactgaggacgaggctgactattactgtcacaggtacaatagaaacagtgatgagcccacagtgacacaggcagattaggaagtgagacacaaaccccttcccaatctgtgtcaccctctttctccagccccaggatggctgtggacaaagccatgagcagggctggtccagttcacccagttctgtgacccccaggctgctcttccctccag

SEQ ID NO: 28023 - DNA, 2300 bp, Homo sapien
cccatctctgaaagccctcatgttttaaaagacaagatttttgaatttcaaggaaaactaaacctttgaaaaaaacatgattcaaaagagaaccttgccactttccattcctgcttgggctgcagtgaggacagatgcagcaagtgcttctgatgtctgtgtctgttcccctgtgtggacgcacatatccaggcgagtttcagtgaggtaggagacttcggcagcattggccgggctctggtttgcttctggtgctaacggaacatggaagagaggacaaggtagcgtgtcctgaagatcacatatttcctttttgcaggaagtgcctgggctcctggagtgttctcagggctttgatccaggccaccggctccgcaatcaacatcactgatatttcagcaggtcattgacctaattccattttagtgctatctcaaatggaaacattattttcttgtaactattcatatagcaacatagcacttaaatatctaaataacacacacagaaacagtagtctcaaatgcaaagctgtcacctccccacaccacacactttctcacccgagcccctgagcccacccttccctcggccccccctctcctgtgctgttagaaatctctgtcttctaacagggacagtgacacaaaacagccccccctcccgcccagcactcacaccgcagagcccctagtccatctcctgagggaacgtttacgtttctattctgacagagagaagtcgccgtgaatggagtctttaccccaaacccaggagtttctgaggaacacatggggtcagccactgtctgtgtggggaggcttcacctcagggaggcgcccggctctgggctgagggggactcaacgtgcactaaaaggcaggactaaggcaagtcccgggtcacagtgtgagggacgcacgcgccctgaggaggggtccctggtgctaggcctgacccaattctaaccccaggcacctttcctcagctcctgtggccctgggacacctccctaccctgcttcccatgaggctggtcacagctcttgtgagcaccgcctcctccatgtcacactttttctgtcaacattttgaggagccagttggttttctcctcattccatgttcctgtcccacctgcctgctgggggtggatttatttcatgtatgaggtttcctcagcctgagccacagctgcctcaaggacaccaaccctgtgggacactcctctgggaaaagcaaacaagtgccaagaggagcatctgaagctctggtgtgggagatgtcctccaccctgggtcaggggagtctggaggggatgagaagggaccaggggcctgggattgagctgtgaagggaaccaaaaggcaggagggacagggcaggggctgtcagctatgactcaggggaggttcctgggcctcaggatcctccctctgaggccaccagggggcgggggtggcacatgcctggacctgggaggtccctgctgggcttcaccctgggtgggtcctaggagctccttcctcctaagtccccctaaagagacagaggcattctggggtcctaaatctgtcatgcccccataaatgcatttctacgagggccaataaatgaactccaggtttatccaagcagcagcttcaggcgtctgcagacacagagcggggaggaattagccaacctgaggcaccctagaagggctgaagggggctgaaggggactgaagggtccctgtggggcctgtggtcctggggaggggagagctggggtgtctcccagccactctgggccctgtcctgacacttctcccacaaagaagggaagggaaatcctgggaccccacagccaggaccaaccgtgaaccacaggacaggaaggacagggacccccaaggctggctccatttcccaggcactgtcatgggctgagtctcaggaaatccaagtcaaggagtttcaatccccctggctgagccccactgtccaaggaaacagaagtctacgggcccaggcccaggtgagggtggggtaagaagaggagcttaggatgcagatttgcatggaggccccgccctcctctgaggcatcagggtaagacaaggctgggggcaggcccagtgctggggtctcaggaggcagcgctctggggacgtctccaccatggcctgggctctgctcctcctcacctcctcactcagggcacaggtgacgcctccagggaaggggcctcggggacccttgggctgatccttggtctcctgctcctcaggctcacctgggcccagcactgactcactag

SEQ ID NO: 28024 - DNA, 2300 bp, Homo sapien
tctttaactgagcttacccaaatattatttcaatatgtaatcaacataaaaatattgagatattttatgttattttcctacaacctttttgaaatccggtgtgttttacccccacatcacatcttaacttgaactacccacattttaaggactcagaagctccctgggactcatggttgctatactggacagagcagatccacatgaatgatgatccatttggatcacagcccctgcagtacttacttagaaccatcttggggcaatggagagtcctatgacccagagggcctccttagggaagaatggctgttccattttccaaccaaagtagaaatatggcgggctctcagaaaccagggaatttttacaatgtgtttcacacttcttcccttctcaaagacattgactataacttccagttcgaagataaatctgagccatcaaaggcatttttttctattggtcagtggaatgaatggcaatggtccctgtggattgtgctccaaggatccctttctgtgggaagattcttacaataaaaccaactaaaagtaggaagttattgtttatatgtagatctagatgaaagggggctgatcatgaggaatatagtattgaaggtgagtgtgttgctattcttcacaaagggctatttttgcctaactcacaagcatcaatcatttttatgaaggtgtattttcccagagtggtcttagcaagttacatccaacgctgtatcaggacccacaagcaagggtgtcagaactgacctgcctgagcggtcagcaggaaccaatgtggagactctgaggtctccacaccaccaaccatgtccaacctccagtcaagtgacaggaggagtggaagcattggttgggaagggcttggaggagctgcagtgacatgctcagccaagtacaggagcaggcatattggtgtcatgtgacctcatcttatctcagttatctcttttcaccaaactccaaggtgcaatgtgtggaggcatctgtctgtacccatggacaccttgggcttcacacattatttctatttctaatgaaccagtgttttgttaatgaattcatttcatcacatccttagtacttctaggttggaaaagcaatacatgtctctaagatattaggtaggaaatattctcccgccactcgtatttattaaagttaaaatgcttcagtatctaatgtgacagttgtccaaattcaatacccttcaccttgttagaaatggaatcctgatcctaacttgtctggagaggaggctggcatgaggagcatgaccacacatctggatgtccccagtgtcactgctaacacacgctcttttgttacttgccgtgaagggagcagagggagcatccacacctttgtccaaaggacttggaggacagtgcacctgattaaaaaatgcagggctgtgataagtgggttccgggtcctggatgagggaagagaagatgaggaggcatggggtaggaggcagggcagggaggagctgtaaggtcaggctctgagtatgggtgaaatcctgactccactcactactctctgggaggatttgataaatcttgtaacctcctgatgttggttctcccatcaataaactaaaggagaggtcgtgtcttaagcgtatgcttgctgtggggctactgtgaatgtgtggttgaggtggtgcctgcaaaacactctccaaagggcctggcacgtattaatgtctcaaaggagtcattctgcttaagctcgtggaggatgactttcctcctgtgtgcactagagggccttgttttgaggaccccagtgacttccctggtagggctcaagcacaaagggcatgactgatgcttcctctgaggccccttctattgggtaaaattcatgctccactcatgacacccacctggcccttcttctgaccttgagaaattgccaatatgaagccctcagactcagagctcagacagtacctcagacagacatgctgtaaagtggagagcagatttgcattcaaagctcctcccttcttgagcttcaagaagaggataagacaggagctcatagtgtccaggttccactgggcagtctcgaatagagctcttggaagtccctccaaccatggcctgggtctccttctacctactgcccttcattttctccacaggtcagaacatcccagggaattcagggaaatgttttcactgctattttcccatgagcaccagtcctcaggggcattctttccagttcttctgtgcattcagcatcattcatgacattctgttt

SEQ ID NO: 28025 - DNA, 2300 bp, Homo sapien
gctaagggtgtatttctcgctgcaataatacccaccactttcacgaagacaccagggtctttctcactttttgtcccaccatccctatgatattggctttattttcatccctgctgatgtgtgacctcagggtggctgctgcagctccagctatcactcccatattcaaggagaaaagggcctcatgaatctagtgctctttcacaagagcaaagctttcctaagaagaatttcacccactgatctcacaccccactgatcaggcctgagtcacatggtcaatcccagctgagcaggacctgggaatcacaggcaccagtcttttcggtgaatatagaagacagtgctcaggtggaaggtgacagggactgtctgctgggtctgcaaacccagttttcccgcacagccaaaccagcacgatgaacaactcacttcaagaaggctgtgtcttgttcctgctgaattcaccgcatggaacgtgtcccagaccacagtgggtctggattaacatttgatgggtggatgttcttctgtctctgactttggtgcaggagtcaccactgtacgctggtcctgcatccacagcggggaccagtaagagccagtccctgagtcctgtgatccccgccctgcatgccaagccctggtattacccccatgaccacccaccgcccagacacatgtgcaggcagcctcagatggaccttcctcctcctcttccaaatattcatgttcatattgtcatgagtaatctgcacccctcgcacctggtattgaggcaggcatgagtcacaaagagaagagaaaaatttcctccattggcaccagcagtctgcagaccagggaatcagggacctgaacagaagattttaattatacacccggacccaggaggcccttgagcctccagcagccagtatggagcagccaccaggggacagaacagagtcacctggcaaagtcacttggagatagggtagacctgggtgacaaggagatgctgacatgcagggagggtcagtgaccacaacctgagatctagaaaggtgtcgtttttctacagcatcatccttaacatcgagtacaaattctccaggctttgtgtttctcagctttgtctctggccaatgttgcatatttgacacaggtgcagacactttgcttccccctacacactggcccactcttctgtgctaaaacgctgtcattgccacaaacgccatcctcccctgtgggcacatgtgtttcatcaccctcctgtttgctctgagagccccctcattctgctacacagcaaagttttctttcagcatctaagctgtacctgaccatgaccacatactgggggtacataggcacagcacctgtgccctaccctaggagctcacagccaaggccaggaacttacagcatctcctgagtctttcaacactccgtgtgcacatgacaagggtgaagtttgattgtggaaagcaccactcagaagcaatggcaggtccctgcatgtgtgccagccttacggtgtcacctgtagagtggggtcatgagggtcactgcactgggttgaaaagtgccctccagagggggagctagaaccacacctaacttctggattttgccacaaaatatttagggacaggacacccctggagtcctcaattacccaagttattctgagccagtattcaacagaggaagtaccttagatctcagaataatccctcagtcgccattgtaagtcagtccctggccatctccacgcaggacaaggaatggccacatgggcaggacatcatactacctggaaaacgcacaaagaattcctctcagagttctgcatggccagatcagctcaggagtgaggccataacacaacctacagtgacgatgtcaacccagatgatgggaccagaaggagaatgagaattctgtgtgctgagggtgggtctttaggggccccctctctctctgtcccttggggctgagcccttctctggaaaccacacagctcctcctgcagcagcccctgactgctgatttgcatcacgggccgctctttccagcaaggggataagagaggcctggaagaacctgcccagcctgggcctcaggaagcagcatcggaggtgcctcagccatggcatggatccctctcttcctcggcgtccttgcttactgcacaggtgctgcccctagggtcctagccactggtccagtcccagggctctgggtccagcctggccctgactctgagctcagcagggcccccgcctgtggtgggcaggatgctcatgaccctg

SEQ ID NO: 28026 - DNA, 2300 bp, Homo sapien
tgtaagaatgtagtttttttgggggggtccatatttttagagacacaaatggaatatttagactaatggacatgatgtctacaatttgcttcaaacaactgtgtaaaagaggttacttgattgtgggtgggtcaacatgagctgtattatcctcctgtttttttattttcttgctgtcagtttccgtaatatcttacaaggcagtaattagagagattagtcttgggacagcaccaggggacatccagaggggatcctacccagcagggccattgagaaggtggagatcaaagcggtcctctttgctataggggtctcagcgttcacatctatgaaatggggccagacagggtggtgggaatcaggacccttaagtttccttctaacttgtaggttgtgacttgaggcaggggttctatgattaggctccaagaggaaccccttctctgccccactatggccctagagttctctgcccttgcaggctctgtctcaggcctggcctggccacccagcagctctggtgaaggcacctgccacaccgctgatgtgctggaggcaccaagaaggggcctgacagtgcccaagactgatgaggagggctgggaagtgcatctcccaaggccacctcactcgctgtcagggaccctgggatgattgtgtctctgacatcagggtgtaggtgcacatggaggggctgaaccacatgattgagggagggagtaggccctggtggggaggggtctaaggtagctgagtcccatgaaaacttgacctgcctgtagcccttaagtcacacttaccctgccctgacctagtgtgacctggccctgattcttgggcgagtatgattttgacacagcctccatcagacaaccaatggatgccgattctatgcttgggatggtgcctttctcatttgacccagtccacctgagtcctaccctcacacaggctggccatcatggctccagccataaccataatctaactctactgcgtcccctgactttagaattcgagactcttcatggttgagatctcagccctatgctctctttctgacctggccagtgttaaccctgagcctgacccatttgatcacaacgaatcatctgtgtgcctcagcctcagcccatgtcccagcactagtgacatgaacaccagtgtcttgaagagcgctctagggctaagtgggttgggacactgaatagaattcttgacttgcaaggttatgtaacatgaactgttttccaactgcaggacttgtcagcatctttcatagctaacgtacattgtgaaagtgtaaactacactgaagggttccattttccagcctttttcatgtctcccgggtgatggcacaatcacgtaatgttgtaatgtaacgtaaggtgatggcacctagtaaatggtctcctaactgggtatcatggatgggacagggaagttcaaccctgtttctgctctgatcttggcctgggctcaagggttttctgtctctagcccaaagcagggggtcctggaacactcctcgtttctccccgatgccctgctcagggccaccactctgtcctcactaggctccacatccttcccaggtgggcaagaactgcatttcagggaccactctgcagggacaactttctgctctggaacatggttccccctggcacagggagctcacccggtttcctggcaggttgggtggggtgtggggtgacggggacatgggatctcacctgaaactgcctcctgtcccagagcagtgacccttcagcacaggcacatgaccagacacagacgacacattggaaactgggttttacatgatcaggtctttattgagaagtaaaattgaggagggtgtgggactggtctgagctgaggccaggctggaggctcaggggtatggtggagagttggggaaggggtgactggaagaggaaggaccttccagagagatgactcggggaggctgtaagcctcctcccttgggtgactttcccactgggtgcagaattccctccaccataaattgagaacccagggaaggctaggaattatatgtgagaaaagaaaaaatgagataaaacaagatttctgattgacaatgagaatatttattgagggtttattgagtgcagggagaagggcttgatgccttggggtgggaggagagacccctcccctgggatcctgcagctctagtctcccgtggtggggggtgagggttgagaacctatgaacattctgtaggggccactgtcttctccacggtgctcccttcatgcgtgacc

SEQ ID NO: 28027 - DNA, 2300 bp, Homo sapien
tctcttcctttgggaagctggcccaatgcccaatgctcccccactccacatgcccccagagccccagtgggtctcctcagatagcctcacatgactgtaaggcccaatcgttgtttgctttctgcccctgccctacaggcagagggtctgccagaaaagggccggtctgaatcctagaactgtgcctacaactataccctggtggaggaggctatctgtaagtgactgctgcatgaatacaatattggtttgatgccaggtgagatgtccctctcttactttgaggtcaagtcagggaggtgtcagccagccccagtggacccctccgcaggctagcctctgctctggaccactggaaagggccatctcactgttgcatgtgggcttacctctgcaaacaattcaactctgacccccagactctgcagtggaaacagcctctggctatcccaagacatgctaatatgcatttcctatatacattaaccctcagagccaccctctgaccacagtctgttacattcccttttgacagaagaggaaacagaggctcagccaggtagcacagctgccggtctctgtgtggtcctcctggcaagaggtccagcctgacacagcctggtggtgtggaaggcaagcacaaagggtagctagcccctcagccattggctgaattcccttggtcctcactggacacctccagtgagcactaagttcgcctccatgatgcccataacaaatatacgtcctgttcctgacagttgaggcagcaccctcacaggtggcccatgaccctgcaggtacgtaacgcaatggtctccatctcacagaagaggaaacattcctagggaggttatgggatgatgctgagatgccacagtgtccagctggcaaagccaggcacatgcccctgcccctccaccacagagctatgatggagagaccgctccatggacctctgccatggtcaggtccagggctgctgctcaaagaatggcatgatccacaccttacaaaggtgtgaggtgataaggaacgcgttagctgggaaggcatttgcactttgtcagggatgctctaggatacacaaagcttcagatttacaaagatggagaagagagacaggagcattcatgtcttggccctctggcttgagagtcttttaagcatggaactgagggactcctggccctgaggtccacagataggctttgaaattgaaaacagaattttgcagcctgggttcagctgcgttttgctgagggtctgatgctttccaccagcttcccaaaagcgccaatcagtggccttaactgaactggctctctcacgcttgtctgggctgggggccagctcctcggtccttctcccttccttccctcccaaggccacccttccgtgtgccaggattgccagggacgccaaagagcccctagacactgggcggtggcggcggggggcggcggcagagatgactaatgctccctcccatcgctgcacaaacctcaccggtgtaaatcgttagggtttgcataggcctttcacacgttctgaaggattggtgagacaatccaggagagcaggtgccactagccccactttgcaaacagaaaggctgggagaggtcagtcggttgcccaaggacgtagagctcacaagaggccgaactgggtttgaacccgagtggagagaaggcgagccgggactggctgcagtaaagagggccaggaccatggctgggctcaggcttggtttcccgggctgccagaggtggcccctggggctcggctaccaggcctcagcgcagcggagtcggtggaacgccggcgcggggagctcttgcgggactgcggcgcgcgcggagctgcgaccccgcccctgtccgtccccattgggctactggcccgtccgtcagctgcctgtgcccaatggacagagggccggcgctcgtggcggggcggaggtgcccggcgcgtggtgcccggcgggcgcgcggcacccccccgcccgcggttggcctggcaacgggctgcgctcgcggctccgccccctgccggcggcggcgcggcgcggggcgggcggacccgcggactggcggcgggcggcgggcggcgggcggcgggcggcgcgggagggcgggcggagggaaccaggccggccggagtgtgtgcgccgcccgcggtccggtcacgtccccgcgtgggcgccgctgcccgcgtcgtacggaacgagggcgccgcggccccgtgctcgccgccccgccccgccccgccctgcccggagcagctcggcagatgctc

SEQ ID NO: 28028 - DNA, 2300 bp, Homo sapien
ggctgagtgactgtttaatcactgccctcttggcagagatgtttctagggcgttccctggtgcacttctcatcggtggctgcctggtgaagcgggaaagttcctcagcctctccattgattccttccctccctccctccttccaccaaccagtgcttactgaacacccactgtgcactgggcactgctctgttcccagtggggaacgaggccaggacgggccctcctcacccgcactctggctgggggtaggggcgacggcagcacacaaggtcatgtaggtcacacattagctgagggctgctatggaggaggaggacagagggcaaggtgacgctcacagcgacaagcacagcagggcagtgactgctactggctgtcactctctgaggaccaggcttgtgctggacgctttactcttcacagatacctgtggccagtgagggacaggctctgagatgggagtaagtcgccagaggccacacaacctgggagaggcaagcaaggcatgaaggatgagaccaccctgagagtggtgggggtaatatcagggtctgaccaagggaaagaggcggcattagagcctctggctgtcagaggctggcagggctagggagcaggtgtgagaggccaccaccactgccaggagagaccagaacctctgcccagggagaggacagcccaccaggggcctgcttcaaagcaggatcgccaggactagtggtcaaggtctgtgaggggcaagggacagtgaggggcacggatggctgctgggaggatgaagtgccatttgctgagggtttagcaggttgagtttcagatgctggtcacacccaggagttgagggtggggccttggctgttggggtctctctgcctcgggccttcccaccccagggcctgtcacagagttgatgggtggtattaaaggggcgaatgctgcctgtggcaggatggggaggctgcgtgggtctccggacagggacataggtcagggaaggagcaagaggggtgcgtgtgagttgggtggggcctggtgccaccctgggctcacagccggggaagaagcctgagctttgagctgcccctcgtgtggggaggcctggcctaagcacccggcaaagtcacaggggcatcctagggtgtgcccctccctgctggcaggaaaggtggatggggaggccctgactcgcggggttggtgaaagattctgcctgaggcctctaggccaccctgccttgccctggcctcggtgattactactacccttgggagccactgtgacatctggtctcccaggtggatttccccgcagcaccacgtgcagcccccagctccttggtctcagcccaagcccccctctacctccttctgcaggagtgaggcagcccctgcccactgtgcttaggcacctcacggtgctcccacagcctgaagcctccaccttgctctggtccctgcctatctgctggctcctgggctggcccatcagagtgccctcaagggaaagcaggggccaggtctccctcctggtgcttttcctccctgtgatcagaagtgacccagctcctgcgggggtaatgagagtcagggaggcgctcagttatcccagggctgggccgaggcctggccacccgtgtaaaacagggcaaggctgagctctatcagtgctgtctgggagaagggccccagggggcatcacaacagggtgaccttattgaatcctaactggatgcggtagaagtgagtccagcatgggggctgggtgggcagaggcctcgcacacaccctcctctccctcatgcacctggcttcaggtggactgtccaggcaacagcagacatatgtgttacaccatggtgtgggccctacagcgccccatggaggagagggggttggatggattgttgccggctcattttccaaggccagtctctgctgctttgctttcagaagagctccctttcactgtccagcctgaggtggggctgcggggaggaggctcacgcttttctctgtgtttggcaggtgaagggctggatgcacagtgggagccggaggcggggggctgcagggagcacaccagcgaccggccctccaaccctccagccactcagcaacatcgccacagcaaccagcaaccagacggcagcagccgaggcaaacacaagcggacggcttcccaccgtcgccgaggacagggaatgactacggcaaatcaggccactttgccaactagggaggtggagtgtcactagtggggaggggcggccaccgcccgctgcacagagcgccatgccgg

SEQ ID NO: 28029 - DNA, 2300 bp, Homo sapien
agctagagatcaccctgaactcctcctttagctgttttttttttttttttttttttttttttgagatggagtctcactctgtcgcccaggctggagtgcagtagtgtgatctcggctcactgcaatctccgcctcccggctcaagcgattctcctgcctcagcctcccgagtagctgggaccacaggtgcgcaccaaccatgcttggctaatttttaaatttttttagtagagatggggttttgccatgtgtgccaggctggttttgaactcctggcctcatgtgatccgccggccttggcttcccaaagtgttgggattacaggcgtaagccagcacacctggccccaatcctcctttagctcttaagtgggctctttgcctagatctagaaaccaaactgacactgggcagattagcaagagaaaagcatacaagtgttattagttttacatgcgcatggggatctttaccagagtgaagtctagagaagtggccaaagcaagatgcttttatactttttagacaaaggatgacaaatttgagaagaaatggcaggacaaaggggatctggctagggcagtaaattctaggggattcactaggagataatatgaggggcataaacttagtggaagacagggttaagtatatttattcaggtccattgcagtccccaattcttagtctcaggtgacaagggctattttcttgccctggtacagtgagggtaccgctcctagaggaatctttatggcttgctgaatgcagaaagaagcatatctgtttgccttttcttgtatctttttttaaaattatatctatttatttatttatttatttatttatttatttatttattttagagttgaggtctcactctgtcacccaggctggggtgtagtagtgtgatcatatctcactgtaacctcaaactcttgggctcaagcaaccctcccccttcagcctcccaaagtgctaggattacaggtatgagccactgcacctggcccagttagccctttctgaggccactatttttccaatgttgtccactcaaaatggtcaatataccaatccagcatattttgggatggcccatacttcactccttcagggagaaggaaggtttcatggaagaagtgttcaccaagttgcatcctgaaggataaagaggtaataattagtgttacagagcgctcaggcttcatgagcgaggtggcatttgaggggttaagagagagtctggcatggctggaggaggccatcacccagggactggagcactaggctaggagtttggactcagccctgagactagtggggagccatggagggttttatgcaggtggtggctgggtctggcttgcttttgagaacagctacgctggccagcagtgtgttgggtccactgcagaggctaacctttgtcattaccaggcggtcagcctgaagagcaaggggcatgggcagggctaggcagtcttgagatcaggcctatgtaatttgggggaaactggctgagcgcagtggctcacgcctgtaatcctagcattttgggaggccgaggcgggtggatcatctgaggtcaggagttcgagaccagcctggccaacatggcgaaaccctgtctctactaaaaatacaaaaattagctgggtgtgatggcggccgcctataatcccagctacttgggaggcttaggcaggagaatcacttgcacccgggttgggtgcggtggcgcggagtggagcggaggttgcagtgagtcaagatcgcgccactgcactccagcctgcgtgaaagagcgaaactccgtcaaaaaaaaaaattgggagaaacgactgaacttctctgaggttcttgtctctaaactagatgttaccaccttatgaatttactctgaggatcagaggcatgcaaagtacccagtacagagaagggcgtaaataagtcacttcctttcccttctgtactttgaacaaagctgagctgcctttggtctccacagcaaccctgtaaatgattgttcccgctttgcagccggccgcagccttgggctgtttgcgcctgcgcagtgggtgctgattatgtcgaccgcggcgccgcggacgctgctggagtcgcctggcaacgatgtcgcctggcaactgaataggttggccagtggcgcgggctactggaagcagaaagggctgcggaggcaggtgaggcggcggtggtgggctaggggcccggggacaggggggcccagtgacccacccagtcccattcacacggggccgtgtccccacactcaaa

SEQ ID NO: 28030 - DNA, 2300 bp, Homo sapien
ggttacagtgagatatgatcacactactacaccccagcctgggtgacagagtgagacctcaactctaaaataaataaataaataaataaataaataaataaataaatagatataattttaaaaaaagatacaagaaaaggcaaacagatatgcttctttctgcattcagcaagccataaagattcctctaggagcggtaccctcactgtaccagggcaagaaaatagcccttgtcacctgagactaagaattggggactgcaatggacctgaataaatatacttaaccctgtcttccactaagtttatgcccctcatattatctcctagtgaatcccctagaatttactgccctagccagatcccctttgtcctgccatttcttctcaaatttgtcatcctttgtctaaaaagtataaaagcatcttgctttggccacttctctagacttcactctggtaaagatccccatgcgcatgtaaaactaataacacttgtatgcttttctcttgctaatctgcccagtgtcagtttggtttctagatctaggcaaagagcccacttaagagctaaaggaggattggggccaggtgtgctggcttacgcctgtaatcccaacactttgggaagccaaggccggcggatcacatgaggccaggagttcaaaaccagcctggcacacatggcaaaaccccatctctactaaaaaaatttaaaaattagccaagcatggttggtgcgcacctgtggtcccagctactcgggaggctgaggcaggagaatcgcttgagccgggaggcggagattgcagtgagccgagatcacactactgcactccagcctgggcgacagagtgagactccatctcaaaaaaaaaaaaaaaaaaaaaaaaaaaacagctaaaggaggagttcagggtgatctctagctcctgccaaatccccaaatccaaattagtaagtgaccccacagcttaatcttcccttctcctaaatcccattggcacactcccttcccctaattctctatttacttctctgcttcccgcagtggactccaatttccctgagggtggacaccatgtccgttctctttccttgtctccccagtgctaggcatataccaggaagctttcagtacatgtaggacaaatgaatagttaatggacttgaatcaagctttacagtataaaagcactttcaccatctcaggtgatccattgaaatagatagttgcgtttattttatagttgagtaaactgaggtgcggaaggtggaacaactcacctaagttcaccccctaagcctcaaccttagcagtgaaactcactaaaagacattaaacagagccaggtgtggtggcccttgcctgtagtcccaaggactggggaggctgaggcgggaggattccttgagcctaggagttcgagtccagcctggacaacatagcaagactccatctctttaaaaaaaaaaaaaaaagacatcaaacaccagcctccagcacacttagctttgaattgaagatgactgagttagatctgtgtaccaaggcttccatattgtgatgcagaaaagttaaggagctgaattaagtaggttctcaaactgaaccccggacttcgaagctggttccacggttttataagggccacaagaggccatctagcccaaaacagctaactttccaaaccgaaactagttcagaggaaatcactgactcaggtcagctttttattaaggaaattaattttgtaccgtgagctctagaagccaggcatatgatattcagacagcactggattcagaactatgcagactaaggtcagtagatggtaggcaggtctatcttctgcagctgcagggtgcttgactccaattaaacatcaataccacatcaggagctcttatgccataaccgcccaacctctcccagccgagctgatcaccagaacctgcgcgaatctctccacggtcagccccacccagggctcaggctccgcccccgggcctccatagccccgcccaccgcccacccatccagcaccgcccttgttgtcatggtgatctccggctctccagggtgtccaggagtctctctgctgccagccccgcccagactccaggcaggttctcgttgctatggtgatcgccggtgcaagctggatgcttggacgcgccgctgccagtccaacgcagaccccgcccacgacgtcgacgattcgtgtagcccgcaggtcccgcgtggctctcgttgccatggtgatcgccgccgctggctcaggcggaccaggccgcgcgg

SEQ ID NO: 28031 - DNA, 2300 bp, Homo sapien
ccattttaaagaagaggccattgagggctgggtgcagtggctcacacctgtaattccagcactacaggaggccaaggcgggcagatcacgaggtcaggagttcaagaccagcctggccaacacagtgaaaccccgtctctactaaaaatacaaaaaactagctgggcgtgatggcaggcgcctgtaattccagctacttgggaggctgaggcagcagaatcacttgaacccaggaggcagaggttgcggtgagcagagatcactccactgcactccagcctgggcaacagtgtgagactccgtctcaaaaaaaaaaaaaaataggccactgaggatgagagcactgctcagtatggcactactgggattccagcccctttagtggccagggcatcatttgcatctcagtttcctcacatgcaaaatgggctatttgcagcctgatgggaaggggatgagaaggtccgctgggtccaagggaccaggatggcaggaggttagcaaggcctgcagagggcagcagtgagctgcgcaccgcccacccagcctagaaactggggcccatgggttttccagggcaggaatgttctccaggggcactaatattaacaggcaatcacgaaatcgacccctacacaccatttatcaggttgtgttttatgtttgccccatctgggcattttatgcaggatgctctcaacattttgtaccgtggcccacaggactgggtggaagacaggacagctcagagcagggagtgaaacaaaatctttgatggttctctagggaagcctggaaatctgagacagggcaaagagcagggagtctgatgagcacaaaattaaaatacccaaaccagcctgccgggtcaggggaaaaggaagcaggattgggcacatgaagaacagatgacaaaactgaggctcagagaggctgagagagacactgctgaggtcacacagccaggagtcggcaggaagccctgaacccaagcagggctggcctggctactagcctgggctcagtcctttagattggacttcaaagtatctgctccagatgacgctggcattgggaggagggcatgataatccctaacatccacacagggacaacagcacttggaggcagatgtgcttctcacttcaaggaaactgaggcagagagggagaggtggtcaggactcaagcccagtaattcatttgccaaatcctgtttccttttcccccaacccagcgggctggtttgggtattttcagtttgtgcccatcagagtccctgcagagtgctctccactgtgtctcagatctctgtgtccccagagaaccatcaaaggttttgtttcactccctgctctgggctgtcttccacccagccctgtgaacctcagtgcaggttggccgcccccttagagggaggctaatcagggaagttctgagtcaggtcgtcctggaaaaactacattgacctctggagctcaagagaggccaggggacaaacacatggctcagcacacaggaaggcaggtgtgggtattgagtgacctgagggagaaatccctatttatcatccatcatgtggtcctgctgtgacaaacccgtgtggcagccacccacagcagatccacaacgtgagaggcccgctgaaacaagggtgctggcattggttactcagcctggccctccctgccttgcggggtgacctgcctggtcctggcctctctgtgagttgggccctgctgggtggtccctagtgtgcccagccctgaggctggtgagaggccaggctgtgaggtgtgaggaacttacctgcgtctccatggaaggtgccctccgcatcgttgggccagatctgcctggtcttgcagatgcccacgatggtggcctctgacacgacgactgggcagtgccggtgacgcttatggcactgcggcgtggtaggggcagaggggggaggttgcttctgtcggaggactgctgcgagttctgccagagagagcagctcttgtcccggaacatgaggtaggtggtggggcttggggacacgcggctggactggccggagaagtcctcctggccggaggggagccaagtgttcctgttccaggactgcagaactggcccagacctctgtattggaaaggtctttatggaccagggagtccggtgtcttttttacgggggacccctgggctgcgagttgcacagtccaattcgctgttgttagggcctcagtttcccaaaaggcacagggacggggggagggtggcggctcgatgggggagccgcctccagggggcc

SEQ ID NO: 28032 - DNA, 2300 bp, Homo sapien
ttaagcctctagtgttttataagtggcagagttgatgggaaaacactgatcttcaggaggggttttttcagtgccagcgtccctctggatgtgtaggcagataagaaggtggctcggacacagtccttaaataagtgccaggagccagcaggccagggtgggagccgggacaagcaggcacctaaagtaacggtaacataaggcaggtggcgagactctgtggatggatcagtgccaggggctgtgcgggaagggaaaccttacatctgtcctgtttcttaggggacgaggttgtggaggggagggtattccaggcagggaatgtgggcaagaactcggaggcttgaagcattcagtatagtcgtctctcgatatccgcaggaaattggttccaggattcccttgggcagcagtccccagcctcctttttgacaccagtgaccagtttcatggaagaaatttttccacagactgggggttaggggatggtttcaggatgggactgttaacagctcagatcatcaggtattagattctcatgaggagcctgcacagcctagatccctcgcatacataagccacaatagggcttctgctcctatgagaatctaatactgctgccggcctgacaggaggtagagcttaggcagtaatggagcaatgaggagcagctgtaaatacagatgaagcgtcactctccgcctaccgctcacctccagctctgcggcccagttcctaacaggccacggactgataccagttcatggcccgggggttggggacccctgcccttggggatcccagaatccttggatgctcaagtccttatgtaaaatgccatagctagcttttgcatataacctatacacatcttcctgtacactttaaatcatcttgagattacttataatacagtcatgcaccacataacgacattttggttattgatggtggtcccataagattataatactgtgtttttactgtaccttttctacatttggtatgtttagaaacagataccactgtgtcacaattgcttacggtattcagtacggtaacatgctgcacaggtttgtagcctaggagcaataggctgtgccacgtagcctaggtgtgtagtaggctctgtcgtgtaggtttgtgtaggtacactctatgatgtttgcatgaagatgacattgcctaatgatgcatttctcaacatatccccttttaagcaaggtatggctttatctaataaaatataaatgctttgtaaatagttgttacagtgtattgttattacatttatattattcttattgttggttatttctttccaaatagtttcattctgaggttgcttgaatctgcagatgtggaacttgaggctgtggagggccaactgtatgctcagaaagtagcaggctctggttggagagttggtataaaatgtggacaacagggaaggtgagggataggagagttggggtcatcctatgtgggtctccgaagccaggctgagggtgttgtgctttctttgaggatgatagggagccactgaaggttgttaagctggagaggggatgcctttggagctttgccttgggaaggtgagtttggcaaaagtgtgtgtgatggtccagtgggagtcaggtacctggagctgttgtcttgaggggcggtggggaggaatggggagggatggagaggacaaggaatatgagctgattctggggagggggtgacagaaagggaggctgtatgagcctggggatggtgagcgctgtgctggcaggtttcagggcctttcggagagaggaccaggccaggaatgaagaggaaggacagaagcgtgggttgcggagggtgtgtggagtggagggccggagcaggcccttgggccttgcgtcctgggggaggtcacgtgagagaaagaagtgggggagtttatgttgcggaaaggctaaaaggaagtgactgttaggaggttatgggataaaggacagaagccaggctccaagtgagtataggagagaccagagcactaaattggaccacagtgtccagcattctggcagcagggaggaggtgggtggggattcaggattagggtccgagtgctccccgagtgtccaccgtcggcctgctctgttccggggcagggccacatctttgtccgtgtgccgaggaggggactggtgggctggagtcccagggggagattattccaagtaggggctccagaaaggtgagtgatgtgtttgggtctatgggaaggttggtgacccccaaagagaggtggctgggttactgct

SEQ ID NO: 28033 - DNA, 2300 bp, Homo sapien
gacacacagggacacacagacgcagagcacataggatcttcccctgtgcccttttcatacacagactcccatggccccggggagccaaagtgtggtaccgtccctgtcccggggccactgaggccctggccctctctgtcccacagctccagctgggactgtttgccctagttgagatgctgagccttggggacagtggtttccagccacgtggccttatgccggctttgggatgcagtcaggattgtgaccccggcccacccttgccgtgtgccctggaggacgactcgggtgggctatgcaggaagcctgtgctgatctcaaggccaactgtcctgtactccaggccggggaccaggctgctgagcgcttccgagagggacatctcctgggcagggagtgacataggccacgccatgtgggcctcccagccatgtgctggtgctgtgtgggctgggagggcaggcaggggccgagtgacggggactgcagagcggggcctgagatgctgtgacatgctgggctgcctgtggctttcgggcttctctcagatgagagttgcacaggtgggtggggggttggggagtctgtggcagcatcaaaagagtagcccagaaaccgccgagtccactgttcgagcctcccgggcctgcagcccgcaccccagaggggccacttcctccccacagtcaggcctgtgtgtcctctcaacgtggcaagccggcatgtgggtgctacaggtccccagtgtgacactcagtagccttgctgaaggccgagggtgccccttaggtgggttgtgggcagcctctgctggagagggagctgcgtttcttgaccgcaggcagagtgggctgggtctgcagtttctgagctgagcatggggtgccctctgctggtgatggcgagaagctcactgcctttgtatggagaaggctgccatccagccccgccactgccccagaaggaaggcgcctgagacccctcctccttggccgggaggccctttgctgtgtccctgccaagaggacctactgcagtccttcccgaaggacctcagtgtcctgggaccctacccagatctggtccccactgcagacccagcagtttgggttacccggcttcagcgctccagctctacatgatgtttctccaggtgcacatgctgtttcttgcttcccgtgggtgccgtcaccaggcagccgtctgccctcggcaggcggggtgtgggtgagtgccgatgagtcatggccttggcacgccggcagccttcctacccttccacttatgggcaccagcagcccctgcgtaattcattggttccccttcgcaagagccggctgcctgtcgtgagccaagctgcttatgatggtgacatgaagcctccacctctgagagtgtcggaggactggcccaggctgttcttgcaaatggggagctctgttgcctccggccccagaatgggggaaaagttcagagagaccgaggctccccgagaagaacctcaggctgcaggtgacagcagggcaaggtgcctggtctggccccaggaccagcctggctccctgagagcacaaggcctcatcacttctcgagatgaggacaggtgcaccgcctgcggggagacactgggttttcacactctctgttgtatgtgcctcccctgccaacccttctgactctcagtgcagggcgggcgtcgtcctccctgtgagccttccctgagaccaggtgggctgggtgcccactaaacacttggcctctctgccacgaggttgtggactcctgagggtagaggcctgtgaatgttacccctctctttctgcgctgcctgggacagagggtggacctccctgaagctctgttttctcattaaggacctgcctacagcctgttgtggggattgggtcaaataattcaggcgatgtgctcgtgcagtgcgctggtcccagcgtggggaaggcttgctgcgacagcctctcctcctgtccctgtaccctcggcacagcgcccaaccctgtgaggtaccaggcaggggtgacttacctagacatgcccattcagcagccccttgagcaagaaggaccgacccttgcctttcagatgcagaccaagatgcagaaaggcacccttctcaggccgcaggtgtccaggcaggtgtcagaggtgcagcccgtgcacaccggggaccctatccatcctgtctagttgggaggactaggagttccacatgtgggaccctcagttcctgctgccttcagaaccaggcccaacccttgctgtgacctcgagggctgcca

SEQ ID NO: 28034 - DNA, 2300 bp, Homo sapien
tatcacaggcagggtttccattttttaaagctcccagcagtggtataaactcctcctttccagagaaagcgcactctgtccgcatccctcatgttgtcctctcctgcctctgcttagggttcactccgggggaaagtgccacttgagagtttcctttttatgtgtggttctgactgaccgctccctgctcacagatgctgcttctcagggtggggtccctgaggcctggagtgtggcctctgacgaccttcagggccaggtgcggaatgagagcctgtggccgcatggcccccggtgggagacgtcccgccgccctttgcttctctgtgccactctggctgcacagttcagagccttgggaaacgttaaccagtaggacctagaaggggaggtgagaaggggtcaacccccaggtgtgcctgtggtgagccttcgtgctgagcaggtgcagggagggaggcccaggtgcacacacctgtgaagtaggggggcagctggctgggctccttgacctgctccagagcttcttattttctggccacttcacctgcagaaggcccaggtggctgtagccgctagggtcccttgcagtggaaatgatgcctgtcctcagcccctctctaggcctggcactgtgctcagcaccgtcgtgtgtgtgtatgtatatgtgcacgcatgtgaatgtgtgcagacatcatgaggtgtggtccctgctgttaggcagcttgccttgtggctgaagtgaaccatcacctgaatcaagggatggaaacacaaggccagatgcagtggccttctatggagtcagacggtggctccgtgacctggcttcactccagaactacctggggtttctagctgtgtaaatcccaggtcccactcagattatgagtcagttctctgcaggtggaacccagggaggtgttttttttgtttttgcttttatttttgagacgaagtcttgctgtgtcgcccaggctggagtgcagtggcgccatcttggctcactgcaacctccacctcctgagttcacaccattctcctgcctcagcctcccaagtagctgggactacagacgcccaccaccacgcccagctaatttgttgtatttttagtagggacagggtttcaccatgttagccaggatggtctcaacctcccgacctcgtgatccgcccacctcagcctctcaaagtgctgggattacaggcgtgagccaccgcacctggccagggaggtgtatttttaacaagatggtactgctcattcacccagcccagccagtgatcttggcatacccaggaaccgctgacatagaacgtgctccccataaaacgggagacagaggcttcacggatgggggacatgtggcttggtcatgacagggtgttacataccaggacagactgtgttcgggtgacattaaggacaagctcctgcaggctagctgtctggatagtgccgggtgggggtagaagttagaggggtcacagaggggcttcctcccggccccctcatcagctgcttgatttagggcttgtttctgggtccttctgggcctgattctgaaccatgggactggtgtggcctgcaggctcctcccgccacaagctgttcatggtgcagggggagaacagtgtccacaattccccagacagcagctgtggatgccaggcccccaggagttgttactgaagttgctgctggacagctcacctttcactgagctccacatagcacccgtggtgatggaagccggatggagagagcctgccagcctgcacatcagctcccaactgggcggggcagagggaggagggggtggggaccccaggcagcagggctctgggagcagtggggccctgggttccaggggtgtctggcaggcccctccttactctacctctgttggcctctggatggaggtgctggccgcagtcgggctctgcctctgactaagggttggggaagtggcgggtgtgggctgctgccccgtggggcctctgaacagaccccagggcctctgccaatcatgactccttcctttcagctggacccgcaggccctgcaggacagagactggcagcgcaccgtcatcgccatgaatggggtacgtgtccgtgggactctcctggtgcccacttcccccagaaggatagggtggcctctgttcatttcaaatcagtcagaggtggctgagcctgaggcagcatctgagagggagcctggttggagaagggagggcccccaagagcagaatcaccatgcacgggaatcgtcattcattggctggaatgcag

SEQ ID NO: 28035 - DNA, 2300 bp, Homo sapien
tttctagctgtgtaaatcccaggtcccactcagattatgagtcagttctctgcaggtggaacccagggaggtgttttttttgtttttgcttttatttttgagacgaagtcttgctgtgtcgcccaggctggagtgcagtggcgccatcttggctcactgcaacctccacctcctgagttcacaccattctcctgcctcagcctcccaagtagctgggactacagacgcccaccaccacgcccagctaatttgttgtatttttagtagggacagggtttcaccatgttagccaggatggtctcaacctcccgacctcgtgatccgcccacctcagcctctcaaagtgctgggattacaggcgtgagccaccgcacctggccagggaggtgtatttttaacaagatggtactgctcattcacccagcccagccagtgatcttggcatacccaggaaccgctgacatagaacgtgctccccataaaacgggagacagaggcttcacggatgggggacatgtggcttggtcatgacagggtgttacataccaggacagactgtgttcgggtgacattaaggacaagctcctgcaggctagctgtctggatagtgccgggtgggggtagaagttagaggggtcacagaggggcttcctcccggccccctcatcagctgcttgatttagggcttgtttctgggtccttctgggcctgattctgaaccatgggactggtgtggcctgcaggctcctcccgccacaagctgttcatggtgcagggggagaacagtgtccacaattccccagacagcagctgtggatgccaggcccccaggagttgttactgaagttgctgctggacagctcacctttcactgagctccacatagcacccgtggtgatggaagccggatggagagagcctgccagcctgcacatcagctcccaactgggcggggcagagggaggagggggtggggaccccaggcagcagggctctgggagcagtggggccctgggttccaggggtgtctggcaggcccctccttactctacctctgttggcctctggatggaggtgctggccgcagtcgggctctgcctctgactaagggttggggaagtggcgggtgtgggctgctgccccgtggggcctctgaacagaccccagggcctctgccaatcatgactccttcctttcagctggacccgcaggccctgcaggacagagactggcagcgcaccgtcatcgccatgaatggggtacgtgtccgtgggactctcctggtgcccacttcccccagaaggatagggtggcctctgttcatttcaaatcagtcagaggtggctgagcctgaggcagcatctgagagggagcctggttggagaagggagggcccccaagagcagaatcaccatgcacgggaatcgtcattcattggctggaatgcagttgccagccaggccctgagcatccctcctcaaacaaaggtctcatggcaccaccaggacaggtggggcctccactcagggacctgggggctgcccatagaaatggagacccctgatttgtctttaggtaccccagaaaggtttagaccttaaaagcaatgacacacccaaaaaggcccgggtataaatggtaaaatgttaatatttgagattcttggctttttcttacattattctgtctttcctacttaatttttaattgttactaagaaagagaaagccaggcacagtgcacctatagtctcagctactctggagtctgaggcaggagaatcactggaacccaagagttcgattacagcctgggcaacattgcaagctcctatatctaaaaaaaagcaagcaagcaagagaagcagcggggattttaggaggtgcttctgcagaaaccagtcgtttacatcatcttcaacaatcctggctcttgctgaagtagactaggggcttccccgaggggcggctccacctcatgctgagacctctgcatgccttgggggtggaaatatttgatgagactcccaggggtccttgggaccttgggctatgaggaccagaaggattagaggactgtgccccttctccctactgtagatcgaagtaaagctctcggtcaagttcaacagcagggagttcagcttgaagaggatgccgtcccgaaaacagacaggggtcttcggagtcaagattgctgtggtcaccaagtgagtggggaggggcttgggctcacgcactgagggtgcctgtcccttcagctgtttctgcagaaaagagcatgtgtgggtctctcctctc

SEQ ID NO: 28036 - DNA, 2300 bp, Homo sapien
ggctccttgtcctgggccactgagacccagaagtaccagggctggagtcagcttgcagcacagccagggtcgaggtcactcccttcctgagaactccagcacagcccagcccctctgcctctctcctgggggtggcgttgaaacagcacccgctgctttggtcctctacagggtggcagagaaggaggcagtcaataagatgtccctgcacaacctcgccacggtctttggccccacgctgctccggccctccgagaaggagagcaagctccctgccaaccccagccagcctatcaccatgactgacagctggtccttggaggtcatgtcccaggtatgggaagacaggctccagcccatgcaaccctgacctgacagaggtggcctctgcctgccccacccccagtcctgcccatcttcttacttgcattgtatgtggtgtggccaacattcacagagagggacttgcctaggtctgcatggatgggagtgatagtgggggcccaggccacctcctggtcctgctagtgcactttgctggaagcttaaaactacctcaagtgttcgggtgtggtggctcatgcctgtaatcccagcactttgggaggccaaggcaggataaccaatcccaggtgtttgaaaccagtctgggcaatgtggcaaaccccatctctagaaaaaataaaaagaaaaattagccaggcattgtggcacacatctgtaatcctaggtatctgggaggctgacacaggaggatttcttgagcccaggagttagaggctgcagtgatccatgatggagccactgtactccagcctgggggacagagcaaggccctgtgcatctctaaaataaataaccaccccccacccaacaagtcatgccttgtcaggaccccaccccacccccatctcactgtaaggggttcatgacaccagcaggggtccccagcacctgagatggacttggaggcttgggccccaaagacctcccaccagcagctgtgagccccgctctgagccactcttctcttccctactctgcccgggcaggtccaggtgctgctgtacttcctgcagctggaggccatccctgccccggacagcaagagacagagcatcctgttctccaccgaagtctaaaggtcccagtccatctcctggaggcggacagatggcctggaaacctctggctaatcgggccatccgtagagcgggaaccttcctgaggtgtccttgggccacccccaagtgttgggccatctgccaagagacagcgacccaaagccgaaggacaggtggcctggaaagatcccgcccaggtctgggagccccaggctggcctcagactgtggttttttatgtggccacctgagggcgccccaagccagttcatctcggagtccaggcctggccctgggagacagggtgaagggagtggtttttatgaacttaacttagagtctaaaagatttctactggatcacttgtcaagatgcgccctctctggggagaagggaacgtgactggattccctcactgttgtatcttgaataaacgctgctgcttcatcctgtgggggccgtggccctgtccctgtgtgggtggggcctcttccatttccctgacttagaaaccacactccacttctaacagggtttgagaggcttagtcagcactgggtagcgttttgactccattcttggctttctttttctttccagaaggatttttgtgcagaaatgggtcttttgttgccatgttagtcctccttggaaggcagctcagaaggcctgtgaaatgtcaggggacaggacccccagggagggaaccccaggctacgcactttagggttcgttctccagggagagcgacctcgtcccccgatcctgaccgcccttccggcccacgctctcctgtttggcttccacaggcctggacttctctggcttctctgcccacacactccctgcccccagtgtccctgcccctgccccagcacaggtgacttcatttctgtcctctcagctcagtggactcgctcaacttttgtataagtctccacttggtggcagcagcttgctgatgacttgttttaaaactttcatcctaaataaccttttgatacttgaatatttgtaagttttatacatagtttctaatttttttccgaacagatccagatacctaataagatgctggaatgtaatccctggacaatccgtgtcctggcagcatttggtcttcctctaagcgcctggctccgctgttctcaggagtgggttctgaagtctctggaga

SEQ ID NO: 28037 - DNA, 2300 bp, Homo sapien
cctcgacgcgccccgccccacccctgcgatgaagagggcgtctgctggaggtgagtgtctgcggtgcgggcctaagctggcagtcaggcccttggatggggaaacaggcaagttagggggggcctaaaagaggtggatggggtaggtggagccgtagacagattctggggagaggactagcttccaggtcgaatccctagcgaagccttgcccatcatccaagccccacacaccactgaccccgccccctcccagtccaagggcagcctggacccgctagataagccgctggacttggggccggcgctgcccccccaagatggaggctggcacgttcagcagtgacctgcagaccccacgcccaggcagtgttggtgaggtcggggcagccacacctggggagggacatgggttgacccccatctgacctcagtctgacagtggtctacatccccagagagtgccctgtcggtgcagaggaccagcctccgccaccccccgacgcctgccatgtacaagtttaggccggctcacgggtcctaaggcaccttctgtggatgaggcgagcaggtaaagaggcgtggcctgccccccactcctcccccgccttgccccctgccccctgcacgcccaagccctgtccccccaggcctgcctccaggagctctccccacagctttcaccccgtgaagggccccccctgagccctgcctctccagcagaggccacatcccctgaggccacacccctcagggctctgcctgggtcaccaagggccttgtgtgactggtaggaccctgcctgtgtgcacccagagctgggacccacggagaggagcagggtgtcctggaaggggctggcacgggacgtccaggcttggcatctgtcccttggccagcgttgtcctaggccaggtgggcggctggctccaggagcactgggtaccaggatgcgtggaattccaccattagtcactctgtaaggcctatgggaagactttggaagaatttgagacctgctggagaaagcacatttttcttccctgagttgcatgagtgctctgtggtcactggaatggtgagcagcgcagggcggtctttgcagtgatcaggaatgctgaacagccccagggcgccgtccctccttctgggccacccggagaggcaggcctgtggctgggcccgtgcacccagaccagccccatccctggggacctctcccctcaggattgatgtccttcctggagagagtcacatggtggagcagtgagtctaggctccttgtcaagggtctgagtctgcaggcatgcaggggccatgcctctcaggaggcggtagccctgcttggagatgagggctccgggtatgtcatcttcctgggactcctgggtccagtgggggattgggtctggttggccaagtgcattgagcctacattggccctgatcgccttctggctttgtggttcctgaggctcttgtccctagcccaagcccaagcccatgcccacgtgcccatcaaagaggctagacgaggcccctcctccctgtggttgccctgagtggtaggcccctgggactgcgtagctcaaaaggctgagccctgggtgtctgcagtagccagctgtggcctccctcccgctgcagagcccctgcccctcagccatggatgctcagggacagggccatgggtcactatgtggctcttaacggctccttgaggcccagttcctgaggccgcggtgccaggtgtggaccccgtgggtgctgactggcagctgcaggcagggtagcaggtgggcagtggtgagaatgccttctccctacaggttccaggccccgattcccttatcctgggggacgacagcatccatagcctggactttgtgtcgagccgagcctggacttccctgactatgggcccgggggcctgcacgcagcctacctgccatccccaccgctcagcgcctctgatgccttctcattgctttgtgctccctgagcctcaaggcctcaagccggcagggcggggactacgtggccctgcagcccctgtgctccgagggtgggcctcccatgccccaccgtagcatctttgcccccccatgcactgcccaaccacaatcgcagcctgtcctacaataatgtgctcaaccctggctcgcctggtggccacgcctgcctcgcccatccagcagttggcgtggccggataccactcaccctacctgcaccctggggcaacgggcgacccaccatggcccctgccccacagcttcagtcccgtgctgggcccccggccc

SEQ ID NO: 28038 - DNA, 2300 bp, Homo sapien
tccccatttcctcccatgcccatcccatgccccagaatggtcacttcggctgctccaggaggggtgggaggggcattaaacctatgagagagggggtggggtcacaatcttcagctgtagtgggccgctctgggtcactgataatggaagtgacgcctgcacagtaagcacagaagtgtctcaaggcctctctgcaagcacagagcagcccaagactggagcctggtccaccccagtgctgtcctcagactgatggccagtgccacatgactcatctagggtctgatacatccctgtggcaagagctcagttcctagtctgaaggctgctgtgtgcagggaccctggaggaagaatgcttgtttgggggtcaggcctcagcctcccactggctatgtgagcttcgcctgaggttctccatctgtgcaatggatgacgacgtcttgatgtggctctgggaggacccgttgagccaccgcaagggctgagatggtggcacttggcagccagtaccccctggggaggtggcagtgtgtgcacagcccaccccttcaggaggccagggggcagagtggctggggggtgtctgggccccacctcaccttctgtgcgactgggaatggcatgcactccacaatgccctggtaagcctaggctgggacaagggtgatagggataaagcaggccaaggtgatgagggctacagagtggcaaccagaggtgtgtggacagtgcagcctccacaccaggcagagggcccggcccatccagtatgtctccgtcccgcgaaactgcctgccactgggctgagatgggagcaccagggctctggtaggtcctcacttcctctggacaaagcaggcaggccaccagccttgcaccctgctcatgtccctcagggccacctccatggccaggggcaggcagagagcacagggctgcccagtcaccaggtctctctgcttcatgtcagtggacctgggctctaaggagggccatcaaggcctcaggctggcccactccatccctgagtcagggtcctacagactgacaccaggtgggcctgcaagaccctcatctgcatggtcctctcatgcagggtgggcctggggaggacccagcccggctgagctgactcccagcacttctccaggtgcaggggcagcctggcagttgtctcaagaccccgggatacacttaggagcacatcagtgaggcccggtgggtgccccgagcagaaagcagagaagggacacctgcacccctgtgtgcaggggtgtcactgggttctttggccccatgcccgtcccccctcccccctgccccatgagagctggcttggtagagtgggggatactaaggaggtggcctccgagagcgtcttctgggtttggagtccccattccgcaggcgggaagaggtgggagacccctgaagggttacgggtaacatcaggcctggatcccgtccctagggtggtgcagagagggccacaaaggcccaggagggcccccagaactctcttaagcctaagaaacagtgcagagcctgtttcttactgaaaaatgggggcgaccgtgctccagcaagggcttctgtgcagggggccggcggggaggggttcatgggtttcgtgaggccaggaagggagtgggtaggcagaggccatgcccaggcctccggacaaagcccttgcccgcttggggagcgggccagcttaggccgccacactctcaggcctggggcctggcccactgcggcccgggccgccatcccctcggcctcctgcaggggccgccgcctctttaggaatacaccacctttgtctgggcccgcgcggcgcgggtgcactgcgctggctgagcgcctcctgctgcctggcctgcagcgcgccccggcccgctgcgccgcccaagaacccccctccgcccccctcgcgcccgcgctcccgccggcccgtgctccccagccccagcccgggcccgcgcccgcgccggcgcccaggtgagcgccccgcccaccgcgaggcccagcccgggtccgcccccggcccgccctggccggcccaggggaactgggcggattcctcgagtgtcaaaccacctgattccataagacattcatcctcccggaggcccgcgccgccctcgccctgcacgcctagcgttgtcccgcggccaggcccggccggagcggcggcgcctggatgtggacctggctgcggggagacgggcgccggccccaaagcgactttcggtcctcgacgcgccccgccccacccctgcgatgaagagggcgtct

SEQ ID NO: 28039 - DNA, 2300 bp, Homo sapien
caatctgtgcattcctgcagatataagaagcttttagaaattacagaaaaaggccaggtgtggtgcctcatgcctgtaatcccagcactttgggaggccgaggtgggtggatcacgaggtcaggagatcgagaccatcttggctaacacggtgaaataccatgttactaaataccgtctctactaaaaatacaaaaaattagaagggcgttctggcgggcgcctgtagtcccagctactcgagaggctgaggcaggaaaatggcttgaacctgggaggcagagcttgcggtgagccgagatcgcgccactgcactccagcctgggcacccagacagagcgagactccgtctcaaaaaaaaaaaaaaaaaaaaaaaaagaccagcctggccaagatggtgaaaacccgtctctactaaaattacaaaaattagctggacatggtggaacgtgcctgtaatcccagctactcgggaagctgaggcaggagaatcacttgaacccaggaagcggaggttgctgtgagtcgaaatggccactacgctccagcctggcgatgagcaagactccctctcaaaaaaaaaaaagaaaaaaagaaaaaaactggacacctatttttcaccatatacaaaaatttacgcaggttggattaaagatttaaatttaagacctcaaactacaataatcctggaagaaaaacttcagaagtaccattcttgacatggcctatgggaaataattcatgactaagtctttaaaagaaattgcaacaaaacttggcaagtgagacctagttaaactaaagagctgccacacagcaaaggagaccatcagcagagtaagcagacaacctacaggatggggggaattattcacaaactatgcgtacaacaaaggtctaatatccagaatctatgaggaacttaattccacaagcaaaaacagccccatttaaaaaggggcaaataaacacttctcaaaagaagacatacatgcagccaacaaacgtgaaaaaatgcttatcatcactaatcatgagagaaatgcaaatcaaaaccacaatgagatattatctcacaccagtcagaaagactatttttttaaaagtaaaaaaaaatagcagatactggcaaggataaggagaaaacgaaatgcttatacactgttggtgggaatgtaagttagttcagccactgtggaaagcagtttggagatttctcaaagaacataaaacagaactaacattcagcccagcaatcccattactgagtatgtatccaaaagaaaacaaatcattccaccaaaaagacatacgcactcgtatgtttattgcaacactattcacgatagcaaagacatgggatcaacctaggtgcccgtcaacagtggactggataaaaatgtggtacatatagaccatggaatactatgcagctacaaaagaatgaaattatgttctttgcgggaaaatggctagagctagaagccactaagtgaactaatgtaacagaaaacaaacgcctcatgttcttataagtaggtgctaaacgctgagtacccatggacacgaagatggtgacaatagacactaggactgctaagagagggagggaggaaggaaaaggttgaaaaactgctgagtaccatgttcagtacctgggtgttgagatcattcataccccaaacctcagcaccacacaatatacccaggtaactaacctgcacgtgtacaccctgaatctaacataaaagttgaaaaagaaaaaaaagaatggaatctctgcttgttttcagaataatcagttgtgcccctcttcaatttgaaattctcactattggctatatttaggggtaccctatttcccatctcataacttattttaagaaacacagaataataatgtgtaggcttgggattcagtttttgaaataaaacacttatcttcaatgaccttcctgtacatgtaaaagcacacctgtctgcatggcagcagttggacctcacagtgtggattgtgccttcacccgggaatgtctgtgatgccccatcaccgtggtgatgggattagggatctcctgccctcagtcttaagtgccactgtctgtgctgagtttttcgaaggtcagagcagattgaacctttgtgctttcatttttcctgattttgatttttcttatggggatccacttttcctgcattcgaggtatgttcatactggcctgtcaaatgctgtcttttcaaattactagttaatactttcaaaatatgttatttaaaaaattatcctctgtattttccata

SEQ ID NO: 28040 - DNA, 2300 bp, Homo sapien
gccctcaagagggagatggggctgggagacatggtggagtggccaggccgggagtggctgcagggtttgagcctgggcccagcaggtctggcaggtcaccccaggggtctcctgcttgctcctgagccagtgtctgtgagagctgggtggcaaggccagcgggaggctgagggacccagggcccgggcatgtgggaagcgagggcggcctctccttggttcctcggcagcctggaccctcaccccctgcaaggtcctggtggccaccgcttgcagggccgtccctctgggagtgggcaggggggctgggggacactgggaagaccttcacccctccgaaggcaaggcctggtcacgttcatcctccatccctttcccgcctggactcctcctgtgtgctgggagcacttggccgtgtgagaacagggcagcatggtggacgggccagcatggcacggcgaggtctgagcccctggctactctccccagccctgagaactcaggctgctccgtaagctctgtgggcctcaggctcctggtcgctagaatggagccacaggcaggctacccagaagtgagatgcctgccaaaaagccgtgtgcccagcccagagccaagacttggtccatcgagccccagctcaaaagccctatgagaggccggccctgagcaccgtccctgtccctgtgtgccacttcagtcacaattcagcagctcgcagccgcccactgaggctgagcctctgttcaaatttgcctcgatgtttgctggtcactgattcaggtcttcgggcctcagcttccttacccacaaactgggggcggcctctgggggctgttgtaaggggagctggaggccacaggctctggcctggagcacttcgctctccaccactgtcttctcctgacgtctgtgtttcctcgtatctcatggtaccgcgtctcctccgcaggacctgtgtgtcctgtgtgacgctgtgtgccacccaccacatcttcagcccctgagaaagattctggtggtggaggctgttgagtaaatgctcacttgagcttctcccactaccttggagcccctcttctatttgtctccaaattctctttgctgacagagtgcacagttcaaaaccccacactgggatgaactagaggacgcccaggtccagctcaggagcagcttcatgtcccctccactgctgtacctctagggcctccctctgccactgccatctactaggacattcttcctgggcccctgtgggacaaggactgcctttggctagtgtggggaaaagaaagagagatcagactgttactgtgtctatgtagaaagaaatagacataagagactccattttgttctgtactaagaaaaattcttctgctttgagatgctgttaatctgtaaccctagccccaaccctgtgctcacagaaacaggtgctgtgttgactcaaggtttaatggattcagggctgtgcaggatgtgctttgttaaacaaatgcttgaaggcagcaagcttgttaagagtcatcaccactccctaatctcaagtaagcagggacacaaacactgcggaaggccgcagggacctctgcctaggaaagccaggtgttgtccaaggtttctccccatgtgacagtctgaaatatggcctcttgggaagggaaagacctgactgtcccctggcccgacacccgtaaagggtctgtgctgaggattagtaaaagaggaaggaaggcctctttgcagttgagataagaggaaggcatctgtctcctgctcatccctgggcaatggaatgtcttggtgtaaagcctgattgtatatgccatctactgagataggagaaaactgccttagggctggaggtgggacatgctggcggcaatactgctctttaaggcattgagatgtttatgtatatgcacatcaaaagcacagcacttttttctttaccttgtttatgatgcagagacatttgttcacatgttttcctgctggccctctccccactattaccctattgtcctgccacatccccctctccgagatggtagagataatgatcaataaatactgagggaactcagagaccggtgcggcgcgggtcctccatatgctgagcgccggtcccctgggcccacttttctttctctatactttgtctctgttgtctttcttttctcaagtctctcgttccacctgaggagaaatgcccacagctgtggaggcgcaggccactccatctggtgcccaacgtggatgcttttctctagggtgaagggactctcgagtgtg

SEQ ID NO: 28041 - DNA, 2300 bp, Homo sapien
agggaggaatgggaagttggtgttgaatggggacagaatttgagttctgcaagatgaaaaagatctagacatgccattgcactccagcctgggcaacagagtgagactccgtctcaaaaaaaaaaaagaaaaagccagttgcggtggctcacgcctgtaaacccagcactttgggaggccgaggcaggtggatcatgaggtcaggagtttgagaccagcctgaccaacatgctgaaaccccatctctactaataatacaaaaattagctggcatggtggtgggcgcctgtaatcccagctactcaggaggctgagacaggagaatcgcttgaacccgggagaaagagattgccatgagctaagattgcgccactgcactccagcctgggcaacagagcaagactctgaaaaaagaaaaatctagaaatggatggtggtgatggttgcacgacattgtgaatgtagttaatgccactgaactgtgtacttaaaaatggtcaagatgggccaggcgcggtggctcacacctgtgatcccagcactttgggaggcccaggcgggtggatcatgaggttaggagatcgagaccagcctggccaacatggtgaaccccatctctactaaaaatacaaaaattagcttgtcgtggtggtgcatgcctgtaatcccagctactcaggaggctgaggcaggagaatcgcttgaaccagggattcggaggtttcagtgagctgagatcacgccacactgcactccagcctggcgacacagcaagactctcaaaaaaaaaaaaaaggtcaagatgataaattttaggttgtgtgtatgttactgctttttcacagatgaagaaaacaacactgacatgcattatctcccaacaccaacctcaacccagccctggagtgtgagcagagccagcagcatttccagccccgcctctggaggaaggagaggaacctgagactcttgggtgacctgaggcgtctctggcagcaccagcaaaagagcctggccctggccgcccagcacaggtgctcagtccctcctgactgccactgctccctcaacaccaaagcacagggtcgcgagatgttgggagagggtcggggatgctgggctgggagaggaccgggggcctgtcagaagccatgacatgatgcactcaccgctcaggaggaagctactggcctttgagtgaaatctataagaatgaactctggagatgtatcgtacaacatggagtctacagttaaaaactgtattgtatactggaaaattgctaagattagatcttccatgttctcactacaaaagcataagtatgtgagatgacggacgtgtgtgtcagcttgatttaatcattttgcagtgtggcaaagcatcgcactgtaggtggtaaatatatatacagttttgtcaattataccttcaggaagctggggtggttggtgtgtgtgtgtgtgtctgtgtgatgtgaggtcagtgaggtgctgaacatggtgcattaaacagcattttcattcttatctcatgattcctggacttgaaccgttgagtggcttctggctaaacccaaacctgtttcctgctctctaaccacacctccctctaggaccggttggaggagcctcagcccaggcccctgagctcaagccctgggggactcctgctgggcagctctctggaccccagtgagatgctccacagacccagggcgccctcggggaagtggggaaggagggaagtcaggtgcatcacctcttgggaccagccccgaggggactcaagcccatccagggcgcaggtgcctccaaaggaaagccccaagggagggtcttggggggccatggcgcatcccacctccctgtgtgacctcagctcttgctgaccctctgcctgtggtgggaggtccccaaacaaagcacccagggccccaggggcaaggccaagctgacaggtgtgggaggcagttgagccctggatcctgaccacagcagggcagttggcagatgtgcctctgggacagaaccccaggggtaacggtcatggactctggaaggggcctggctgggggcagggaccagaggatgaggatggggccacatggactggggtgcaatgggacagctgctgccagcgagagggaccagggcaccactctctagggagcccacactgcaagtcaggccacaaggacctctgaccctgagggccgatgaggccagggacaggccaggggggccttgaggcccctggtgagccaggccccaacctcaggcagcgctggcccctgctgc

SEQ ID NO: 28042 - DNA, 2300 bp, Homo sapien
aatgtctctctctctttttttttgagacagaatctctccctgttgcccaggctggagttcagtggtgtgatcttggctcactgcaacctccacctcctgggttcaagcgattctcctgcctcagccccttgggtagatgggactacaggtacccgccatcatgccaggctaatttttgtatttttagtagacatggggtttcaccatgttggccaggctggtctcgaactcctgacctcaaatgatccactcaccttggcctcccaacatcatgtctcttaattggtcccactggttccatgagtccttctctattgtgcagagagacctcactgcaaacacatctgatagagactcctcacctctgtgtggttccgtgactctcatgtttccagaataaaacttaaactctacttcaactctactgctggacagtgaatgagcctttgtattccaggttcatccactgttttgcagtgtagcctcagacaactgaactctaagcctttgtttgctcatctgcctgaactcactgagcagttgtgggaccttggggaagttacttgacttttccctctagatttacgctgtaagatgtgtaaaatgggactatttctgagggttaaattagtatgccacagttggaacactgtcaggcacataatgcttgccagatattgactatttgtctttgtcctatgaggacaatggtaccccactgtggggttctcaattttgtataagaaaataatgttttatgatttgttagtaaaagaaatacctgaggctgggcatggtggttcatgcctgtaatcccagcactttgggaggacgaggcgggtggatcacctgagatgagttcaagaccagcctgaccaacatggtgaaaccctcgtctctactagaaatacaaaaattagccagatgcggtggcgtgtgcctgtagtccaggctactcaggaggctgaggctggagaatcgcttgaacctgggaggtggaggttacagtgagccgagatcgtgccactgcactccagcctggtcgacagagcaatagtccatctcaaaaaataaataaataagtaaataaaagaaatatctgaatacccctgccatggaaagaagaaacagagcgagaaaagggagttggtaggtcgtagcattacagaactgggaaggatgtgttcagtccctattttatagacgaggagggaagtgtgatgtgtcccagggtttcactgaggatacacagccataactctctattgagagtgggaccagggccctgggggtagctatggtcaagttgcagacaagaactaacacttgtaagacaggagagaagcatttaattagaaaagcagtaaaaaatttgtgtataactacatttggtgagcaaatgaaagctgtcagactcagaaaaacagaactgctggtggaactgactttagtaactggggttttctttcttttgtttcttttttttttttttttttaaagacagttgcacctttgtcacccaggctggagtgcaatggtgtgatcttggctcactgtgcaacctccgcctcctggattcaagcgattctcctgcctcagcctcctgagtagctaggattgcaggtgcccgccaccaggccgagctaatattttgtatttttagtagagacaagttttcaccatgttggccaggctggtcttgaactcctgacctcaagtgatccaccccccccgctcagcctcccaaagtgctaggattacaggcgtgagccaccactcccggccataccagggttttctattgagtttcttgccaagggtgactcgcaataacaactccccctgcacttagctcaggactggaaagctcaggcagcatagggtgaataaaagcctgagtagtgcagtccccacagaggggcaggggggccacaaggtgggcagcagcagggacaggcattatgaggcattggggggggctgtggggctggacattgtgagtcactagcctgacctggctgtttcctggtaaccaggtgacataggaagctttgtgggttataagcatcagccagggccagcagccctcagtcagtagctcgcagtggagggaggaggagctccaactgtgctctttgatggcagtttttgcacctttgggtgcttgtcatgttcgtttatttttcaaagaagacagcaggtccctgacctcatagaccagctagtttgggaggtggcggcagaataagggctgaggacccagatctgcctggggtcaggctgcttctaaaagtgcaggg

SEQ ID NO: 28043 - DNA, 2300 bp, Homo sapien
atcagtgagtcctgcagtcactatagccccctgcgaggacagatattttggtcaccatcaagtggatctttattttttatctaacatttacaattctgccagttctgactcttaaattctctttgccttgaatcccaggatccacctctgatgttcagtgaagactaccagaaaagtctgctagagcagtaccatctgggtctggatcaaaaactcagaaaatacgtggttggagagctcatctggaattttgccgatttcatgactaaccagtgtaagcggcagtttggctcataggataatgtacccgtcctcattttttcaggttgccttgcccattctggacactttgattgtaagaatattggaaacaaagcgaggagctggtttaatccatgcaggttgcgttgaggatttcctaggaaaagtgagttgtgcttagtaagtaggaaagcagtcaggcccctgcttcccaaatacagtcaaaaagcaaacaggagagtctgctatagtgagatgtaaatggctagcttgcctttttcttgtctatttcatagccaaggaggaaggaaaaactggacctcatggatttactttaggaaggtacaaagcctgagaagcttaaggtatttcagtctgttttatattactcacttgcaaaaagcaggctcatcgaatacaggtgagtttcaacacatcttgaatatggcagcatttaaaagtctttagactgggcatggtgactcatgcctgtaatcccagcactttgggaggccaaggtgggaggatcatttgaggccaggagttcgagaccagtctgctaagcatagcaagaccccttctctacaaaaagtaagcaaattagctaggtgtggtggtgtgttcctgtagttccagctgcttgggtggctgaggcaggcagatcgcctgagcacaggagttgggggctgcagtgagctatgattacaccactgcacttgagccagggtgacagagtgagacctgtcttaaaaaaaaaaaaaagggggtcttcaaagacaagaacatctgtgctgtcacgttgggtggatgaggggctgccaggtttgcaatgaatgtttcccatttcttcttagtttatggacttaccataaactcaggatggcagtttggtgggttggagaaggatatggtgattgcgggagttacaagacattacttataggggaaaacagggttttgaaaggttaacgcttaaaagtgagaatggaaaagggatgaatgaatgaacaagatgaggtgagatggaagaggtaaagggaaaaggagaacaagcagctcttctctgcgtggcgcctgggatgaatggtttctggggacatccctgatggcagttttgtggagaggcgcaaaactttatgtggtaagaaatgagctgtaggcccagcgcagtgacccacgcctgtaatcccagaactttgggaggccgaggagggcggatcacttgaggtcaggagttcaagaccagcctggccaacatggagaaaccttgtctctactaaaagtacaaaaattaggcaggcgtggtggcaagtgcctgtaatcccagttactcggaaggctaaggcatgagaatcgcttgaacccgggaggtggaggttgcggtgagggaagatcgcacctttgcactccagcctgggcaacaagagcaaaactctgttttaagaaaaaaaaaaagaaaacaaaagaaacgggccaggcgggctgggcgcagtgggtcaggcctgttatcccagcactttgggaagccgaggtgggcggatcacgaggtcaggagttggagaccagcctggccaacatggtgaaatcccgtctctactaaaaatacaaaaattatctgggcatggtggctgctgcctgtaattccagatacttgttaggctgaggcagaattgcttgaatccaggcaagtgaaggttgcagtgaggccactgcactccagtctgggcaacagagtgagactccatatctaaaaataaaataaaatggaggaggaggaagaggaagaggagaaaaaagaagaagaaacagctaggtgcagtggctcatgcctgtaatctcagcaatttgggaggtggaggaggagcaggaggaggaaaaggaaacaaccaggccagtcatggtgtctcgtgcctacgaggaggaggaggaagcggaggaggggaaaaaaaaggaggaggaaaaagaaacggagcagaaggagttggaggaggaggaggtggaggaggaggagggaaaagaaatggagcaggaggaggagg

SEQ ID NO: 28044 - DNA, 2300 bp, Homo sapien
gaaacaaacaaaacaaaacaaaaccaaagatgcctgtctcctgccccatcaaataaatccaaatctctgcagggtgacacagggtattaacattcttaaattttgcctttgctgaagtaaacatatagtaatggctgaaaaccactgcgttatgtaaatacacttcctatgacttatttgtagtccttttgtatctagcaatttctacagaccctctctgtgggcttcggaagccagaatgggcagggccaggtgtgaggtgtcctaggacactgagggtagagcacagctcccagctcagggggacccatttctgaggctaaggcacccacctggggctcagcctatcttcagagggaaaatcacacctcagaacaccagacacccaaaagaaagctccagttcggcagatacctgccaatagaccctggagtggctgccccagggaaaactgccattgcactgtcagctccctccagccctctctcaggtcccagcaggagcagatttctgactaagctcagaggtctcaacaaatggcaggttgaacatcagaggagttattaataggcctatagttacctcaagactccaccttaccagggccaaaaatgagtcctgggagggcagccagaaagaaagtagggcagagaggaaacacagggagaggggccctgggaccacgtcagatatggagggaaccaggggaacgagagcagccctgatgattgtactccccacagcccctgcatgcctgtgaaccctgagaattcagggtgaggagctcactcttgcctttcacctgttcctgggctctggcaggctggcctgcttcctgccccagcctcacccactctccgcactcctcgccactgatgtgggcagctgatctctccggtttgctgggctctcaccctctgcccaatggcaccaagttaacttcttcgcatgctttattttctgtgattaaaaagggaaacaattctcactaacgccatttctcagaggagaaaacaggcacagggatgttctatgacttcctcacgatcaccaagctacaagggggagctgggctttgaatggaggtctacccatgctcctaaagttgaggcgtcctccaaggaaaggacagcacctataaaagctcaatgaatggggcggcagtgtcaccactaagcccgaccacgctgctactctgatatccaacttccagcctccagaacagggagaaatacagttctgtttttgatgagctccccaggccgttacagctctttctttgctgtaacagcctgaactagcccagaagtgctattccatcatctgtgtcatattccatcattcagaagggagtcactaacccctcagtgctgtctctgtggacgctgcccaccctaggctgagatgaggcacagggtctgggtctaaataaaatgggaaggcactggaaggtgcaatgtcataggaggaggatgtctgaatttcatttaatctcaacctctactggtgcagcatgaaagatgaggcccagagcaaaagtgtcttttcccgagatcacactgtggaccccaggcccactggagttgcattagacgttacctctcaccccttcttgtatttgttccatttctaagtgtgtgcaatatccacagggaacaccacaccatgagtttttaaatatttatctcaaacataacctcatgagttccctaggaaagagatgctagcataacccccattgtgcatgctggggagaccccaaaacaccaaaggagttctctagggtctcacaactgctaaaataaaggctgtttgacccagcactgtctcctcaaacctgggaccctggttatatccaggtcttcccaaggtgctgaaggggcacactttttcataatggtgactacgtaaggagttgacgggggagggtgagcggtcagaagcccagaggggcctttgagtaggacttatggaaaggaggagcttacaggatggaacctacaagatgtgacctcacttccttgccgacagacccccaacagaacttacaattctggtaactaggcacccacattctagagacagccccatttccagctcacttcgtaggcgatgctcgagagaacaacatgttctcctgctgtatcccgacatgctgccgacctcctcgtcgcacaagaggccaaaatgagagtctttcccgagaatatagacattggttcaaccctcaccctcgacgcctctggccctttgccagaaggcacccacaggtaacacagggcccagggcaggcccatcca

SEQ ID NO: 28045 - DNA, 2300 bp, Homo sapien
caaacaagagctgttggatggattcaatttctccatattcttcaaagggcacgtgcaccacaccaccaaccacgtccagtgccggtctgcggtgagattgggcacagaagggtctccacagacaggacttgtgaaaaccaaggtgggcccaggactcagacacgaatatggggactccctaagctccatcctagggcgttcccacttgagtgacccactgtcctctcccaaaggaatctggctgccattagtccccagtggcaacttggttacaggcaaagtccctttcacctatcagaggaagaccagagaaaatccttctgttttcactttaggctatgccaggagtatctcggcatgttgctttaagaattgagtacaatggtaacattgcagcaaaatactcacactgttatcattttaactccccaccctaagtggatctccggcaacaggcaggcagctccgctgccctgccagacctcctccaggacttaaaatccaacacttttgcacaaacaaggggtgggggtggggggggtgcattgattacaacaaaagaaggtgaagcgactctatgcattagtctttaaagtgtcatctcacagaactcatccctgcagccccatcaggcaggagttgtaccctcgcatgtcattgtaacattccttaagggaggccattttccacagcgggtcagcctctcagtgctggtggagcctgtcatgataaaattccctttcgaggcagcctttctacaaggagcataatcctatgcgtgtcctaataggctggagcagtttgccagggctgccataacacggcaccctgactgaagggcttaaccacagaaatctggttcctcacaattctggagactggaagtccaacgtcaaactgtcagcctggggtggtttctctgggcctctctccttgccttggagatggcggacttctatctcagtcagcacagggtcttctcttgaacttctctgtgcgctgaccccctctccttgtaagaaccccaggcatgttaaattaggggccaccctaatgaactcacttcacctgaattacctcttggagtactctgtgtccagacacagtcacattctgagtctctggggttgagaatagaaacagttacatttggggaaggggacacaattcaacccataaaataaacaaatcccctgcagcagacagacacccaggaaagggatatctgggtgaaaggatatgcagatatcaactttcaacagctctagctagttgactttccaaaagggctccagctggtcacacggtcaccagcagcctctgaaggtagctgcttctctgaacgcagcctcccctgaatactaacacgcttttaacttttcgccaacctgctgtctgtgtggcagagaaaatccttgtttcatttccactttcaaacatacatttgcgtaacctttcacgggttcaatacctgcctgcgttttccccaagtcgcctcgcagatcctgggccttgggacgcgcttcctcccaccctggagtcttccggcattttccccttggccagggctgggatggccgtagctgtttctccagactcacgttcatgttaaaggaacaaaaacaatcatatacctttaagtcaaagagttcttctagagcgtattgtcctgtgtgctgttgctgaaatgaggaggggatgaggcctccccaggccttgaggacttgcagggatgatgctcttcatgcaggttgctgacacagagggtgctgttgccccacagctgacaaacaccgggacgatgccttgaaggcaggaatcgttttatcattctccatcctcacatgcaatgttactttgaaagcctagaacgcttttcaccatgggcacccaggttctccatatgcacaagtccctgaagggttggtgcttcttggtgtgagttccagatcccgatcctctggtggtccatggtgttaccactgactcccatgtccctccttgtccccctagtatgaaaatgagatctgcaggatgctaactttccagcccggcactggggagaagctgttgggagtccctggttccagcctttctaactaaacccatctcctcctatgccacctgcctgggcccctcctgggactttatcactgtgccacactttttggaactactggttagaaggtgagtgtccatccccctccaagacacagaggtgcctctgtcccctactggctctgtcttgaagatgcacctctcggagcctcggttggctcctctggaacagggagtagtga

SEQ ID NO: 28046 - DNA, 2300 bp, Homo sapien
catcccatttccagggcctcctgcccccatgcccccacgtgcccatggaccgacacaccactcttcctgttggcccaaggtaggcatggagggaatttttcaagtccacttttagtaggtaagtcaaaaccaaacaaaataaccactcgacacctggtccaatgcccttccaaactcactcttttctctgacccttaaacacttgtcctgcatctcccagactccactgtaccttgatcagtaggtccctcttcactgcagtgtcttttttgcagagttcttttagctctttcatgcttttgctatgggcagaggaaagaaagaagggtaaatttgggaatcaggggagatttgtgagttccagtcccttttgtttgaaaacccagtgaatcccagcttactgggtgagagttttcagtggagtcctctgatcacaggggctccagaggaccagggtgggacctctcatgctcctcccctgggccccatctccacttcacatgagccactgcgtgtttacagttagctttcagctggacacagagttccactgctgggtacaaacacctgaaagcctccagttggctccagtctgttcctgatggttaaaaaaccttagtcctgagttggaaatccttgcctaggagtccagggcagcttagtgaccacagccaccggcccatccctgcctccagtgtccctggactccaagaacctttcagagtcattgagggcacatggggggagacctgtgagtccctaggtcaaccctgatgctgccatggagagagccctcctcacctggacactcctgcccacgtcttgtgtagctgacctattgggttgctgcacagagcagagacgatgacgtgcaccgaggagaagttgttgaggcttaggcactcctggagagggaagaatgagctgtgcggttcagagttggagcttggcccactacagcctcagccccctctgctgagatctcccctcctggatgaagcagaggcctggggagcctcaggagggcagacctggggccgagtggatgtcactcatctaggaggattttagttcaacccaaggaagaccccaggtcggaagtgagcagccaccactgggccgtgggagtcaaggtgagtgaagctctggcaagaagagcctaggggatgtgcagggtccaggccagagatacagatgccgatcctgaaagccgatggaggagaagaggaagttccccatttttaaagagggaatccccaggcccaaccatagcttaccctggccaccttgatccagtgctccaccaccctggccctgtcccgggccctcatgctgtggtccccgaggcaggaggtggtgatgcagttggtgagcctgttgaagtgtgcgatggtggcacgaactgtgggtgccatgtgctcattccccttcagatgtccttggccccagatgcagcccaagcattcgtggagcaccaccttcttgaacagctcctttgggggaggaggagagtgtcacggacacagcacactgcagctcagagtcacccacagtcccaggcagggactgagctcacagtcatccacggtctctggcaggaaccaagctggagctcagaaagctttaaaatgggctccagacttgtgggagtccctgggtttggttttctgcccccgagggacctgaatgcatcatggcctagaacccaacaagggtgggaagagagagtgacattttctcccaggccatccacactctaagaactagaaggtggctcaggcctgcccatcctgaggcctcgtcttcctcccatcccaatcagccctctactactcctctccgtaccggtgcactttccttgtggcagctgcaactatgggctctgtttgggtgtctaccatagaatccagtatgcatcaggtacctaataagtgctgagggtagtgaggctcctgagcagctgggtgagtgacccatggccctgcctgccccacagtgagcacctgccctgccctgctttctgtccatctcctgtcactcagtctgcacagtcactctgtgcagctggcgctggtgatgtcccatctctgccgtccacatgcagacagggaaggcttgtgggtgaggaaactcatccagatcccacggttggtaagaagtggggctgaaattggaccgagggcattggctgctcctcagggagaggctggtctgagacagctggtgccagagacacagcctgcaaagctcagctgctcaccgcatccatgagggtcagctgctctgccagcagcctggga

SEQ ID NO: 28047 - DNA, 2300 bp, Homo sapien
caggttcctaggaccaaagggacccctctgtatggcagaggcacccaacagccataactgatgtgtacccttagaatgactttatggtcggccgggcgcggtggctcacgcctgtaatcccagcactttgggaggccgaggcgggcggatcacgagctcaggagatcgataccatcttggctaacacggtgaaaccccgtctctactaaaaatacaaaaaattagccgggcgcggtggcgggcgcctgtaatcccagctactcaggaggctgaggcaggagaatggcgtgaacccgggaggcggagcttgcagtgagccgagatagtgccactgcagtgccgcctgggcgaaagagcaagactccttctcaaaaaaataaaattaaaaaaaaaaaagaagaatgactttatggtctaagaagaatgtgtgttcggagccccaagctaaggaatcaggaatggcaagatcctggaacgatgccaacctatgaaaccctgagtcaagaggtcaagctgggcacttggtttctcaggtcgactgcttggccctcttccaagttgtactttccttctttcctttcctcctttatttcctgttctaaagttttataataaacttttttttttttttagatactatctcactctatagcccaggctggagtgcagtagctcaatctcgttcactgcaacctccacctcccaggttcaaaagattctcctgcctcagcctcctgagtagctgggattacaggcgctcaccatcacacccagctaatttttgtatttttagtacagacatgtttttaccatgttggccaggcggatcttgaactcctgagctcaggtgatccacctggctcagcctcccaaagtgctgggattacaggcatgaaccaccatgcccggccccggcctgctttttaataaacttttactcctactctgcaacttgcctctgtctggtttctgccttatgaccctcggtcaaattctttcttctgaggcggcaagaattgaggttgctacagatgtgtatggattcaccactgggaagttggataccttccaccggtaactggtcgaggatgttaggtgaaaatgttatggaagctgcatggtttttacaaatcatgtagtggttctcatgtccagccatagccactgcacctgtgtgaaagtcccctcaataaacctttgtcttttttactgtctccagatctcttcctctacccttccacacggtgccttccctactggagtaaagtggggtcccgcagggcaccctctctgtgcaatgttttttttttttttttttttgagatagattcttgttgtgttgcccaggctggagtgcagtggtgtaacctcggctcattgcaaccttcgtctcctgggttcaagcgattctccagcctcagcctcccaagtagctgggatcacaggtgcctgctaccatgcctggctttttttttttttttttttttttttttttagtatttttagtagagatggggttttgccatgttggccaggctggtctcgaactcctggcctcaaatgatctgcccacctcagcctcccaaagtgctgggattacaggcgtgagccactgcacttggcctctctccctgcatcttcatgtgtcttcaacgccaagagggagcttctggcccctcggttagggtcgaggtcccagaggcccagggtcagggctaccgccgcctcccaaggacgtgcatgcctgcaagaggctgcatccagcagtcatggaagaggctccactggggcctgctctagttcctgctggggaaagcaagtggaggtgccccttgaagaaacggggatcccaccaatctcaggggttctgtcctggcctgtggccctggatcatccagcacagagcagacgacgatggggagcagacgacgcccttcttggttggggctgagggtgggggtcccgcttccctaaaggcctagcccagggttccagccacaggcgccgccccgcccctccaggcctggcaatcgccctcaacaaagatggcgcggacgacctaagtcgcgtcacgctaccggcgcgtcacgcgaccttgccgcaatgctcctcccgcgcagctcttatccccgtagactgcggccgagacggggagggggaagcctcgcctggggggcggcagtggcctgggcggctctccggctgctgttgtatggctgcacgttggcgctaccggacgggatgctgtatccccgagagagcccgtcgtggcagcgcaagcagctggacggcctctgaag

SEQ ID NO: 28048 - DNA, 2300 bp, Homo sapien
tagtggagaccgggtttcaccatgtgaccaggctggttttgaactcctgacctcaagtgatctgcctgcctcggcctcccaaagtgctaggattataggtgtgagccaccgcacccagcccccacttcctgttttagctcacctttctgaacaccttcagcccgttgagtctagacaccatgatgtggcacttgattgtgtctgtctgtctgccttcaattgtctctggtaagcaaaacttgcctctaactcatttgggatcatcttaagggcaagattgtgtcttatgcgtattttcttgtttctaccatagattctaggatatgaagcaggcacatatgagctgcttgacttgctgacttgacagagttccctgttttcttttcagattgtgagaacagtaagtgtggcccaaagaagaacatttttaaagaaatacaaccattggggatgatagcagattcacaatggaggttcccccagcaacaaagtttggtgagacctttgcatttgagaacaggttagagtcacaacaagggcttttcccaggggaggacctgggggacccttttcttcaggaaagaggtttggagcaaatggctgtgatctacaaggagatccctcttggtgagcaggacgaagaaaatgatgattacgaggggaatttcagtttgtgctcaagccctgttcagcatcaaagtatccccccaggaaccagaccccaggatgatgagctcttcggacaaaccttcctccagaaatccgacctcagcatgtgtcagataatccacagtgaagagcccagtccatgcgattgtgcagaaacagacagaggggactcaggacctaacgcacctcacagaaccccacaaccagccaagccctatgcgtgtcgagagtgtgggaaggccttcagccagagctcgcacctgctccgacacctggtgatccacactggggagaagccctatgagtgctgtgagtgcgggaaggccttcagccagagctcccacctgctcaggcaccagatcatccacaccggggagaagccctacgagtgccgggagtgtgggaaggccttccgccagagctcagccctcacgcaacaccaaaagatccacaccggaaagaggccctacgagtgcagggaatgcgggaaagatttcagccggagctccagcctcagaaaacacgagagaattcatacaggagagagaccttatcagtgtaaggaatgtgggaaatccttcaaccagagctcaggcctgagccagcatcggaagatccacaccctaaagaaacctcacgagtgcgatctctgtgggaaagccttttgtcacaggtcacacctcatccgacaccagcggatccacactgggaagaaaccatacaaatgcgatgagtgcgggaaggccttcagccagagctccaacctcattgagcaccgcaagacccacactggcgagaagccctacaaatgccagaagtgtgggaaagccttcagccagagctcctccctcattgagcaccagcgcatccacaccggtgagaagccctacgagtgctgtcagtgtggcaaggccttttgccacagctctgcgctgatccagcaccagagaatccacaccggcaagaagccctacacctgcgagtgtggcaaagccttccggcaccggtcagccctcattgagcactataaaacccacaccagagagaagccctacgtgtgcaatctgtgcggcaagtccttccgggggagctcgcacctgattcgccatcagaagattcattctggggagaagctatagaaagaggagcccacacaaagcttgaaagcctgtgccagatggagcctttattccacgtcgcgtggtctccaagaccccacctacctccctgatgctgaatggaaaccttcccacctaagcgctcttgaacatcccactagcaggaaggccctgtgtggccctgggccaagcacgccagctctcagcaggttttctgcatggaagggaaggtggggtgatagggagggcagccagaaaagacagctggccttcagtttctccttcttgcatttgactcccaagcctacaggatttcattttgccctgtcttcacatttcccagaatctagaagaataaatgccaagagggagaaagttgaattaaacccaggaaaatatcagaagaactctttaaaacaggctgcagtctggcacttttagaagacagaaaccacactcacagtccaaagcagtagaagaaaaatgaattcaaaagtagatgtgtcagcagca

SEQ ID NO: 28049 - DNA, 2300 bp, Homo sapien
agacagtcctggcccagctggatgcactgctggtcttcccaggccaagtggctcaactctcctgcacgctcagcccccagcacgtcaccatcagggactacggtgtgtcctggtaccagcagcgggcaggcagtgcccctcgatatctcctctactaccgctcggaggaggatcaccaccggcctgctgacatccccgatcgattctcggcagccaaggatgaggcccacaatgcctgtgtcctcaccattagtcccgtgcagcctgaagacgacgcggattactactgctctgttggctacggctttagtccctaggggtggggtgtgagatgggtgcctcccctctgcctcccatttctgcccctgaccttgggtcccttttaaactttctctgagccttgcttcccctctgtaaaatgggttaataatattcaacatgtcaacaacagctattgtgagggtcataagatcctggctgagaaaaatgactgtggtgggtctgggagtcgaagacccactcctggggtggggagcagtgtgcgggggaatggggattctggggactgttgtcaaagaggaagcacctgagactattggggcatggcccagactcccccaccatggccccctgggggctcaaactggtagcctgaccttcctgtgacctgaggagccggagggagaaaaaggaaccagcccttgccgcccccaactctgcatggctggttatggtccaagggttatggctctagggtggctggtccccatggagctcaggctgttggcttggggaggggcagccactgcctaccccttggagtctgtgcccaaggcccgacagagcattaatggggcaggaaggcaggtgtgtgtgggtagcattggaggcactcgagcgccaaggctgagggtgctgaaggcaggtgggcggctggggcagaatcctttttcccagggacagtgtgttctcctgatgtcctgtgattgggccaaggtctgcggagggaagctctcccacaagctgggcagctgcacctgaggggggggtgtcatgggcagaacactgggtggaggggccagtcttgccatcagcagcaaggagggggcggagattccttttcttttttttttttttgttttttgagatggagtctcgctctgtcgcccaggctggagtgcaatggcactatcttggctcactgcaacctccgcctctcagggtcaaacgattctcctgtctcagtagctgggattacaggcgcttgtcaccactcccggataatttttagtagaaacagggtttcaccatgttggtctggctgagtctcgaactcctgacctcgtgatccacccgcctccgcctcccaaaatgctgggattaaaggcgtgagccaccgcgcccggccaagggggcggccatttcaagaacacattcctcttccctcccggtgcgcctgagaggaggcgcttcatgtcgaagtcagccctgggatgcagagagttggggggctcagggtcctgggatggtctcgcagacactcctagttcttcgcctgccccttctcatctctatttctgtgggggcggggagggcagacaggaacagggctacccttgaagcaggttgggggagggggatcctaacaggaccccggtgcctgtggacagtgacagggtcgacagctctggggctccactctcctttccctgaagaccccagctgcctcagtggcttctggcttgcacccagcaccagcgcagatgccccgagtgccggcggctcgaggtcggcccgcccgtccggacctgtttcctcctctgctctcctgccaacgcctgcccatctctgtttcccccacgtccagcacgcgcttcggggacggccagagccaccatgccgactggagagactctcctgattcgggtccttgtgtcccggggcccgggcggcttcgcgcggcgacaaccggcgcggtgggaccaccgagacgccgggacctccgcgcggcctagagtggtcccggaagtgcccgcgggccgggggcggggctctgggtgctcgggcggccgcgggctccgcgtcagcagctgctgtggagccaggcagcgtcggccgcgtcggccgcgggttggagcagctcaggtgcggccccgccccgcccgcctgcggccccgccccggcccaggtgagctgccccgccccggcccaggtgagtggccccgcgtccgccggtgtgacctgagtccgcctgaccacctgtccctccggtggccctgggtgtgcgtgtccccaatcgc

SEQ ID NO: 28050 - DNA, 2300 bp, Homo sapien
gcagatgacaaggtcaggagattgagaccatcctggctaacacggtgaaatcccgtctctactaaaaaatacaaaaaattagccgggcatggtggtgggcgcctgtcgtcccagctactcgggaggctaaggcaggagaatggcgtcaacccggaggcagagcttgcagtgagccaagatcgcaccactgcactccagcctgggtgacagagtgagactctgtctcaaaaaaaaaaaaaagaaaaagagttatttactatcggctgggcgcggtggctaacacctgtaatcccagcactttgggaggccaaggcgggcagatcacaaggtcaggagatcgagaccatcttggctaacatggtgaaaccccatctctactaaaaatataaaaaatttgccaggcgcagtggcgggcacctgtagtcccagctactcgggaggctgaggcaggagaatggcgtgaacccaggaggcggagcttgcatcgagccaagatcgcgccactgcacaccagcctgggcgacagagtgagactccgtctcagaaaaaaaaaaaaaagttatttactatctatagggactgggtaaccctgggagggttagtccctcaatggtcagcaagggcccagattacacagcactggaatacagaaaataaatgacatggttaatccacccactgtggccagccctgagcaaataggtcccatctttgcattttcacaatcctcaggctggcattatgcttaactttatgttccagatgagaaaaccgaggcacagtggggggaagtaacttggctgaagtcatgcagttaagaaaagcaggagctgggattcaaacccaagttcaaaaccacctcagctacttggaatcctggcaaattaaaggttgtgataatgtcaagggctggcgaggatgcgaagtcacagtaaactctcttactctgctggtggaagaccagattgttacaaacacatcaggaaccctggcagacctagtaaagctaaatgtattctttccttgccgtctggcagctccattcctgggtgtctctccagcacaaatgagtgcaccagtacaccaaaagacatcgacagagacattcacagaagttgtatttgtaatggccaaagactggagagcatccaaatatctaacaataggagaatggaaaacctgattacagtgcattcacacaatggattacacacagctatgggcatgaatgaaatattgctgcacacacatggatcactcccatcatgttcaacaaaagaagcaggcacaaaagagggcacactatcattccacttatagttaaagttctagagcaggcacaaactaatctaaggtgatagaagtcagaatgatgattcccttgagggtgcatgtcattaactgaggggccttcaggggagatggaggtgttcttttttcttttcttttttttgagacatagtctcgctctgtcgcccaagctgaagtgcagtgaagcaatcttggcttactgcaacctccacctcccgggttcaagcgattttcctgcctcagcctctccagtagttgggactacaggtgtgcaccaccacgcccagctaatttttgtatttttagtacaaaaaatatggagtttcaccatgttggccaagctggtctcaaactcctgacctcaagtgatccacctgcctccgtctcccaaagtgctgggattataggcgtaagccaccgccctcagccgagattttctaaatcctgatctgggtggaggttgcaggggtctgtgtgtgcgtgtgtatgtgtgtgtgtgtgtgtgcgcgcgtgtgcgtgtgcgcgcacatgcatgcatgcatgcttgtgggcatacatacatatacataaaatcatcaagctatgcacttaagatttatgcactttactgtatgctagttgtacctcaataaaaaagtagatttccacctgctataactgcacatgaggacttctgggctcctattcttggaaggccttgtggtgccaggaccctgacatttgggaagaaaaggcttggccattgggccccagtcaccgcccctccttcctcagtcaataggctgatttgcatgctctgttgtggtccagtggccttcccagccctgtgccccaaagcacctggagcatatagccttgcagaacttctacttgcctgcctccctgcctctggccatggcctgccggtgcctcagcttccttctgatggggaccttcctgtcaggtgaatctttcctgggcctcagtcacctgggtgtggggtggggaac

SEQ ID NO: 28051 - DNA, 2300 bp, Homo sapien
gcagcctgggcagcagagtaagaccctgtttcaaaaaaaaagagaacagaaaagaaagaaaagaagaaaggaaggaaggaaaagaaaaagaaagagagaaaaggaaggaaggaaggaaggagggaaggaaggaaggaagggcaaaagagcgaaagagcaaaagagcgagaaagcaagccagccagccgggcgcagtggctcacgcctgtaatcccagcactttgggaggccgagggggggcagatcacctgaggtcaggagttcgagaccagcctggccaacatggagaaaccctgtctctactaaaaatacaaaattagccaggtgtggtggcacatgcctgtaatcccagctacttgggacgctggggcaggagaatcgcttgaacccaggaggcggaggttgcggtgagctgagattgcaccattgtactccagcctgggcaacaagagcaaaactctgtcaaaaaaagaaaggaaggaaggaagggagggagggagagagggagggaggaagagaaaggaaaaaagggaaaggagggaggggaggggaggggagaggaggggaggggagagagaatgtgaagcctagacagaaaaggaagacggagaggaggggaacaagaaggggagagactgggagaagcagacaaatacaaaagacacgaaatggccgaaatggccgggcacagtggctcattcctataatcacagcactttgagaagctcaggcaggtggatcacctgaggtcaggagttcgagaccagcctggccttccttatgtctactaaaaatacaaaaaattagccaggggtggtggctggcgcctgtaataccagctactccggaggctgaggcaggagaatcgcttgaacccgagaggcggaggttgcagtgagccgagattgcgccactgcactgcagcatggctgacagagcgagactcattctcaaaaaaaaataaataggtcaggcttggtggctcagcactttgggaggccaagatgggcggatcatttgaggtcaggagttcgagaccaatctgaccaatatggtgaaactccatctctattaaaaatacaaaaaaaggccgggcgcagtggctcacgcctgtaatcctgtaatcccagcactttgggaggccgaggcgggcagatcacgaggtcaggagattgagaccgtcctggctaacatggtgaaaccccgtctgtactaaaaatacaaaaaaaattagctgggcgtggtggcgagcgactgtagtcccagctactcaggaggctgaggcaggagaaaggcgtgaacccgggaggcggagcttgcagtgagccgaggtcacaccactgcactccagcctgggcgagggagcgagactccgtctcaaaaaaaaaaaaaaaaaaaaaaaaaactagccaggtgtagtggtgcacacctgtagtcccagttacttgggaggctgaggcaggagaatcgcttgaactcgggaggcggaggttgcagtgagccgagatcgtaccactgcattctagcctgggtgacagggagactccatctcaaaaaataaaaatttaaaaaacaccaataataataataattaataaacttaataaataaataaataaaagacaggaaatgacggtgagaaccggtgtgagggactagctagtggccagtgctaacaaggaggtgcttgtgacctgctatggacctggaagcgactagggctgagtacaaagggggcaaaggaatttgggggtgatggaaatgttctgtatcttgactgtggtggtggttatatgagagttggcataactttaaaacaccagaaagggtgaactttactgtacaagtggttcacaactgcaatcccagcacttgtgggaggctggggctggagaattgcttgagccaagttcgagaccagcctgggcaacatagggagactgtctctaaaaaaaatcaatcccaatgatggcattccccgcctcagggaatgccagcccccacttcttctgtcacctctcccccatgggccccgttaacggatacagggaggaaggcatttcctgcctagatgtctccgcccccactgccatggagaccagcttggaagcttaggggagctgctgtggcccagggctcagtggggaggaagaggaggccaggagtcttggactagctgcagggtttgagctaggctgaagcagcagaaccacagaggtggctgagcaggggcctggccctgggacccagccatccacactcacacatccacttctccctccagagcccggccctgaagc

SEQ ID NO: 28052 - DNA, 2300 bp, Homo sapien
accatggtagtacttgcactgcttcagggcctcgctgaagccctcacacagggacaggtcactctgagtggtggaacagtccaggaactgcctgatctcgtaggcgcagggccccatctgcaggggctggggggcagcgggggtgggggcctgggggtacagtgcaagaggctgcaggatcagcttggagttggcacctggaggtgcgtttcaaacctggggccacctgcccctccccacatccccagcctgggtgtcccaagggtcctaggcaggctgagtgatccagcagcagaggcggctacagacagcatgtttctgctgcctttttttttttttttttttgagacagagtctcactctgtcacctagagtggagtgcagcggcgcagtctcggctcactgcaacctccgcctcccgggttcaagtggttgtcctgccttggcctcccaagtagctggggctacaggcgcccgccaccatgcccaacaaattttttgtatttttagtagagagggggtttcactatgttggccaggctggtatcgaactcctgaactcatgatccacccgccttggcctcccaaagtgctgggattacaggcatgagccactgcgcctggcctctgctgccttctaatgggcactttgggcgggtgcaggagagggaggagaaggctctaggaaagcccagtactctgcctgtactctcagagtatgagccccacccccacaagttctagcaccttcctggctcagctacactaatcctcatgacccctgacctagccacaaagccacatttggcttacggcggtggggttcctagcaggggaaaggtcatcagggaagtggctccccttcgcccttgcgcccagcggccacagtgcccagacctgggtgtggggagaacaggggctcaggaaatccaacatccctcccctctgctagggtgaggtgaccttgggcgagtctctgagccctcagggcctgggtttcccatctttaaagggctggttggtgtctctccctgggagcttagggaccctggcctcaagggagaggccgggaagcctgcctctaagtgacagtgaactcaagaccagtggactaggacccttcccgggcagagtcctgggctgaagcaatggtgaatacacgcggacactcctcactggacacttgggcagctccctgtgtggcctcgagataatcctgcctcagtttctcttggactcgctgctcacctgctggacagcaggctgggagggctccgagctccccccgctgaaggctccggtcagggcgctgcccatgacgtgtcccacagccgagcccacggctacccctgcggccgtggtcgccatctgagccatgagccccggctggcccgaaggggcgggggctggggcggctgccgagggcggtgggtgcgcgggcgggtgggcagagggcgcggctgggcggctgcgggggtgggaggaagcagggttaatcctggccagaccccaggctggagggctgcagctcctggaaacgacccccggagagatggacgacccacgtctccacacgtgggtgctgcacccccacccctccccccgccaagatggcgcagcagcagccaaggtcactctgcggacgcccttaggggagtgcccacacttccctaaccccctccccacagggcccttgtccccctcacacctggctggccgggaggccgcgctgcggcttccccgaggcatggtggcggcggtgggacccgggcgaccttagagacggcggcagcggtgctgtcgcggggacaaatgccgcagcgcttgtcacagccggcgcaaaaaaggcggggccccgggcggggcctcaggaacacgcccccagcgggaggcggcactgcccccaaccctatcccccttctcccgtcctccggacatctcccttccagcagctccgggtctcggctggaaatgggaccctgctccctccctgcgcctggcaggctgtgcgggttctggggacaggggccagtgtcgcaaagcgccgagggcttaaggagggcgacagtgccttctgttaggaccaccgcagagggcagggagcggagttgggggttgttgcgagccctggaggggagaggagacggggaggcgacgggatggggccagctgggaaggggacgcgaggctccaggctggactccgctctctgccccctcccggactcggctgtctgtcccctccctccagacagggtctgctgaccaccgcgtggcctgggagtctccggtggcctaggg

SEQ ID NO: 28053 - DNA, 2300 bp, Homo sapien
ctcgggaggctgaggcaagagaatcgcttgaacccaggaggcagaagttgcagtgagtggagatcataccactgcactccagcctgagcgacagagcaagactccgtttcaaaaaaaaaaaaaaaaaaaagttggcatttcaatgcctgcttcagtgtcatcctttcagcctcattttcatttgtgtaacccacttaagtggtcttgggtgcctccgaggtgcaaggccatgctttgtggaacctgcagtccatcagccatgggagctgaagtaacaactctctgcagtttaggcccggggaccaccatgagaagtgttcagtttgtttggtgtggcaaacaggaaccaggtggcatggactgcatgaacaagggagtagcggctggaccaggcctggtgagtctgccaggaaagaatggcccacccttggtgtgctcacctcactgggaggccaccctcaaggtgggtggtcaccccccttcagagaggagaaactgaagacagggcggggaagggccctgttcacaggctggctgaaaggactgcagtgtgagagaacacagggctgcacctgacttccatggagagcatgcatggctggggacagctgtgcacacacagaattgagcatgccaggcagggccaaacgccccagccaccactccccttgccccttgacctgctccttccttatggaggggcctcctctcttacttggtgacccacacccccacttctgggtgcttttgctcttggttgcaccctgccgacaatcccggtgtcaggagtcctctgcaggcacagcagtgatgagggacagtccctaccttcccccacctaggagtaataatatgaccactgcaaagtcacccagaaaagaccataaaaacctcaagctcagccgggcgcgatggctcatgcttgtaatcccagcactttgggaggctgaggtaggaggatcatgagctcaggagttggagaccagtttggccaacatggtgaaaccccgtctctactaaaaatacaaaaattagccaggtgtggtggcacgagcctgtagtcccagctactcaggaggctgaggcaggagaattgcttgaatccgggaggtggaggttgcagtgagccgagatcgccactgcactccaacctgggcgacagagcaaggctccgtgtcaaaaaaaaaaaagtaaaaagtaaaattaaaacctcaagttctcgaagagcaggaaagcattctaaatccgcgctccagctcacctggcctggaacgaagctgctaaaattgcgaggccgcaggcttcaaacttgcgctagatttgaccgagccgggcaaatgctcctaggcctttgggatagacacgctgctcggatgtcgcgtaaaggccgttagtgtcgggggttgcactcgcggggccagggactaggtgggggcggtcgggccggcccggggaatccggtggggttcagggccgcgcggggggcctcatatcccccgcgggcactgcgtaaggctgccagcattggcagcgcattttggccaacagtcgaagacgggttgggacgccccctcgtgggagttctggggatgggttgctccaggccttccccagggccgcgcttcacttccctaggccaccggagactcccaggccacgcggtggtcagcagaccctgtctggagggaggggacagacagccgagtccgggagggggcagagagcggagtccagcctggagcctcgcgtccccttcccagctggccccatcccgtcgcctccccgtctcctctcccctccagggctcgcaacaacccccaactccgctccctgccctctgcggtggtcctaacagaaggcactgtcgccctccttaagccctcggcgctttgcgacactggcccctgtccccagaacccgcacagcctgccaggcgcagggagggagcagggtcccatttccagccgagacccggagctgctggaagggagatgtccggaggacgggagaagggggatagggttgggggcagtgccgcctcccgctgggggcgtgttcctgaggccccgcccggggccccgccttttttgcgccggctgtgacaagcgctgcggcatttgtccccgcgacagcaccgctgccgccgtctctaaggtcgcccgggtcccaccgccgccaccatgcctcggggaagccgcagcgcggcctcccggccagccaggtgtgagggggacaagggccctgtggggagggggttagggaagtgtgggcactcccctaagggcgtccgcagagtgacc

SEQ ID NO: 28054 - DNA, 2300 bp, Homo sapien
cctttcaggcgcggtggctcacgcctgtaatcccagcactttgggaggccgaggcgggtggatcacctgaggtcaggagttcaagaccagcctggccaacacggtgaaaccccatctctactaaaaatataaaaaattagctgggcatggtggcgggcgcctgtagtcccagctactcgggagactgaggcaggagaatggcatgaacctgggaggcggagcttgcagtgagccgagatcgcgtcactgcactccagcctgggcgacagagagagactccgtctcaaaaaaaaaaaaaaaaaaaagaaaagattacgaacagtgtaggttgtaaaaattactgctgtcttacttctcctcgccctctaggagtctctgtggagtcttcttgaataagctgtgaaacatttccccacccgcttccctttcttggcccaggcttcctgaccacagcctcacctttgagcagctcagagccctgcctgccaggatgcgagccactgcctggatcgtggctctgcagggccacccatgatggaacaggtcgcctggtgaggtggtgaggcccttcatcatttcagggggtgtacagcagtactgggtaaccccgaaaatcagggatgagactgaaggatcccttccagaatgtggacacaacccctcctttgagtctcacctcctttccttcttttttttgagatggagtctcgctctgtcacccaggctggagtgcaatggaacaatctcggctcactgcaacctccgcctcccgggttcaagtgattctcctgcttcagcctcctgagtagctgggcttacaggtgtgtgccaccacacctggctaatttttgtatttttagtagagacagggtttcaccatgttggtcaggctgctctccaactcctgacctcgtgatccacctgcctcggcctcccaaagtgctgggattacaggcatgagccactgcgcccggcctctcgcctcctttctttcaagtctgaggtggctagcctggaggggtccccaggggcttgttgggcactgacgaggggacaccctgggggcccagtactccactcagacacctcccacagccttctgacagcatccttcccacagctgaccagctagaggacctcctgacccctccacttgtctgctggtgtggaaaagcctggaccctccctcttggagcctcagtttccctatctgtaaacttcggtctatcccaagctgaagaactggccagtccctgccatatgcctcactttcccctgggacacattttaatatccctttcctggccaggtgcaatggcttccccatgtaatcccagcactttgggaggccaaggtgggcagatcacttgaggtcaggagttcgagaccagcctggccaacatggtgaaaccccatctctactaaaaatacaaaaattagccaggcatggtggcgcacgtctgtggtcccagctacttgggaggctgaggtagcagaatcgtttgaacctgggaggcggaggttgcagtgagtggagatcacaccactgcactcctgcctgggagacagagtgagactgtgtctcaaaaaataataataataaaaaataaaataatatccctttcctcacaggggctattgtgtcatcttctagaaggatccgttgaggctctgaggggtgggggaacttgcttgtgggtaggaccacctgtcagaggtcagaggtcaggccaccaaggagacccagtgggatgcgccttccaaaggtgggggtacggatgggacccatgaaacctgactcctctcagactctagccaagtctaagactttggacggccaccacccagaggagaaactgagacccagagcggcacgggttggccagggtcacccagcaccagatagggactttgccagccccggggcaggaccctgtctccggccctcgaccccgctgggccgtaccctccccgttcacctcccccacccgggccgcggctgctaggagagttcagaacaaaaggcggcggggggcggggccgaggcgggccgggggtggggcggaagctataaggggcggcggcccggagcggcccagcaagcccagcagccccggggcggatggctccggccgcctggctccgcagcgcggccgcgcgcgccctcctgcccccgatgctgctgctgctgctccagccgccgccgctgctggcccgggctctgccgccggtgagtgcccgccactcgccggccgctcctcgctgagggggcgccgggcacgcgggctgggcccagcggc

SEQ ID NO: 28055 - DNA, 2300 bp, Homo sapien
accgagccctgcagtggggagtgaaaccaggcagcccagccctgtggctctgcctcttggctcttacagcgcgaagctagtgaaactaatgaaagtctgaaagcaatcatgattgaataatgcagggagtaaaacagtggcccactactgatgatttcacaccgttcaatctaatgaaattgcagctgtggctgggctcagcggctcatgcctgtaatcccaactcttttttttttttttgaggctggagtctcctgcctcagcctcccaagtagctgggactacaggcacccgccaccacgcccagctaattttttgtatttttagtagagacagggtttcaccatgttagccaggatggtctcgatctcctgacctcgtgatccgcccccctcggcctcccaaagtgctgggattacaggtgtgagccactgcgcccggccttgtaatcccaactctttaggaggccaaggcagggaggatcacttgaagccaggagtttgagaccagactggacaagacagcaagaccctgtctctacaaaaattctaaaataaataagctgggtgtggcatggcggtgtgcacctgtagccccagctacttgggaagtggagaggggaagatcccttgagcccaggagttcaaggttatagtgagctgattgcaccactgcactgcagcctgggcaacaaagggagaccctgcctctcttaaaaaaaaaaaaaatgcaactatgctattacgaagacacacatggggctggaaggtagggcaaggagacactggagagttgggaagggcagtgactgaagttgctttgttctgtatcctcacagtggtgggaaaccaaagtacagtcatccctcagtatccatgggaattggttccaggaccccctgcagataataaagtccacagatgctcaagtccattatataaaatggtgtcatacttgcatataacctacacacactttcctgtataccttaaatcatctctagattccttatactacctaatacaatgcaaatgttatataaatagttgttatactattgtttagggaacaatgatagggaaaaaagtccgtacatgttcagtacagaggtaaccatcccttatttatttatttatttatttatttatttacttattttattgagacagagtcttgctctgtcgtccaggctggagtgcagtggcatgatctgggctcactgcaagcaccgcctcctgggttcacgccattctcctgcctcagccttccgagtagctgggactacaggcgcccgccaccacgcctggctaattttttgtatttttagtagagacggggtttcatggtgttagccaggatggtctcgatctcccgacctcgtgatctgctggcctcagcctcccaaagtgctgggattacaggcatgagccactgcacccagcctatttatttactttattatttttttagacggaattttgctcttgtcacccaggctggagtgcaatggcactatctcagctcactgtaacctctgcctccacgttcaagtgattctcctgcctcagcctcccaagtagctgggattacaggcatgagccaccacacccaactaatttttgtatatttagtagagatgggttttcaccatgttggccagactggtctcaaacttctgacctcaggtgatccacacacctcggcctcccaaagaactgggattacaggcacgagccactgcgcccgtccgcatcctttttttaaacattgttttttctacccgaggttagttgagcctacggatgcagaaaccacagctatgtatggcaggctgggctgtggcatgagcagataaaccaccactctggaggatgaacagaggggacaagtaggaaagtggggagccagttaagaagccactgtagcaaaatgtgatgtagaaatggagcagaaggagccctgagcactgtgcccagccccaagggccagaggcttgggggtggtggacttcgaccctggctcccaggatagggctggacagtggccaggcctccccatcctggctgaacattcacaaaaggagaccaagcaggcaggtagaaaacaactgtgtttaatgacaatcctcagtttaaaaaaaaaaaaagaagaagaaggtttatacacactgtacacacatttacaatggctttggaggatagcagtgctgcgaaaagggcttcaggaggatccggcctgggacaggattgaggtatgttgcagcctccagggcctggggtctcctgcatgaagaatacccc

SEQ ID NO: 28056 - DNA, 2300 bp, Homo sapien
cttgaacgtggaggcagaggttacagtgagctgagatagtgccattgcactccagcctgggtgacaagagcaaaattccgtctaaaaaaataataaagtaaataaataggctgggtgcagtggctcatgcctgtaatcccagcactttgggaggctgaggccagcagatcacgaggtcgggagatcgagaccatcctggctaacaccatgaaaccccgtctctactaaaaatacaaaaaattagccaggcgtggtggcgggcgcctgtagtcccagctactcggaaggctgaggcaggagaatggcgtgaacccaggaggcggtgcttgcagtgagcccagatcatgccactgcactccagcctggacgacagagcaagactctgtctcaataaaataagtaaataaataaataaataaataaataaataagggatggttacctctgtactgaacatgtacggacttttttccctatcattgttccctaaacaatagtataacaactatttatataacatttgcattgtattaggtagtataaggaatctagagatgatttaaggtatacaggaaagtgtgtgtaggttatatgcaagtatgacaccattttatataatggacttgagcatctgtggactttattatctgcagggggtcctggaaccaattcccatggatactgagggatgactgtactttggtttcccaccactgtgaggatacagaacaaagcaacttcagtcactgcccttcccaactctccagtgtctccttgccctaccttccagccccatgtgtgtcttcgtaatagcatagttgcattttttttttttttaagagaggcagggtctccctttgttgcccaggctgcagtgcagtggtgcaatcagctcactataaccttgaactcctgggctcaagggatcttcccctctccacttcccaagtagctggggctacaggtgcacaccgccatgccacacccagcttatttattttagaatttttgtagagacagggtcttgctgtcttgtccagtctggtctcaaactcctggcttcaagtgatcctccctgccttggcctcctaaagagttgggattacaaggccgggcgcagtggctcacacctgtaatcccagcactttgggaggccgaggggggcggatcacgaggtcaggagatcgagaccatcctggctaacatggtgaaaccctgtctctactaaaaatacaaaaaattagctgggcgtggtggcgggtgcctgtagtcccagctacttgggaggctgaggcaggagactccagcctcaaaaaaaaaaaaaagagttgggattacaggcatgagccgctgagcccagccacagctgcaatttcattagattgaacggtgtgaaatcatcagtagtgggccactgttttactccctgcattattcaatcatgattgctttcagactttcattagtttcactagcttcgcgctgtaagagccaagaggcagagccacagggctgggctgcctggtttcactccccactgcagggctcggttaagcagagtgtaggctaagagaggaatggagaaggtggaaggtgtctctcccttccaacgctcatctgatgcaccagccaaaccaaataccacctgggcctttgaacattgccaagcctcatccgctgttgtcattttgcccacctccacagctgcagggacagccgtaggcccggaactgggatatctcttcctaggggcctgcctatctgctcagctgcactgcgttttaggggtggggaagctaaggcacgagattggggtcccaaagcatgcccagaccacccaggcttccagatactaggtcctcctccttcaggcctcacttcgttgcttttcccctgggctcagttccagtcctggctgtaagactgggaaagccactgcttgagtcaggacctcattggctatttttgtccgtgagaagtcctctacaccacgacttgggaggcagcctgggagaaagagaaattagtcgtggctcctttaaggggtccgcggaggcgcgcccggccttttgtttgagcggcggcgcgcgcgtcagcgtcaacgccagcgcctgcgcactgagggcggcctggtcgtcgtctgcggcggcggcggcggctgaggagcccggctgaggcgccagtacccggcccggtccgcatttcgccttccggcttcggtttccctcggcccagcacgccccggccccgccccagccctcctgatccctcgcagcccggctccggccgcccgcctctgc

SEQ ID NO: 28057 - DNA, 2300 bp, Homo sapien
cctgtcagggtggctgatgagagacaggagaggctagattggcatcagcctgaaggcaccactggcaggaacatctgtaggctggtttggcacaacctaggagacgcctgtcctggccccagcagccgaaatctggtgaacttccccgctgactggcaggtagcagaggcctatggtgggcaggacttgcccaaggccctggtggggccaggatgagaaccctgagcctgtcacctgtgagctcaaaagctctgcctggcaacctgtgagctcaaagctctgccaggcaaccatgggcagtttctttgccctctgtgggcacccctatcctaccacctgcagttgggctgagaggccacactgagtgaggacggggcaggcatagaaggatgtggccaggtgagatggggaagccagtgctgtgggccaagagactgcagctcattctgtttattcaggtgggcccttgcatgggcccagcctttaggatgggttttttctgccccaagtaggggtcatgggtaggatggaagctgccagaagcctcttaggcctggccctgggtgggggtcactgctgcgggggtggcagatggggtcctggctgttcctcagggaggggcaggtaattggggtcttctgcaggggcatccaggagcagctttctgtggggaggggcccgtgttgagcacaggccagcacaggtccccatcggtggggatccttctgagggtggggagagggagggagggctctcaacactcacaggaagccaggggtctgcaggagcctcttgcctccaggctggttggggaagacgtcctccaggaagtagtagatatggcccaccgcaatccctgtgagacagccacggactgtggggtcaccctccacagcccagagtcctagaccagcagagcctgccccaggcccccatccacagcctggtggccctgcaggccccacagcatgagtgccccaaagccttgcacagagtgccagccccgggttggccgtgaaggacaagcttaaaaggcccagaagcaggcaggacccagggaggggagggcctgagaatagtggaggagtgggagccatggggcaggaaccctgaccctcccatcctcactcccatcaggaccgtgcaagcatcagtagatccgtcctgacgatgcaaattatgtgggccggctggcttgaggggctgtaagagcacagcagctgggagggcaggaagatggggatggagccaggtgtgaggagaactccagcaaggatgggagaggggccccagggcataagcagcgtgtcctgaggggagtggccagcctggggcggactagatgtaccgggaggctcacccagcaggtccacgaggatggagttgcccagcagcagcgagaagcccatgagcgcccaaggcaggaacggtgcctggaaagtgagcaggccgaagaagttgaccctcacccgagggctgcggcggctccacacgtacaccagcatggccatgagggcctggcccaggaagaacaggctgcccaggagtcccagcagctgggccagagtcaaggtgctccggtgcaggcctcagcccaagcccagggcccctctgacttcccaagaccctggaattcttcccctcatctcccctatgtgctattccctcatcaagatgagccagtccaataaaggcgacacactccacgggcttcaggtcccacgaaatctgccctgcacacctacagcctcatcccagggcccaaccactgcctgtccctgccccagtttctcccggctactcgcattcagggctcagctagtggccctgacaacccacctggctcttttgtgcatggctttgtattttgcatacagcactgaagatctagccctgacccctgcagctgagcacagagtgggccctcaacacatactaagctggagacagcgactgtgtccctctctggcatggctgtgttggccccaggaccaacacaggctggacgccgaggcgccctagcccgaggttccagagcctgcgggaaggatacggtcataaggacgcccccgaagagaaacatgaagacgaagtcggccgtgcggccgcggaaggagccctcttccagcatgcggcagtagcggaacctacggcgtcggtataggaagtgccaccaggcggggcctcagtttccccgtcccggcctctctcccagcccggccggcctgccctccacccagcccgtgtccgcagggcgcaggatacacgaagagcatgttgaagaagaagctgaatcccag

SEQ ID NO: 28058 - DNA, 2300 bp, Homo sapien
cccgtctgtaggcaaacccatatcccacccctccttgtcctccaggttccacctcccagccccgaaagtaatcactgtcccttaaggattccccctgctcaaggattcctctggcagtccactaccctgacagcaaacacagaggtttgttgtttttttttaaattttagtaacatatacacaacataaaatttgtccaaactattttcaagtgttcagttcagtggtattaaacattcttatgcaaccctccccaccatccatctccagaactttttcattttcccaaactggaactgcactcattaaacaataactccctgatcccctctcatataagtggaaccatacagtatttgtctttttgtgactggtttttttttttttgagacggagtctcactctgttgcccaggctggagtgcagtggtgcaatctcggctcaccacaacctccatctcccggattcaagcaattctcctgcctcagcctcccgaatagccaggattacaggtgcccgccaccacgcccagctaatttttgtatttttagtagagacgaggtttcaccatgttggccaggctggtctcgaactcctgacctcaggtgatccacccgcctcggcctcccaaagtgctgggattacaggtgtgagccactgcgcccagccttgtgactggtttatgttactgggtgtaatgtcttcaagggtcatccatgctgcatcatgtatccgaatttcattcctttaaggttgaatggtattgcattgcatgtagacagcacatttcgtctgtctcatcggtgggtgaactgatgtgaaccattgtgaataatggggccatgaacatgggtgtatgaacatctgttcaagtccctgcttttgattcttttgaatgtgtacccacaagcagcattgctggatcatacggtaattctatttttaattttttgagtcatgatcatattgtttttcacagcggatgcaccattttatattcccaccaacggtgcccaagggttccaatttccccatatcctcgccaacacttattttgttttattgttttgcttttcacagttaccatcctgatggacacagggatgcttgcaaagtgacaaactttagaggtatcccaggtcaccccacctggcactgcggacgcccacgtggccccacccctcacttggcaatattctcatcaagtgtcagcactagcttattgtattgactgcctcctggctggactctaagagacagtgtcttttattgcatgctacatccccaacatctagaacagtgtcaggcaaacagttgtttaataaacggtggaaggaaggaagggagggagggagggagggaaggagggaaggaaggtgggtaggttggtttctattttccaccaaaatattgaggacctctcctgcctgtccacttgctctggtgcgcctctcaaccctcgcgccccacctggactcaatcccgcagtcctgcctctccttccttgggcccccggggaagaaccccgacagcggccggcacatttgagtggggccctggacgtttggggaggtttggacacattcccgaatgcctccctgctgtgggttaggtgggcctgtcttgggctggcagcgaggacaacgttgtggctaggtcgtcagttagtgagccagcacggtctgagccgccacactccgcgccccgcccacgcgccccgccctttccagttttgcctcgcctgctcgggtcttcgctcctgtaacccatacgatcttagccccgcccccgtggtgtcgtgggtccacgctactggtcctctcctagaaagccgcgaaatgaccagttcctcattggccacacgttctcccgcgccaccaccgcagccacaacaaccgccacgtgctcaaccttggcgcctgcccattggccaccagcctctacccgcccactctccctttccgcccctaatttccctcttcttccttccattggctgtcgggctcaggggctctcttttcagcctggggcgcgcagcgcctcggatgcggattggccgaaggcggggctgggaggcgggttaaagagcgcgttgctggctgggccacgcgtgcttgagaaggttcaatggcgtggcagggactagcggccgagttcctgcaggtgccggcggtgacgcgggcttacaccgcagcctgtgtcctcaccaccgccgcggtggtaagcggccgggcggaccggacgtcgccttggttacagcctctggcgggaggggtgagggtcgccatggttacggcgtg

SEQ ID NO: 28059 - DNA, 2300 bp, Homo sapien
ccctctgcccggccagacgccccgtccaggagggaggtgggggggtcagccccccgcccggccagccgcccagtccgggagggaggtggggggtcagccccccgcccggccagccgccccgtctgggagggaggtggggggatcagccccccgcctggccagccgccccatccgggaggtgaggggcgcctctgcccggccgcccctactgggaagtgaggagcccctctgcccggccagccgccccgcccgggagggaggtgggggggtcatccccccacctggccagccgccccatccgggagggaggtgggggggtcagccccctgcccggccagccgccccgtccgggaggggggagggggggtcagccccctgcccggccagccgccccgtccgggagggaggtggggggggtcagccccccgcctggccagccgccccgtccgggagggaggtggggggatcagccccccgcctggccagtcgccccgtccgggaggtgaggggcgcctctgcccggccgcccctactggaaagtgaggagcccctctgcccggccagccgccccgtccgggagggaggcggggtgggggggggggggtcggccagccgccccgtccgggagggaggtggggggggtcagccccccttccggccggccgccccgtccgggaggtgaggggcgcctctgcccggccgcccctactgggaagtgaggacccctctgcccggccagccgccccgtccgggagggaggtgggggggacagccccccgcccagccagccgccctatccaggaggtgaggggcgcctctgcccggccgtccctactgggaagtgaggagcccctctgcctggccagccgccccgtccgggagggtggtgggggggtcagccccccgcccggccagccgccccatccgggaggtgaggggcgcttctgcccggccgcccctactgggaagtgaggagcccctctgcccggccacgaccccgtctgggaggtgtgcccagcggctcattggggatgggccatgatgacaatggcggttttgtggaatagaaaggcgggaagggtggggaaaaaattgagaaatcggatggttgccgggtctctgtggatagaagtagacatgggagacttttcattttgttctgtactaagaaaaattcttctgccttgggatcctgttgatctgtgaccttatccccaaccctgtgctctctgaaacatgtgctgtgtccactcagggttaaatggattaagggcggtgcaagatgtgctttgttaaacagatgcttgaaggcagcatgctcgttaagagtcatcaccactccctaatcttaagtacccagggacacaaacactgcggaaggccaaggccgcagggtcctctgcctaggaaaaccagagacctttgttcacttgtttatctgctgaccttccctccactattgtcctatgaccctgccaaatccccctctgcgagaaacacccaagaatgatcaataaaaaaaaaataaataaattaaaaaaaaaaaagaaaaaaattaacctatcaaaataaaatatcagcagttgaaactaacaatgtattaataacaataatattatgaccaagttgcgtctaccccaagaattcaagaatggtttaccattagaaagtttattgatgtaactgatctcattaacagattaaaggagaatacccatatgatcatcttaatagatgcacgaaaagcatgcaataaaatacctatttattataactgctaatattttgtgtttttccttaaaaatgcagtgtttttaggaattaaagttcagagcagcaaaagtcaaacaaaaaccaagtctgagcaatagagctactacagtgcccatcacagtgtctgctcaggtgacttcttaaggtcatgtccagctctatgtttctgtgaccacaaatagcatctttggcaagtctagtttcagttggtctttgtccagctcctggattcctccatgcagggcctgagaagccctgagggataaaagattaatccggttcagtggactctgtggttcctcaactccaagtgcccccagcataagtcggacctgcctctcacgcaatggatcccctggcggcaacccgagaccggttctcctacccgcattccgccaagtctctcgctctgcccaggacgcacagatgagagcgctccgaagactggtgggtctatctttcggtctttcctaattttcccgtcctctggggaaaggtcggggatacctgaaccaaagtgtgtgtgt

SEQ ID NO: 28060 - DNA, 2300 bp, Homo sapien
cccggccagccgccccgtccgggagggaggcggggtgggggggggggggtcggccagccgccccgtccgggagggaggtggggggggtcagccccccttccggccggccgccccgtccgggaggtgaggggcgcctctgcccggccgcccctactgggaagtgaggacccctctgcccggccagccgccccgtccgggagggaggtgggggggacagccccccgcccagccagccgccctatccaggaggtgaggggcgcctctgcccggccgtccctactgggaagtgaggagcccctctgcctggccagccgccccgtccgggagggtggtgggggggtcagccccccgcccggccagccgccccatccgggaggtgaggggcgcttctgcccggccgcccctactgggaagtgaggagcccctctgcccggccacgaccccgtctgggaggtgtgcccagcggctcattggggatgggccatgatgacaatggcggttttgtggaatagaaaggcgggaagggtggggaaaaaattgagaaatcggatggttgccgggtctctgtggatagaagtagacatgggagacttttcattttgttctgtactaagaaaaattcttctgccttgggatcctgttgatctgtgaccttatccccaaccctgtgctctctgaaacatgtgctgtgtccactcagggttaaatggattaagggcggtgcaagatgtgctttgttaaacagatgcttgaaggcagcatgctcgttaagagtcatcaccactccctaatcttaagtacccagggacacaaacactgcggaaggccaaggccgcagggtcctctgcctaggaaaaccagagacctttgttcacttgtttatctgctgaccttccctccactattgtcctatgaccctgccaaatccccctctgcgagaaacacccaagaatgatcaataaaaaaaaaataaataaattaaaaaaaaaaaagaaaaaaattaacctatcaaaataaaatatcagcagttgaaactaacaatgtattaataacaataatattatgaccaagttgcgtctaccccaagaattcaagaatggtttaccattagaaagtttattgatgtaactgatctcattaacagattaaaggagaatacccatatgatcatcttaatagatgcacgaaaagcatgcaataaaatacctatttattataactgctaatattttgtgtttttccttaaaaatgcagtgtttttaggaattaaagttcagagcagcaaaagtcaaacaaaaaccaagtctgagcaatagagctactacagtgcccatcacagtgtctgctcaggtgacttcttaaggtcatgtccagctctatgtttctgtgaccacaaatagcatctttggcaagtctagtttcagttggtctttgtccagctcctggattcctccatgcagggcctgagaagccctgagggataaaagattaatccggttcagtggactctgtggttcctcaactccaagtgcccccagcataagtcggacctgcctctcacgcaatggatcccctggcggcaacccgagaccggttctcctacccgcattccgccaagtctctcgctctgcccaggacgcacagatgagagcgctccgaagactggtgggtctatctttcggtctttcctaattttcccgtcctctggggaaaggtcggggatacctgaaccaaagtgtgtgtgtgtgggggggggggggtgtaggtggggcgtgcatagatgtgcacaaccaagggcttggccctccggagaacgcccaggggcagtggcctccgaggttctggcggccggcagtggcgaccggcgcagggaatcgcgcagggttgcggctgaggtcagaccagcgagagacagagacccgcagacatttagtccagagactgtagcaaaggagggggacgaggggccagagccggaatttcgggggaggacttgggagcgcggcgaccagagtcgcttgctggcacttgcgagggcgaatgcaggggcttggccgagatgaccttggaccagagctcccttccggcctgcagagatgagcttggggcttagccgagtaaggagtgagcggcttttcagcctcagtgctgcggcagaggcggatggaggatgaactggagccgtccttacggcctcggacgcaggtgagctcccagcggcggcgacaaaccccgcggcggtgaccccaaaccccccccccgcggcggcgactcccccccaacacgctggggcgaactcc

SEQ ID NO: 28061 - DNA, 2300 bp, Homo sapien
attgagaaatcggatggttgccgggtctctgtggatagaagtagacatgggagacttttcattttgttctgtactaagaaaaattcttctgccttgggatcctgttgatctgtgaccttatccccaaccctgtgctctctgaaacatgtgctgtgtccactcagggttaaatggattaagggcggtgcaagatgtgctttgttaaacagatgcttgaaggcagcatgctcgttaagagtcatcaccactccctaatcttaagtacccagggacacaaacactgcggaaggccaaggccgcagggtcctctgcctaggaaaaccagagacctttgttcacttgtttatctgctgaccttccctccactattgtcctatgaccctgccaaatccccctctgcgagaaacacccaagaatgatcaataaaaaaaaaataaataaattaaaaaaaaaaaagaaaaaaattaacctatcaaaataaaatatcagcagttgaaactaacaatgtattaataacaataatattatgaccaagttgcgtctaccccaagaattcaagaatggtttaccattagaaagtttattgatgtaactgatctcattaacagattaaaggagaatacccatatgatcatcttaatagatgcacgaaaagcatgcaataaaatacctatttattataactgctaatattttgtgtttttccttaaaaatgcagtgtttttaggaattaaagttcagagcagcaaaagtcaaacaaaaaccaagtctgagcaatagagctactacagtgcccatcacagtgtctgctcaggtgacttcttaaggtcatgtccagctctatgtttctgtgaccacaaatagcatctttggcaagtctagtttcagttggtctttgtccagctcctggattcctccatgcagggcctgagaagccctgagggataaaagattaatccggttcagtggactctgtggttcctcaactccaagtgcccccagcataagtcggacctgcctctcacgcaatggatcccctggcggcaacccgagaccggttctcctacccgcattccgccaagtctctcgctctgcccaggacgcacagatgagagcgctccgaagactggtgggtctatctttcggtctttcctaattttcccgtcctctggggaaaggtcggggatacctgaaccaaagtgtgtgtgtgtgggggggggggggtgtaggtggggcgtgcatagatgtgcacaaccaagggcttggccctccggagaacgcccaggggcagtggcctccgaggttctggcggccggcagtggcgaccggcgcagggaatcgcgcagggttgcggctgaggtcagaccagcgagagacagagacccgcagacatttagtccagagactgtagcaaaggagggggacgaggggccagagccggaatttcgggggaggacttgggagcgcggcgaccagagtcgcttgctggcacttgcgagggcgaatgcaggggcttggccgagatgaccttggaccagagctcccttccggcctgcagagatgagcttggggcttagccgagtaaggagtgagcggcttttcagcctcagtgctgcggcagaggcggatggaggatgaactggagccgtccttacggcctcggacgcaggtgagctcccagcggcggcgacaaaccccgcggcggtgaccccaaaccccccccccgcggcggcgactcccccccaacacgctggggcgaactccccagcacccccagcccttcttaaaaacgctgagtccgcgcatgcgcctcaggcgccctccgcgacactctagcggctctgcgcttcactgcgcctgagcttgagtctcaggccttagtcccggccatcgtttagcgttgcgcgaaccctcagctggtgcggccgctctcaatacccactgcgcttgcgctacagcttcgtctcgacgggtttgctcctctcaaacgctcactgcgcgtgcgctagcgcctctttcaccactgggcgctgcgcgctgcccttccctccgcgcacaggctgccggctcaccgcttgctaatggcagccggggtctccctgggacagcaagacctccgctcaggcccctctttcgaatgctccacgccctcctgcgatctagaatggtatgaattctcatacttgcccagaccaggcgtttcagatgagggattgcggacctgagtgaactgcgcaggtgcagccacctgggaggcttaactaagtcgtcaaatgttcaaaaatatcgtgcttgtatgt

SEQ ID NO: 28062 - DNA, 2300 bp, Homo sapien
agggcttactgcctctgaggtcagggctgatcggcagaggatttagcatctctgggggctgggatgccagggtccagcaaccttgctctggcccacaggccgaccctgggcgtaaacacctgcctatgcacatctgagcctagcacctaacgccactgtacatacaagcacgatatttttgaacatttgacgacttagttaagcctcccaggtggctgcacctgcgcagttcactcaggtccgcaatccctcatctgaaacgcctggtctgggcaagtatgagaattcataccattctagatcgcaggagggcgtggagcattcgaaagaggggcctgagcggaggtcttgctgtcccagggagaccccggctgccattagcaagcggtgagccggcagcctgtgcgcggagggaagggcagcgcgcagcgcccagtggtgaaagaggcgctagcgcacgcgcagtgagcgtttgagaggagcaaacccgtcgagacgaagctgtagcgcaagcgcagtgggtattgagagcggccgcaccagctgagggttcgcgcaacgctaaacgatggccgggactaaggcctgagactcaagctcaggcgcagtgaagcgcagagccgctagagtgtcgcggagggcgcctgaggcgcatgcgcggactcagcgtttttaagaagggctgggggtgctggggagttcgccccagcgtgttgggggggagtcgccgccgcggggggggggtttggggtcaccgccgcggggtttgtcgccgccgctgggagctcacctgcgtccgaggccgtaaggacggctccagttcatcctccatccgcctctgccgcagcactgaggctgaaaagccgctcactccttactcggctaagccccaagctcatctctgcaggccggaagggagctctggtccaaggtcatctcggccaagcccctgcattcgccctcgcaagtgccagcaagcgactctggtcgccgcgctcccaagtcctcccccgaaattccggctctggcccctcgtccccctcctttgctacagtctctggactaaatgtctgcgggtctctgtctctcgctggtctgacctcagccgcaaccctgcgcgattccctgcgccggtcgccactgccggccgccagaacctcggaggccactgcccctgggcgttctccggagggccaagcccttggttgtgcacatctatgcacgccccacctacacccccccccccccacacacacacactttggttcaggtatccccgacctttccccagaggacgggaaaattaggaaagaccgaaagatagacccaccagtcttcggagcgctctcatctgtgcgtcctgggcagagcgagagacttggcggaatgcgggtaggagaaccggtctcgggttgccgccaggggatccattgcgtgagaggcaggtccgacttatgctgggggcacttggagttgaggaaccacagagtccactgaaccggattaatcttttatccctcagggcttctcaggccctgcatggaggaatccaggagctggacaaagaccaactgaaactagacttgccaaagatgctatttgtggtcacagaaacatagagctggacatgaccttaagaagtcacctgagcagacactgtgatgggcactgtagtagctctattgctcagacttggtttttgtttgacttttgctgctctgaactttaattcctaaaaacactgcatttttaaggaaaaacacaaaatattagcagttataataaataggtattttattgcatgcttttcgtgcatctattaagatgatcatatgggtattctcctttaatctgttaatgagatcagttacatcaataaactttctaatggtaaaccattcttgaattcttggggtagacgcaacttggtcataatattattgttattaatacattgttagtttcaactgctgatattttattttgataggttaatttttttcttttttttttttaatttatttattttttttttattgatcattcttgggtgtttctcgcagagggggatttggcagggtcataggacaatagtggagggaaggtcagcagataaacaagtgaacaaaggtctctggttttcctaggcagaggaccctgcggccttggccttccgcagtgtttgtgtccctgggtacttaagattagggagtggtgatgactcttaacgagcatgctgccttcaagcatctgtttaacaaagcacatcttgcaccgcccttaatccatttaaccctgag

SEQ ID NO: 28063 - DNA, 2300 bp, Homo sapien
gcccccagcataagtcggacctgcctctcacgcaatggatcccctggcggcaacccgagaccggttctcctacccgcattccgccaagtctctcgctctgcccaggacgcacagatgagagcgctccgaagactggtgggtctatctttcggtctttcctaattttcccgtcctctggggaaaggtcggggatacctgaaccaaagtgtgtgtgtgtgggggggggggggtgtaggtggggcgtgcatagatgtgcacaaccaagggcttggccctccggagaacgcccaggggcagtggcctccgaggttctggcggccggcagtggcgaccggcgcagggaatcgcgcagggttgcggctgaggtcagaccagcgagagacagagacccgcagacatttagtccagagactgtagcaaaggagggggacgaggggccagagccggaatttcgggggaggacttgggagcgcggcgaccagagtcgcttgctggcacttgcgagggcgaatgcaggggcttggccgagatgaccttggaccagagctcccttccggcctgcagagatgagcttggggcttagccgagtaaggagtgagcggcttttcagcctcagtgctgcggcagaggcggatggaggatgaactggagccgtccttacggcctcggacgcaggtgagctcccagcggcggcgacaaaccccgcggcggtgaccccaaaccccccccccgcggcggcgactcccccccaacacgctggggcgaactccccagcacccccagcccttcttaaaaacgctgagtccgcgcatgcgcctcaggcgccctccgcgacactctagcggctctgcgcttcactgcgcctgagcttgagtctcaggccttagtcccggccatcgtttagcgttgcgcgaaccctcagctggtgcggccgctctcaatacccactgcgcttgcgctacagcttcgtctcgacgggtttgctcctctcaaacgctcactgcgcgtgcgctagcgcctctttcaccactgggcgctgcgcgctgcccttccctccgcgcacaggctgccggctcaccgcttgctaatggcagccggggtctccctgggacagcaagacctccgctcaggcccctctttcgaatgctccacgccctcctgcgatctagaatggtatgaattctcatacttgcccagaccaggcgtttcagatgagggattgcggacctgagtgaactgcgcaggtgcagccacctgggaggcttaactaagtcgtcaaatgttcaaaaatatcgtgcttgtatgtacagtggcgttaggtgctaggctcagatgtgcataggcaggtgtttacgcccagggtcggcctgtgggccagagcaaggttgctggaccctggcatcccagcccccagagatgctaaatcctctgccgatcagccctgacctcagaggcagtaagccctccgagcgctgcaatcctgactgctcgccccctcccgagactgtttcccacccccgcctctttcctcctcatgctccctcagctctgacctgacgtcctgcctcacagagggaaagggcgcagccagaggagagcgcccgcactgcactgcccaccgcttctaggggttccttcccaatctggactgatttctttaggtatttgcatggcacattccctcacctcctttgtcttgatttgcacttgtattccttgacagccttatttaaaatagcaccaactaaggtgggaggatcgcccaggagttcgaagctgcagggatctaataggatctcaccactgcactccagcgtgggcgacgtagcgagaccttgtctctaaaaaataaaaataaaataaaataaaataaaatagcaccacctggtccaaacacttcctacgccccttcactgctttaagtctctgtagcaccagctgatgtactatatattttgcttgttcattttgcgattgcttgtctttctctgctggaaggaaagctctgacagctcatggattttgtctgttgttcactgctgtatcccaacacctagaacagtaggattattgaccataatagggaggcaataaatctttgtttgctgaattaatggtccctatcgtagctaatgtctgaatgcttaccatgaccaggcacggtataggcaatctccatgcatgatctcattgaattcaacgatttcctgtagtcttagagacctgtcaatatctcctgctacatgagctcagctgccatcaagcactgtgttcgctgcttccttcacatctgctgtctt

SEQ ID NO: 28064 - DNA, 2300 bp, Homo sapien
atgcatctaacagcaaccagttcatgctttcaacatttggagttttctttgctcaagtccataagttcactgagcccattttctttcttccgtgttactgcactatataacatagcttttcatttctccagcctcatcgccgtcctctgcctcgtcttggaactgataccatatttcacaggtctttgttacggtagcaccaactcctggtgccaatttattgatcagctttctattgctgactaatagatgatcataacatctcggtggtaaagaaacaaaaaaagcaattatttagcctaagcctctaagtcctctgggctgggctgatctaggatggttctggctgatggctctgctgatcttggtcattcctgcaactgcagctcagctgggcattggctggctgatctagaatagtcccagtgagggtggcttagctgggcccctttggctgtccatgtcttgtcatcctcctggctagcctggaatgttctcatgaaggcagaagagcaagtagaagtgagcaaggcctcttaaggcttaggctggaacatggtacgccctcactgcagcctcatcctattggccgagcccagagccaggagcagggatgtaggcagtacttgcccctttagtgggaggaactgcaaaatcacacagcaagcagtgtgggtgcagggaggggtgaagaattgggtttgataatgtgctgcaatagtcatgtcctgtctgatatgtccgcagaaccctgcgtttctttctaaagccttttttcatccatggtggcaacaccgcaacagccctgagaaatgtcagggcaaggaagatcatctccatctgaccagggaggcaaacagagacagagagattgagagagacagaggcagagagagagaaacacacacacacacagacagacacagagacagagagattgagagagacagaggcagagagagagagaaacacacacacacacagacacagagacagagagattgagagagacagaggcagagagagagaaacacacacacacacagacacagagacagagagattgagagagacagaggcagagagagagagaaacacacacacacacacacacacagagacagagagattgagagagacagaggcagagagagagagaaacacacacacagacacagagacagagagattgagaggcagagagagaaacacacacacacacagagacacacacagagacagagagattgagaaagacaggcagagagagagagaaacacacacacacagacacagagacagagagattgagagagacagaggcagagagagagagaaacacacacacacacacagacacagagacagagagattgagaggcagagagagaaacacacacacacacagagacacacacagagacagagagattgagagagacagaggcagagagagagacacacacacacacagacagactcagagacagagagtgagccaagaaggaaaggaatggtgggatggaggggggcgtccctgtagggggaccaaagaggggcttggggacggggagctcagtaccctcctccctggctcagcactacggcggctccggggctccggggacttggcaggggagctggaggagctggaggaggagcgcgctgcctgccagggctgccgtgcccggcgcccatgggagctgttccagcatcgggccctgaggagacaggtgacaagcctcgtggttctgggcagtgccatggagctctgcgggaatgactcggtgagacccctgccccgccgcacaccctgggccccgggggcttggtgttgcaggccgctgggagccatgggaggtggaagggagcccaggcctgaaagccaccctctcccaggtgtacgcctacgcctcctccgtgttccggaaggcaggagtgccggaagcgaagatccagtacgcgatcatcgggactgggagctgcgagctgctcacggcggttgttagtgtgagtctggagggtgcccttcctccaccagccctgtggggagggacccccaggtcctctgcattaaaccagtttacactccagcttatggtgttaaaatgcagtgaggggccaggtgcggtggctcatgcctgtaagcccagcactttgggaggccgaggtgggtggatcacaaggtcaggagttcgagaccagcctggccaacacagtgaaacccccgtctctactaaaaaatacaaaaaattatcccggcgtggtggcgggcgcctgtaatcccaggtacttgggag

SEQ ID NO: 28065 - DNA, 2300 bp, Homo sapien
ccctcccaggagccctgtgtgtggtcactctgcccctctgtgtccatccaccctgatcctgcctctgttgacctgctccccagcttacctttgtgctccaaatggcttccctggccgccctggctgcagacctccaacgtggagtcatgagtaagaatccattgacaagcacccctgagatcctggggtacgtgccacgagcagagcaggcatcaggtgacacccaggtcccggcctgcctcggacacacatggtgccccggtccccagcctgagccctgccctctcactcaccacccacccagccggaattggctctggccactctgggagggcggggtgggggttgcaagtcccttgttacgcagggagcccctcagttagggagaggagacagggtctcaggacaggaccttgaagacaaggaagggcagtgcagagaggggtgagagagccagactgggtttctagggggtggtccagggtgggagctgacctgcctctgctgagactgcgttccaggtgtgagcattgatgtctagcccatgtagctggagaggagtcacagccatgctccccagctccagcccacctccccagaccccagacccagtgtggcctctccccacctcccagagcatgtggtcaagcccctctcctagcccgaatccctccctcatttgctaattaccaggacctacatgtcccagcttcccagggccaggggacagggccccgcccatctggcaggctcaagttggctgcctggctgccgggatccaggcggcgctcacaaggatctgggcttgcacagcctccaaagggctgttgtccattctcttgtatttgttctcatcctctcctttcttggaccctctgagtctctggttccctcttgttgggacccagatcactctgtgcctcagctgaatcatttttcccttcagtttacacatatccacctagggtccactacatccagaggcttccgcctcagtccttgtcctcaggctgtgcccagggttgtgaggatggcggtggtccttaccttgcaaaacagtctcccagtgacaacaatgttcagggataacatctatggagggctttctatgtatcaggaccattctgagtatcttccaagtgttagctcctttaatcctggaaaggaccccatgaaattagtacttttattacccctgttgtacatatgagagactgagtaaaagccggtggcttgtccagggtcacacagctaactggaatggccaggagtagacctggtgaccatggaccccagaccttgatcactgcacacgctgcgtctgggacctcgcctggtacctgaggtccgtggcgcgctggtgctgatcattcagagtgctcatgggaagtgtagtctagagtctgtgtgcttcctgatctccttgatctccattttattgaggaggcctttaggccacccgaggggtccagagtgaccctgtggattagcagtggagctcagcttgagccagcgctcttcaggggtcgtgttctgcccccattctctggttcattctgcaggtagcagggaatcattgaagattagagagaatcaaacacctggagagagatgactctgcccggggagcccaggctcctgtctgggtgcacactccagggctagatggtgacttctcagctactctagcttcataggctcatagtgcatgtgagcactcatgtggacacacgtgcacgcgcacacacatggacacacacacacacacacacaccgctgtctttggaatcagaccatgaaaatgcttcctcagaggcctaggggtgaggaagctgaggtgagttgtgcctccagctggatgtgctgggatggggtgggagatgaggtggccacacctgggtggcaggaactctggggcagtgaaccttctaacgaacagatctgggatgctgccatgaggaggaagagggagtcagcagccatgcctgccaatgcctcctagcgcatttgtccatggttagcggataattattgtgtccctatgggtcccaaggtgtattattttttttttgctcttataataaatcaacacaaatttttagcagcttcaaacaacacgcatttattatctcacagtttctgtgggtcagtagtccggcgtgacatgactaggtcttctgtgtaaggactcgcatggccaaagtcaaggtatctgaagggacaagggaaaaatccacttccaagttcaatctggttgtgagcagaattcagttccttgtggttgtaccatgaggtctctg

SEQ ID NO: 28066 - DNA, 2300 bp, Homo sapien
tgacaagtggctcagaggctgtcctggctataagaattaaagaggaaagaaacaccaagggtggctcgacagtcaacaaggacaggtttattttggaaaacaaacttgagaggggcttctggccaagttaggtcagagccacactctcttacaaactaaggatatttaagggttttggagggggttcttatcataggttctgaatgtttctgtgtgagggaaagtttattgcggggatggaatgtctctggtcagaagggaggctgtctccgggttggcatgtttctggtcagagaagggtttatcttagggttggaatgtttctggttatgctgacattagctattaggctgatattttcgggctggatttaggcggcttttaattaagggggaacttagaatggtggtgtttgttcaagatggcaatgctcctgctccgtcactggccaggtaaggcaaccctttgttatggtaacaacctgagattggcaggggctcacctccaggggcagctcatgtgcttgctggcgaggctgcaccttgtcattcaggttcacagggcacaggtcaaccaggccctggctcttcagtcttctgcctggagtgacttatgtaattctgctcagctttcatagggcacagggagtcggggctaactctgctgcctggggctggaaacagactcctcccttgaggagcagcagtccaccatagggaagtcacagtggtccaggccaaaggggatgcaggtagtgtagactaggcggtagttcagggaatggagagaagtgggaataaagggatagtgaaaggaagcatattttactggcaggtgatgaggtgtaggaggacaagtcatacatttggactttacagagcagtggacactcagtcagctgctgtcagcgcctgggacttaggggagtgcccctggctggagacatggtatggagtgccatcagttagggagccctgggcacaggtaagagaaggtgtgacaccaggagggaaagagtctggggcccagctgcaggaaccaatacccataggctatttgtataaatgggccatggggcctcccagctggaggctggctggtgccacgagggtcccacaggcatgggtgtccttcctatatcacatggccttcactgagactggtatatggattgcacctatcagagaccaaggacaggacctccctggaaatctctgaggacctggcctgtgatccagttgctgccttgtcctcttcctgctatgtcatggcttatcttctttcacccattcattcattcattcattcagcagtattagtcaatgtctcttgtatgcctggcacctgctagatggtccccgagtttaccattagtggaaaagacatttaagaaattcaccaagggctctatgagaggccatacacggtggacctgactagggtgtggcttccctgaggagctgaagttgcccagaggcccagagaaggggagctgagcacgtttgaaccactgaacctgctctggacctcgcctccttcccttcggtgcctcccagcatcctatcctctttaaagagcaggggttcagggaagttccctggatggtgattcgcaggggcagctcccctctcacctgccgcgatgactaccccgccccatctcaaacacacaagctcacgcatgcgggactggagcccttgaggacatgtggcccaaagacaggaggtacaggggctcagtgcgtgcagtggaatgaactgggcttcatctctggaagggtaaggggccatcttccgggttcaccgccgcatccccacccccggcacagcgcctcctggcgactaacatcggtgacttagtgaaaggactaagaaagacccgaggcgaggccggaacaggccgatttctagccgccaagtggagaacaggttggagcggtgcgccgggcttagcggcggttgctggaggaacgggcggagtcgcccagggtcctgccctgcgggggtcgagccgaggcaggcggtgacttccccactcggggcggagccgcagcctcgcgggggcggggcctggcgccggcggtggcgtcacaaaaggcgggaccacagtggtgtccgagaagtcaggcacgtagctcagcggcggccgcggcgcgtgcgtctgtgcctctgcgcgggtctcctggtccttctgccatcatgccgatgttcatcgtaaacaccaacgtgccccgcgcctccgtgccggacgggttcctctccgagctcacccagcagctggcgcaggccaccggcaagccc

SEQ ID NO: 28067 - DNA, 2300 bp, Homo sapien
tgtccatgtgtgtggagaggtctgtttctggattgctcttttttccattggtctgttgtctgccatgttctgattccactttgccttaattgtgtagcttgatcatgtgtcttaacattgaaaaagcaaatcctcacaccttgccttctacaagaaaatgttttgactcttcttggtcatttagagtctcatataaatgttagaattaggttgtcaattcccatagaaaaatctgttagaattttgattgggactgtgctgaatcatcaaccagacagaactgttacgagcacaatattgcctccagtacagagatgctgagaccaactcgatcggggagaccctaacccagcggcgctagaggaattaaagacacacacacagaaatatagaggtgtgaagtgggaaatcaggggtctcacagccttcagagctgagagccccaaacagagatttacccacgtatttattaacagcaagccagtcattagcattgatagatattagattaactaaaagtataccttatgggaaacaaagggatgggctaaaataaagggatgggttgggctagttatctgcagcaggaacatgtccttaaggcacagatcactcatgctattgtttgtagtttaagaatgcctttaagcagttttccgccctgggtgggccaggtgttccttgccctcattctggtaaaccgacaaccttccagcatgggtgttatggccatcatgaacatgtcacagtgctgcagagatattgtttatggccggttttggggccagtttatggccagattttggggggcctgttcccaacacagagacatggtcagtctcttcatttatttagttctccaataacgttcagggtgttagttttctctgtagaggttctctgtagagtacatcttggatttgtttctaggtacaggaaactttttaaaaatatattttatatagaccagggtctcaccacgttgctcaggctggtcttgaactcctggccttggcatcccaaagtgctgggattacagatgtgagctactgcacccagccaggaaatgtattttctattgctctcccacaactcccaccacatcttctccatctgcatgaaatcatattctctgtatggtatctgtaaagtcatatcttattctgagaaatgtccatttctgcatcaatactcatcgcatgtattctaaatatactttgtcttgtttgtcttgtatataggttattgtagttacttgacctgtgccgaaatgttaaatgtgtgtaagttcatgtccttcattctggctttttattcactaatagtcatcagcatccttactgtcaatacaagagatgctccttctcaatattttgatatggtagtacaaggattccaaaggaggaaccttcttttttagcagctgtgttttttgttttggttggcaattcactaaggactcatctcatcatgttatgagggagacattcttggaagcatggctccttttccgactcttctcagcacacagctgtcacccatgctttgctgtgagatggggtgccctacagatggatggggtttacaggcttaaggttactgatgtcttttcataagacattattgccttgtttgtttgttcttcagaaaacaaattctagggagccggggttaatctgttccatagtctgaatgtgttactgaaacaccaggggttttgtctgggtcccattgcatgctgcacagccaatcactgccgggaggaagggctttattcaggtgctgcagccaaggagaatgggagataagtcttgaatccatctccctgaccggccaaaattggagggttatataacagtggaagggatgtagctatgtttgggaaggagttagggaggggtaagaacgcagccatgatgaacgagggatccagtgtctccctgtctggatgcagtgatctagtgaatttgagaaaggattaccctgtggagggaggcaacaggagggagccttctctctggagcccctgggcatgctttgaatttgagccatataaatctattacctattaaactgagaagagaactaggtacgcaagaagccaagtcactggggcggtggggacgatacttctcatttgtagcctttcaatttggtgctctgtctggctgttttgagagctaaactgtaagttgagaccccatagtcaccagatgaggcctgaggttccaggactgaagggacagagtcggtttctgaaactgacaatctctgtttcttttacatgggcttcaaacata

SEQ ID NO: 28068 - DNA, 2300 bp, Homo sapien
gcctctgcatttccaacaagctccctggtgatgctgatactcccagtccattgaccacactttggataggaagagtctacacttgctctactcaacttctctccattctgtcctcaaacacaccacgcttccttccccaccagctggagggggctctgctcccaggccccagaggtcaaggcagacacagttaaggtgtggaaacctccttattgcccgatggatcctccagagaggcggtcccttactttcagcagggcgcgtgtctacctgtttcatgctgtctcacacacagggtgccacccctgtgctgggcactgggtaagtgctctgtacatattaattaggagtactcatttcaaaaatatgtgtgcctttgataaataaaaacagtatgtgcatgttgtgttggtgtgtgcttccttgattattactgaagttaaacatgttttcatccatgtattgaccatttctctttgtccttcaatgaaacctctgctgatttccttcgctcatttttttcctgtgtcttcgtctgatgagtttctcttctttttgtttgttcgtttgtttgttttgagacagtctcgctcagtggcccggctggagtgcagtggtatgatctcagctcactgaaacctctgcctccaaggttcaagtgattctcctgtctcagcctcccgagtgtgccaccgcacccagctaatttttgtatttttagtagagacggggcttcaccgtgttgcccaggctggtctcaaactcctgacctcaactgatccgcccatctctgcctcccaaagtacagggattacaggcgtgaaccaccacaccccacctgtctgatgggtttctaagaacatcttaaaggacattacttccttctgacgtatcttttaccgagatccttcccagttttttgcttaaggttaatccattttttcctccacaaagtaaccttgtatatgtattggttttttctttgttgagttctcccactgttctgaggcttagaaagtcctttcatacccagacatcagagaaacagatcccgtgagagtaactgggattgcaggtgtgggccagcatgccctgttatcactccctttctctgagtcagcttttctctctcagtctcgtctactcctcgaactcaggaaatgtcactacaggtggccccagctcccgtttacctccccatagggagctcctctctccagttccagtttcaaaactcccaaggaagcattctggttcactcgcttgggccactggccagagggatgggatactctgaaagattcagctagagtcccgggcccagccctggaccatcactgtgccccctggtgagatgccagggctgggattcagggagaagaaaggaggttcccggacagtcattcctgcctcccgcggctgcgggctccctgcccccatcctgtgcacgaagtgggagctcccgctgtctggcagctcccgctgtctggcagcagctgctctgcaggggacagtctggacggcagaaagttcatccttaaccccagccttccagtcaaggttcccaccagtttgggacacctgcaagtgtcacatcccactgggtgaaactctaagatcccttttaggggatcccattcgctccctcccttccgccaccatgcagcgccgagaaacagagctctgaacgaaccctcagatgtccgtgcgctggggcctttccaggacggcggcgcccagtcgtttctgggtcagggcgacgcctggaactgggcagggtccctggcaccgggatcccgaaaagcagacctgcttctccctgtccagccggttccccttccccttgcagtcggccccctgcatccgcgtcctccctgccagtcgagggtccccagctccaactccaccctcccagctgtgcgttcatagcgaccgccctccctgtagggacgcacggatctggtggtggagtcttggccggcaggactggacaggaaccgaaggggcgaggcgggtccgggggtggtgcgctccaattgggtgctgtccccagggggtggggcctgatcccctatttcccggcgcgccgggatcctgccacagctgctgcccacaccgcgctcagcgccttcactgccatccccgctgtccttgccgcccccgccatgggcctagagctgtttcttgacctggtgtcccagcccagccgcgccgtctacatcttcgccaagaagaatggcatccccttagagctgcgcaccgtggatttggtcaaaggtgggcccagcccgtttccccgc

SEQ ID NO: 28069 - DNA, 2300 bp, Homo sapien
cctaacccctctctgggctcccaccttggcctcttggcctccgctcatgctgttccctcctcatcttcgcctggtgcccttcctggtcttttggcatttggcaccctgtctcttctccagggagacttccctgacctccccagccccagtccaggtcaggcgacctctctgggctcctcagccccagtgtttccttgcgggggatacccccggactgagcatgtatcatcgatgaggggtgacctggtggaaagatgtctgaatcaggatcagccttggtctcctcggtctctctcctcactgtggggcgatgttgtgttccacaagtggggtgcagggctggttcatgaacctccttgcaggaagggaagtccctggttatttcctggccctctcccatgcctcctcataaccttgaccacagtcttctctacaccccactcccggaccactggcttgtccatgccccacacctggtcccagacttgccacctgtccctgccctctccccttaggactgtcatatttacctgtcgtgtgtctcagaccttctgatatctgagtcatctaataaacaaactgctaataggacaagatcatgacagacagagactctgtcggcctttcagtggaggctcctttaagtatgcacacttatagagaattttatacacgtagttgaaattgtacatataaacttgcaaattttttctttcttttttgtgggggaggggggagcctgggtctcactctgtcatctagggtggagtgcagtggcacagtcatagctccctgcagcctagatctcctgcgctcaagcaatcctcctgcctcagccgcccaggtagctaggactacaggcacacaccacagcacccagatttctttctttttttttttttttttgtagaaaataaagaagagaatcttgctatgttgcctagcctgatctttaactcctgggctcaagcaatcctcccttcttagcctcccaaagtgctgagattacaggtgtgagccacattgctcgaccacaacttcagtcatatttgtaatgtacaattcaagtgattttgccacactgaccacactcatgtttaagccacgccaacagagttccatgttttctgatgttttttcgagatggagtctcgctctgtcacccaggctggagtgcaatggcgcgatctcggctcactgcaacctccacctccccggttcaagcgattctcctgcctcagcctcccgagcagctgggattacaacgtctgccaccacgcccggctaatttttgtatctttagtagagacggggtttcgtcatgttggccaggctggtctcaaactcctgacctcaggtgatccgcccgcctggacctcgcaaagtgctgggattacaggcgtgagctaccgtgcccggcctttccatgttttaaagaacatattttgccaccccctggtggacagtggctcaccaccggcacaagaggctacacaggcagatgtcaatggggaccaggcagggacaggtattgtcgtgagcctagccctacccgcgcccccgcgagtaaccacatctcctgactgcccaagcgcagatttccatactgaacatgaaattgcctgacttcgaaatggtggcaaatcattcaaaaaaactttaagctcccgttgtattggttattagggtcgagcctggggaagacccctataggtgtgtgtgtgtccttgtgtgtcgggggtgtggtgttcagacctctaatagggctaggaaccgggcgaccacagcgcggaagcttgagagggaaacccacctggcgccaggcaggagggtcgggggagacagggtgggtccactaccgggttaaagacctgtagtgggtggggctacacgtagggcggagacgatgggacttccggaaatcagccggcacacgtgacttttgtttgcagaagcgggaggtaccctaggcagccaatcggggagcgccgagtctctgtccagccaatgagaagccaggttgctgtggcgcctcgcccctcctccctggtccgcgagccttgggtacccccagcttttcttccgccagagctgtttccgttcctctgcccgccatgccgttcctggagctggacacgaatttgcccgccaaccgagtgcccgcggggctggagaaacgactctgcgccgccgctgcctccatcctgggcaaacctgcggacgtaagcgtgggccgggcagcacggggcgaggggaggttggtgggccaggggtccggccctgtccctgctccgcctccc

SEQ ID NO: 28070 - DNA, 2300 bp, Homo sapien
ccttggcacctgacagggtaggtacacgtggctgaagtgtgattttctagaacttttccaggctggtcagaaggaattctgggtatgttctgaagttacgtattttggacctgtgtcccagccaggttccaggtgaagttcacgggagactcacagagtagtgaaagaccattggcctggatgtctagacatctgctttctgggtcctgcatagctgggggaccccagacaaacttggaaatgaaccatctccagttggcaacctcctcttctgtgaatacaggggaaaagacctccctcccccacaagaagcgtctgcaacccaaacctggcgttctgtgaccgagttaaagtttcctcttgggtaaaagatattcttgagccacatccatgtctaggaggaagtaagggcatgagaagcttgaaaggacactgtccaggcacggtggctcatgcctgtaatcccagcactttgggagaccaaggcgggaggttcatttgacccaggagttgtagaccagtctgggtaacatagtgagatgccatcccccaaaacagttttaaaaattaaccggacatggtggtgtgcacatgtagtctcacttagttggcaggctgaagtgggaggatggtttcagcccaggaggttgaggctgcagtgagctatgattgcgcattgcactccatcctgtgtgacagtgagaccttggctcacaaaaaaagaccttctgaaatggagcctttgttagtccatgaaggtcgatgaggaatggctgatcctgctgggtcctccctcaagctacagaggaataatacagtcagccccctgtatcactgggttacgcatctgttgattcaaacaaccatggattgaaatattagaggaaaaaaaattgataattgcatctatactgaaaatacgtatagactttattccttgtcattattccctaaacaatacaactatttacatagtacgtacattatattaggtattataagtaacccagagattatttaaagtatatgagaggatgtgtgtaggttacatgcaaatattacaccattttatgtaagggacttgagcaaatgtagattctggtttcctctggggattctagaacaaatctcccacggatactcagggaaaactgttactctaacaacaagtgttatacacttaccatgtgctaggtcctctacaggtactttacactcatgatcccatttgatccttacaatccctatccactctccctttgctcagacaagacatgctatccccatgaggtagataatctccattatgccaattttatgatgagaagacaggctgttcatactcccgcccgccccaaccaggctgtcccaagttctggttttcctcactggaaacttgctgttacctctgagaggggcatgttcacttatggcccagacattagtggcggggttggtggggtggggggtcaccctgtgctcagcctttgagaaaacaggtggctgaggtactgtgcccttagggagcctgcaattaggaggcagggtacccctcagtacacaaactgatggagatgatagagtgtacggcacacacaccgaggctactgtattgtgtgtctgtcctagctgggtcatgatgtgcggctacctcccacacctgagtgtcccactgccctgctgggggttggggaaaatcattattgggatgagcaggtttgcaaaatgcctggtggactgaggcaggctgtcctgagtacccacagtgggagtacctggcaggggtcttgcaagatgtggtattagccaaggagctgatgatatctttttctctgtctcctgaaggatacttatccgctttttccccttggagtcctggcagattggcaagatagggacggtcatgacttttttatgattgggcacggagggatccagggcatctgtgaactggctgcttcttccagagagatctcttggcagagtgagggcctggagataaccagctttggattatcccgcatgcaacattcctgtgatcacataatcctcttcttcatcctcatatgaaataaatgaagagagcttcctcattcaaacatgacttcttaccttctattatctctcctgggcatctggggccaccatgggcagcagggctggtggataagaccgtagggaacctggagggggatgatttagactgctcagatctggggctgggagactcagcctggaggctctgctctccacacccatctgcaggcctgtgggaaggtgtgagcagctggtccagctgg

SEQ ID NO: 28071 - DNA, 2300 bp, Homo sapien
ccccttctgcctgcacactcctaacccctctctgggctcccaccttggcctcttggcctccgctcatgctgttccctcctcatcttcgcctggtgcccttcctggtcttttggcatttggcaccctgtctcttctccagggagacttccctgacctccccagccccagtccaggtcaggcgacctctctgggctcctcagccccagtgtttccttgcgggggatacccccggactgagcatgtatcatcgatgaggggtgacctggtggaaagatgtctgaatcaggatcagccttggtctcctcggtctctctcctcactgtggggcgatgttgtgttccacaagtggggtgcagggctggttcatgaacctccttgcaggaagggaagtccctggttatttcctggccctctcccatgcctcctcataaccttgaccacagtcttctctacaccccactcccggaccactggcttgtccatgccccacacctggtcccagacttgccacctgtccctgccctctccccttaggactgtcatatttacctgtcgtgtgtctcagaccttctgatatctgagtcatctaataaacaaactgctaataggacaagatcatgacagacagagactctgtcggcctttcagtggaggctcctttaagtatgcacacttatagagaattttatacacgtagttgaaattgtacatataaacttgcaaattttttctttcttttttgtgggggaggggggagcctgggtctcactctgtcatctagggtggagtgcagtggcacagtcatagctccctgcagcctagatctcctgcgctcaagcaatcctcctgcctcagccgcccaggtagctaggactacaggcacacaccacagcacccagatttctttcttttttttttttttttttgtagaaaataaagaagagaatcttgctatgttgcctagcctgatctttaactcctgggctcaagcaatcctcccttcttagcctcccaaagtgctgagattacaggtgtgagccacattgctcgaccacaacttcagtcatatttgtaatgtacaattcaagtgattttgccacactgaccacactcatgtttaagccacgccaacagagttccatgttttctgatgttttttcgagatggagtctcgctctgtcacccaggctggagtgcaatggcgcgatctcggctcactgcaacctccacctccccggttcaagcgattctcctgcctcagcctcccgagcagctgggattacaacgtctgccaccacgcccggctaatttttgtatctttagtagagacggggtttcgtcatgttggccaggctggtctcaaactcctgacctcaggtgatccgcccgcctggacctcgcaaagtgctgggattacaggcgtgagctaccgtgcccggcctttccatgttttaaagaacatattttgccaccccctggtggacagtggctcaccaccggcacaagaggctacacaggcagatgtcaatggggaccaggcagggacaggtattgtcgtgagcctagccctacccgcgcccccgcgagtaaccacatctcctgactgcccaagcgcagatttccatactgaacatgaaattgcctgacttcgaaatggtggcaaatcattcaaaaaaactttaagctcccgttgtattggttattagggtcgagcctggggaagacccctataggtgtgtgtgtgtccttgtgtgtcgggggtgtggtgttcagacctctaatagggctaggaaccgggcgaccacagcgcggaagcttgagagggaaacccacctggcgccaggcaggagggtcgggggagacagggtgggtccactaccgggttaaagacctgtagtgggtggggctacacgtagggcggagacgatgggacttccggaaatcagccggcacacgtgacttttgtttgcagaagcgggaggtaccctaggcagccaatcggggagcgccgagtctctgtccagccaatgagaagccaggttgctgtggcgcctcgcccctcctccctggtccgcgagccttgggtacccccagcttttcttccgccagagctgtttccgttcctctgcccgccatgccgttcctggagctggacacgaatttgcccgccaaccgagtgcccgcggggctggagaaacgactctgcgccgccgctgcctccatcctgggcaaacctgcggacgtaagcgtgggccgggcagcacggggcgaggggaggttggtgggccaggggtccggcc

SEQ ID NO: 28072 - DNA, 2300 bp, Homo sapien; identical to SEQ ID NO: 28068

SEQ ID NO: 28073 - DNA, 2300 bp, Homo sapien
ctcttctaatacccttcagtctgggagtggagaggccctgcggctcagaaaaggctgaagatgagaggtggggggacatgttctgtcagcccctgctcatcccggacacaccccaagctgtaccttctccccagatacctctcctttctttctttcctttttttttgagacggagtctccctctgtcgcccaggctggagtgggctccctctgtcacccaggctggagtgcagtggcgcgacctctgctcattgcaagctccgcctcctgagttcacgccattctcctgcctcagcctccccagtagctgggactacaggcggccgccaccacgccctgctaatgttttgtatttttagtagagacagggtttcaccgtgttagccaggatggtctcgatctcctgacctcgtgatccgcccacctcggcctcccaaagtgctgggattacaggcgtgagccaccgcgcccggcctttttgagacggagtctagctctgtcgcccaggctggagtgcagtggcgcgatctcagcacactgcaagctccgcctcctgggttcacaccattctcctgcctcagcctccagagtagctgggactacaggcgcccgccaccacgcccggttaacttttttttccatttttagtagagacggtgtttcacggtgttagccaggatggtctcggtctcctgacctcgtgatccgcccgccttggcctcccgaagtgccgggatgacaggcgtgagccaccgcgcccggccagatccctcgcctttcccctccctcgctgccccatggggtatgggagggccactggggcccggggccagtggggagagccaaggtcacatgggctccggatgcggtgaggggtgagggaaggagggcacctttcggtcaagatgaaatcaccatccttgagcgtcggcagtttccccaggctgttgatctgcaagaactccttgctcttgtgctgccctgaagaggaagaagtcagaaaaggtcttcagagtaaaaacgctgcacctctacaccctccctcctcctccccaagcggagccccacagccctgagaaacagcaaggtctgggactagaggcctggatcagcctcactccctggctgggcctccctgccctgccacattccggggcagctggggggttttggtgggtggggccaggtgcagcaggtggataaagagaagttttctagccggactctggtgggccaggggaggggaggcaaactggggtggctcatctcttcccatctcttaattctcacaacagtatgtccttcttcccgaggtcttctgggctttgtgaatttatatgcgtgcattccacgcaagaactctgtcaactccattcagtattttctttccatccctacagagcagaaggtaacgttatcctccttttcagaaggcaagctaaggttcagagaggctgtgatcccttcaaggccactcagtccacagcattctctggtggcagacgctgcaggaggaggtgagggggctgtgcgggcggcgagacgctcagggcagagcagggcgggggcctgggggtgcactgggtttgtggacacgcggggaaacgggctgggcccacctttgaccaaatccacggtgcgcagctctaaggggatgccattcttcttggcgaagatgtagacggcgcggctgggctgggacaccaggtcaagaaacagctctaggcccatggcgggggcggcaaggacagcggggatggcagtgaaggcgctgagcgcggtgtgggcagcagctgtggcaggatcccggcgcgccgggaaataggggatcaggccccaccccctggggacagcacccaattggagcgcaccacccccggacccgcctcgccccttcggttcctgtccagtcctgccggccaagactccaccaccagatccgtgcgtccctacagggagggcggtcgctatgaacgcacagctgggagggtggagttggagctggggaccctcgactggcagggaggacgcggatgcagggggccgactgcaaggggaaggggaaccggctggacagggagaagcaggtctgcttttcgggatcccggtgccagggaccctgcccagttccaggcgtcgccctgacccagaaacgactgggcgccgccgtcctggaaaggccccagcgcacggacatctgagggttcgttcagagctctgtttctcggcgctgcatggtggcggaagggagggagcgaatgggatcccctaaaagggatcttagagtttcacccagtggg

SEQ ID NO: 28074 - DNA, 2300 bp, Homo sapien
gttcatttccacagcttccctgtctcttcctctgtgttctagaggcttctgcttttgcaggctgagttttggagtccctctgtgctcgggatggagttggagcccacccctctgaccctcactcgggagcagtggagccctgagcctttctgaacactggggaggatgggtgtagacggactgtgcacttctgccccctttgccaacctggtgggcaggtgctgagttcacaaggtcctagaatcccacaacgaagccagggtgcctggtgggagcccagggagtcccagctgctgttcattcccccttctcctcaaaaagcctgttcatctgtggcgtggggactatcattagtggggagtggctaaggtaggctaggcagggacgcagcctacaagccccgtggcatcttttccttccctgtggacctctggggtgattcccttgtctctgtccctgcttctcagaaatgcccctatcaatctgagcgtggtggctcacgcctgtaatcccagcactttggaggctgaggcggggcagatcacttttggtcaggggttcgagaccagcctggccaacatggtgaaactccatctcgactaaaaatacaaaaaatgagccgggcatggtggcgtttgcctataaacccagcaactcgggaggctgagctgggagaatcacttgaacccagtggagattgcagtgagccaagatagcaccactgcactccagcctgggtgacaaagtgaggctctaccaaaaagaaaaagaaaaaaaaagctccaatctgtgtgtcctgcctccccccaggaccaggcctgccaggcagcagtgggagctgacctttcagcagatccacaaactgaaagttgaactggatgtcatgcttcttcgagaagatgtagacggcacggcagggtgctgacagcaggtccatgtagagctccagggccatgttgagacacatgccaggccccacagctgcagctggccagccacagacctgggcctatgtctggccagagtccctggccctgtgccctctccgatctgggcccaggaccctgcattctggaacctcttgtttccctttgtgttgtcataaggccaggaagcctgcaattctcacagcatcaaggattctaaggaggcccaggagtaggctggcagaggcccgtggcaaaggtgtggcagccgtgaccctactctccccctctcacgtgtgtctgtgtcccgtggcgccacctcacagacaccctgtctgagaagggattatgcctgggaattcccagggccggactttgattgcagaacctgacgaaaggggctttgcagggtccagaatgaggaggaggcaatgagaattatccctggaggattctagaagtagaggctgggagcatccacaggtgaatggagcctgaactatgactagaaaggaattgggagaaagagacacaggaacctgggagcttcgggagcagtggggacaccaccaccaggaagtcagggggcactcggcaatgaaagtggcagatgcaataaaacttttaacatattgttgtataatgtacaataatgtaataaaaatacaccccctatacattattgttccaactctagctctatctattgccctcctcatatgaatccctctccccataccccattctctagttaatcttaactaggcctcctgtttatattagccacatcaagcctagctgtctactctatcctgtgatcaggatgagcatctaatttgaaatatgcactcatcggtgcactatgtacagtggcccaaacagtctcatatgaagtcactctagctattatcctcctatcagtcctattaataagtggttcatttaatttgtatatactcattggaacagaagaatttctctggctgctcctaccatcatgacctctggccataatatgacttatttccacactagcagaaaccagccgagcctctttagacctaacagagggggaatcagaattaatctcgggctttaacgtcgaatatgctgcaggcccatttgccctgttctttatagcagactatataaatatcattataataaatgccctgaaggccgcaagaggttcgtgggtgcagtgcacaggagaccatatctggggacagcagctgcagcagaccccaagctgggccatccctgccacttgccaggtggtgcttggcgaaggcaagcagctcccacccgcccggggaatacagcgcgacccccggcggcatgctcttcagcaccaccccaggaggtaccaggatc

SEQ ID NO: 28075 - DNA, 2300 bp, Homo sapien
aattcataaaaaaagacttgttaaaatgagagtttgggtgacgaaatttgtggtatagagttctggtatatatatgttatgcagtgctcctaggaagacaatagtgattacgggatttattatttatttattttttgccctagggcgaaggtggcttttatttcctctcttagggaagagggggaggtgagctttcccaggcacgtcaacctaaggaaggggtcgtggggcccccagcaggggctggaagagctgatcatttggaagaaagggttcattcttgtccacttcctggccctcagctgcagggtgtgctggcaggggttactccccttggggcagctgctcctgcatcagcggaggcacaaggaggtacctgctggtgttcacaaagaggagggggcaggtgccgcgagtgagggagagagggctggggtgactggccccacaccaatgcctgcctagtatgatcactttcataaggcctggctggtgggactcctccaggaagggcctgaggggtcccttggcagtgctccatgcgatggctggtgctttaaatgtccatctcaaaactgtgcttcttcactgcccgccctgcttatcttctggactattgctcaggtggctctggctggcttccgttggggggatcatcactggcagggctggtgaccccgggaatggtgggcagatcccttgggagtgttttggtcacgggtaagtttcaacactccatcaggaatttccagtggtagatgatcctggtacctcctggggtggtgctgaagagcatgccgccgggggtcgcgctgtattccccgggcgggtgggagctgcttgccttcgccaagcaccacctggcaagtggcagggatggcccagcttggggtctgctgcagctgctgtccccagatatggtctcctgtgcactgcacccacgaacctcttgcggccttcagggcatttattataatgatatttatatagtctgctataaagaacagggcaaatgggcctgcagcatattcgacgttaaagcccgagattaattctgattccccctctgttaggtctaaagaggctcggctggtttctgctagtgtggaaataagtcatattatggccagaggtcatgatggtaggagcagccagagaaattcttctgttccaatgagtatatacaaattaaatgaaccacttattaataggactgataggaggataatagctagagtgacttcatatgagactgtttgggccactgtacatagtgcaccgatgagtgcatatttcaaattagatgctcatcctgatcacaggatagagtagacagctaggcttgatgtggctaatataaacaggaggcctagttaagattaactagagaatggggtatggggagagggattcatatgaggagggcaatagatagagctagagttggaacaataatgtatagggggtgtatttttattacattattgtacattatacaacaatatgttaaaagttttattgcatctgccactttcattgccgagtgccccctgacttcctggtggtggtgtccccactgctcccgaagctcccaggttcctgtgtctctttctcccaattcctttctagtcatagttcaggctccattcacctgtggatgctcccagcctctacttctagaatcctccagggataattctcattgcctcctcctcattctggaccctgcaaagcccctttcgtcaggttctgcaatcaaagtccggccctgggaattcccaggcataatcccttctcagacagggtgtctgtgaggtggcgccacgggacacagacacacgtgagagggggagagtagggtcacggctgccacacctttgccacgggcctctgccagcctactcctgggcctccttagaatccttgatgctgtgagaattgcaggcttcctggccttatgacaacacaaagggaaacaagaggttccagaatgcagggtcctgggcccagatcggagagggcacagggccagggactctggccagacataggcccaggtctgtggctggccagctgcagctgtggggcctggcatgtgtctcaacatggccctggagctctacatggacctgctgtcagcaccctgccgtgccgtctacatcttctcgaagaagcatgacatccagttcaactttcagtttgtggatctgctgaaaggtcagctcccactgctgcctggcaggcctggtcctggggggaggcaggacacacagattggagctttttttttctttttcttt

SEQ ID NO: 28076 - DNA, 2300 bp, Homo sapien
agactacactgccaagagagcactgagcaatggttgggagcattctgtctaaatgacttttctcttctttctaggccgggcacggtggctcacgcctgtaatcccagcactttgagaggccgaggctggcaggtcacttgaggccaggagttcaagaccagcctggccaacatggtgaaaccctgtctctactaaaaatacaattagctgagcatggtggcacatgcctgaaatcccagctacccgggtggctgaggcacgagaatcgcttgaacccaggaggcagaggttgcagtgagcagagattgcaccactgcacttcagcctgagtgacagagaggggcaaagtcaaaaaacaaacaaacgaaccaacccacacactctcacttttatcttgtttctataaattaataaatacagcctttgtgagttggtttatgtgagtcagacccaaagaaaatgatcaatcctgaaacgtggaccaaattagttgttttgttttttagttggagttactctcttgtcgcccagcctggagtgcaatggcgcagtcttggcacacggcaacctctgcctctagagttcaacgattctcctgcctcagcctcctgagtagctggaattacaggtgcatgccaccacgcccagataatttttatatttttagcagagatggggtttcaccaagttggccaggctggtctcaaactcctgaactcaggtgatccgccggcctcagcctcccaaggtgctggggttataggaatgagccaccactcccgccccaaattaggttttgaacttaaaagacaggctgagccttgaaccagaatcctgacagctcctccttgggcctctgactggagttatccagaggtgaggataaggcagccattgccttctctgagtgtctacctcctttcaaaactttaacatggaaatctgaatttctcatctttccttaattttttttccagttaaaaatcattattactggccagttgtagtggctcacatctgtaatcccagcaggtggcagaggtgggaggatcagcctaggcaacatagtgagaccctgcctctacagaaaaaaattttttttaactagctgggcgtctttgtgcgcacctgtagtcccagctacttggggaggctgagatgggaggatggcttgagcccaggagttggagtctgtagtgagctgtgatcatgccactgcattctaccctgggcaagagagtgagactctatctaaataaaataaaacagttgttacttccactttatttgcagaaatgttccttattctctagaaaacattatgcgttggctgacacactttcagtgggattcgttttagaaaatgacatgtgaccctgatactatttgacaggctccatggcagcaaggggcaggcctgggcttacggctcagcagatgaatccaggggggtggacttgcaaggactctggagggctctagcttccctgtcattttaaagatggagaaacacaggcctggagaaaggaagaaataaacccagggaatgcgatagatggcactgtgctggcaggggcaggaagaccaaggctgtgacattccagggagtgcgactgcagtgaagcgagtgaccacaaaacactgaacgtaagccctgaggctttgccacttgctggcaccaaggactctgcagtgttgagccaagaggatggactttggagccagactttctgggtctataatcattcagtgtctgtctcctcctctaaaatgcggacggtgggaaattctgacacacgcttcaacacagatgcaccttgaagacattatgctaagtgaaatgagcgagccaggcacgaaagggatgggactggggcctctctgtgcgtccccctgagagacaacggtctcttggccacccaccctgatcccacaggagccaggcgggcccagccctgagacaggccgcccgccgcccgcaattggactaaagagtgtcccaggcgtccgtgccgcccaatggggcacagcggtcggggtgcgtagccgcaggggcgtggtctgaggtccgagacccgagtcctggcactggagtttgctgactccctctggtttccggtcaggtcggtcggtccccactatgggcctggagctgtacctggacctgctgtcccagccctgccgcgctgtttacatctttgccaagaagaacgacattcccttcgagctgcgcatcgtggatctgattaaaggtaggtccagcctcgggtttggggaaccgaaaagtcaggaaggggaca

SEQ ID NO: 28077 - DNA, 2300 bp, Homo sapien
tctgtaaaacggagtgggaggaataatgtatccacctcccagggcttacctgaggatagaaaatgggcacctagtgttctggggcactaggaagggaacttggagaccttttgggcagggcccacacggcaggcactctgagtggggaccctgatgccagggagtggggcctgggcacagagggcaggatggtatggtaactgggaggggaggtggaaacatgggcccagggaggatcagagttggaaatggagaaacagagtggtttggtcgtggggagatactgcctggagggagttgcagtataggggaggtcctcccctgaaggtgaaggtggggagaaaacctggtcaaatcaccctgagtatgagcaatgaagccacctggccctgacaggctggagaaaagatctctgacaccccctgcccacagcatggtcatcgttttatacctgagtcgaaagtaccagatacggggacactggtacccacctgagctgcaagcccgcacctgcgtggatgagtacttggcgtggaagcatgtcaccatccagctgcctgccaccaatgtctacctgtgcaaggtgagcttcctaggccctgtcatgcaggctggggcaggggcctggacccccagagatggaaggcaccagttggtacatattacatattagcttcacttccactgtcctcagcagacataactaatctatcacagtactccttcccctaagcctgaatgaatccttagaaaccttctgaacacagagccccagaggacatcactaatgagtggcagccgggaagggatggagaggaggcccaagaggcttccaagagtctgggttaagttgctcctctcctcccagcccagtctctcctgccccacttctccggacagcctgcagatgctgcacagctggagcggctgttggggaggctgatgccagccctgcagcacctggattggggggtgctggtggccaggcccttcctggcaatggagcagatctccctggaagacttggtgctgacggaggtgatgcaggtgaagctttcctacccacctgccctctggggggactctgggcatggggctgagccccaaccccagctgccctgtcttcccagcccactgccgttggctgcgacctcttccaagactgccccggctggcagtgtggcaggcccgtgtggcggctgcccttggtactgagctcttgctggaggcccacaagctcatactccagcctctgaaccacagtgaggcttggcgggacccccagctggcccagaagcaggtgcagtgggtgcagcccactccactgcaccctgctgtctgcaataaacacactgcatgctcttcgcttgtctccaggcttactctgtcaccagaagtggggtcagtcccatttctcagcctagacctattagatcacagcatagagtgagtggcactcagtcctctacgtggggctctagttaccttccttggccaccaggtacacagtctggccactgcagccccaaccaaggccaggaagtttctaggctcctctgtgtggcacacaccggctgagtgccccctgacttcctggtggtggtgtccccattgctcccaaagctcacagtttcctgtgtctctttctcccagttcctttctagtcatagttcaggctcgattcacctgtgtctctttctcccaattcctttctagtcatagttcaggctcgatttacctgtggatactcccagcctctacttctagaatcctccagggataattctcattgcctcctcttcattctggaccctgcaaagcccctttcgtcaggttctgcaatgaaaatccagccgtgggaattcccaggcataatcccttctcagactggtgtctgtgaggtggcaccacggggcacaggcacacgtggaagggggagagtagggtcacggctgccacacctttgccacgggcctctccccagcctactcctgggcctccttagaatccttgatgctgtgagaattgcaggcttcctggccttatgacaacacaaagggaaacaagaggtttccctggggaacacaggatcctgggcccagatcggagagggcacagggccagggactctggccagacataggcccaggtctgtggctggccaactgcggctgtggggcctggcatgtgtctcaacatggcactggagctctacatggacctgctgtcagcaccctgccgtgccgtctacatcttctcgaagaagcatgacatccagttcaactttcagtttgtggatc

SEQ ID NO: 28078 - DNA, 2300 bp, Homo sapien
tttaaacagaggaacagcctgaaaaatcaggcttcaggcacagataaggaaacttgcacaaacctctggctcactcagataaaggaacaatgcccaacacagaaacacctttgatctttgtgcctaaggcatgcccacagctactttgataagggaacaagacccagcatagaaatgcctttgtcctttgtataaccagtgggcttccaggaaatagtctcttctccttttgtggacatgtacacggtgggctacagtgggttccagtgggcactttcctttcttggacgtgctttagaatgtgagcctctgattggtcctgggccaggctatcacttcagctcctgattggtccctcaaggtccaggggccaagctgagtagtgctttctccaagaccagtcagtacattccttcctttcccagtccataaaaccccctgacccagcctcataatgggcaacctgcttgggccccccgccagctgcaatgagctttcttcatttgcttattaaacttttgcttcaaccttaccctttgtgtccacactccctaattttcttggtcgtgagacaaagaattctgggtgataccccacaatgagagactggtacattgtggtgcacgggcaagactgcaacaatatgttttctgcttgcttgtttggactggcctcttcctaactctccagagtgctctctccccactgtggccctgagctttgcctcacggtaacactgtgctgcatgacactccagcatgatctgcatgtttctcacctccggaccttccccacacaactttcttgctgcttggaccacccttcccacctattttcaactgtttctctccagcgcatctttcatgataaggcttgagtggaagctgtatccgaggctgaaggttatccatgcagctttgaaaccatctgtttatgcttctgtttaccccccaaatactgtttaccccaatactcaaagtcaaggttggtgactcaacaattttcagaacttctagcttatcagtatagctttattgtactgaactgagtttttcaccatgctgttactgtctttgaggttaaaaagcccccaacattcactcctatttgaatcatctgtgcaagactcaagcagctatgaattcaaccacagtgtaaagttcttccctacaatgctttattgttattctagctcccaagagagtaccatctttcagcccaagacccttgacagaaccccttcaactctgtcgccttttttcatctctggaattctgacaccacccatgacccctcttcttgttcatttactaggttttgttcctttttttccttttgtttcaatatcctattgtatctgttccttttgggcttcacatcctttttggaaagagaggcacaggtaatataatgaatgaggatgctcctcctccctggttccctctaagtcaagtttctccaacgcgctggtctgcttggctttgaatgcggctcaacacaaattcataaactttcttacaacattttgagattttttggtgatttttatttttattatttatttatttattaacttatcagctatccttagtgttagtgtattttatgtgtggcccaaaacaattcttccaacgtggcccagggaaaccaaaagattggacaccccgctctaagtgttccccaagtttccactgttttcagagcacatgtcccaggtaataacacacagcccatcatttagtgactgctcagggtgcaagctgtggagaagagagtccgactacgagctggtgctctaagcctccagcacgctaggactgacgacggggatccggaaacaacaagctccactcccgcaacacacacacacacacacacacacacacacacacacacacacacgcacacgcacacgcacacgcgcacgcgcgcacacacgcgcacacacgcgcgcacgcgcgcgcgcgccgcccaagggtagccgtctgcagggccccagctaagcagcccgcggagagcgagcggcgcgtgcgcccccgctgattggctggcacaaccggcaccggagccaatgggagcacgccttgttgtcaggcgcgcagccggacggcgcggtggtcgggacagactggccgttgctgtggagacgcctggtgagttcctggaaggctggtttgaaggcggtgccggggtgggggtgaggctcagcagagcccggggcacaggccggaggggctgcaggcgcgaggctgggttacgtgaggaagctgggggtttcgcgggcagctttagagccccag

SEQ ID NO: 28079 - DNA, 2300 bp, Homo sapien
gaaacacctttgatctttgtgcctaaggcatgcccacagctactttgataagggaacaagacccagcatagaaatgcctttgtcctttgtataaccagtgggcttccaggaaatagtctcttctccttttgtggacatgtacacggtgggctacagtgggttccagtgggcactttcctttcttggacgtgctttagaatgtgagcctctgattggtcctgggccaggctatcacttcagctcctgattggtccctcaaggtccaggggccaagctgagtagtgctttctccaagaccagtcagtacattccttcctttcccagtccataaaaccccctgacccagcctcataatgggcaacctgcttgggccccccgccagctgcaatgagctttcttcatttgcttattaaacttttgcttcaaccttaccctttgtgtccacactccctaattttcttggtcgtgagacaaagaattctgggtgataccccacaatgagagactggtacattgtggtgcacgggcaagactgcaacaatatgttttctgcttgcttgtttggactggcctcttcctaactctccagagtgctctctccccactgtggccctgagctttgcctcacggtaacactgtgctgcatgacactccagcatgatctgcatgtttctcacctccggaccttccccacacaactttcttgctgcttggaccacccttcccacctattttcaactgtttctctccagcgcatctttcatgataaggcttgagtggaagctgtatccgaggctgaaggttatccatgcagctttgaaaccatctgtttatgcttctgtttaccccccaaatactgtttaccccaatactcaaagtcaaggttggtgactcaacaattttcagaacttctagcttatcagtatagctttattgtactgaactgagtttttcaccatgctgttactgtctttgaggttaaaaagcccccaacattcactcctatttgaatcatctgtgcaagactcaagcagctatgaattcaaccacagtgtaaagttcttccctacaatgctttattgttattctagctcccaagagagtaccatctttcagcccaagacccttgacagaaccccttcaactctgtcgccttttttcatctctggaattctgacaccacccatgacccctcttcttgttcatttactaggttttgttcctttttttccttttgtttcaatatcctattgtatctgttccttttgggcttcacatcctttttggaaagagaggcacaggtaatataatgaatgaggatgctcctcctccctggttccctctaagtcaagtttctccaacgcgctggtctgcttggctttgaatgcggctcaacacaaattcataaactttcttacaacattttgagattttttggtgatttttatttttattatttatttatttattaacttatcagctatccttagtgttagtgtattttatgtgtggcccaaaacaattcttccaacgtggcccagggaaaccaaaagattggacaccccgctctaagtgttccccaagtttccactgttttcagagcacatgtcccaggtaataacacacagcccatcatttagtgactgctcagggtgcaagctgtggagaagagagtccgactacgagctggtgctctaagcctccagcacgctaggactgacgacggggatccggaaacaacaagctccactcccgcaacacacacacacacacacacacacacacacacacacacacacacgcacacgcacacgcacacgcgcacgcgcgcacacacgcgcacacacgcgcgcacgcgcgcgcgcgccgcccaagggtagccgtctgcagggccccagctaagcagcccgcggagagcgagcggcgcgtgcgcccccgctgattggctggcacaaccggcaccggagccaatgggagcacgccttgttgtcaggcgcgcagccggacggcgcggtggtcgggacagactggccgttgctgtggagacgcctggtgagttcctggaaggctggtttgaaggcggtgccggggtgggggtgaggctcagcagagcccggggcacaggccggaggggctgcaggcgcgaggctgggttacgtgaggaagctgggggtttcgcgggcagctttagagccccagtcagggaaaccgaggccgggcttcctggctgcctcgcgagcctcttcatggctctcgccgccgccctgaggtgcctagaatgggttccggcctccggggag

SEQ ID NO: 28080 - DNA, 2300 bp, Homo sapien
tctggggttggtgcagaggtcctggtcaactttatgaaggaggctgcagaaggaccctttgccaggggcgaggagaagaacacacccaaagcttcagaaaagtgagtagcaccctttaggcgacccctagcagcttaccccatctgcatcccagatggctcgtttactgcaatgtgttgttcagagggttgctacacagtaaacagtaaactagaactcatggagtccctaggacccatctggaaactcccatttgctgggccaaggtatttctgttgagtctgagaaggagagggtgagtgtgagtccccttaccctgtggtcatgtgtggtgctaccccaccctaaggggaagtcctggggagaagctgatgccctcctgccctctccactggggcacagctctgttctgtgcagaacactgtagaaagtcagtttttgctttgcagactctcacccctgggtcctttgccaaggccttgtctgctgcccattctcctgagaagcagtgggaagtgtgggaagtgtgggcttctcatgtggtgccagagagctcggagagactggggctcaggtgtggtcctctcagtgggcctggactgaccccagtctccctgtggttgtaagtcatctccacagcccagacttctttcactccaggcccaggtcctggtgccgccccatcctcaggggcaagtcctagggagaaagatgggtttggggtgacatggggaatgttgcagctgcccattaacctgatggactcatgctgattcttgtgcttctgagacatgctcagggtcaccacctgccagcttgcccacatgggagccaggggagggctcagctcaccccatctctgagtccgctgcctagctgggcactgtgcgaaattcagctgacccctgcctgactgggcactgtgcggggttcagctgagtgccagagaggcctgcacccaggccctgtgcttgagggctgtctgcttctgaccacagatagcctgtgtgatgttcaccacaggtgagccagctccacagtcggtgtgcccctcaggttatggggaggttcacgtccatgcatggcaggccactcaggtgggcagccgctgtgctcagaatttatagctacccatttttttagtcacaaagggcccccaacatacaatgatactttctttcattggttataattctgttaaattttttttaattatacaaataatacatgaatactttcttgttatagaacattcaggtagtatataaacatgtagactaaaatgtgacagatctccttccaagagttagctactattcacagtttaatttcctaaatcattttctgtatatttataacacttaaatgcacacatacaattgtaaggtttcatttattttataaaaatgaactacagaaggtattgttttagagtttgctttttcccctgacagtgggtctgggcaacagtccatggagatagtaccccagtcacttcattctttctagtggctacttactataccatagtatggatgtaccatgttttatgtaaccactccaatggacatttagagtgtttctaatgtttctgctcaactatgttgcagcacatatccttgtacatgtgtgagcatgcagtaaatgcagatgtgtttctgtctgcccatttgtcaggtcttaagtttgtcaggctgtcacacagaaggcatagactttgcatggagagatgcaagggtgcttctgaagaaagactctttggctcctctatagagcctcttggggcctgaaattcagagatgcaggtcgcgccctgccagaaagattaggcagtgtccagttaggagccagagcctgtgtgggtgctgtaggggcaactatgggctctgtgacaccaggcagatggggtgggggccaccagaggtgcatgggagcagtgggccctgggaagggcattcacccttaccagtacacatctgtttcaatgtgaggtggagactctgacctgtgccccaaacctctgttcccacagggagaaggcctgcctggtggacgaggactcccactcttcagctgggacactgccgggccccggagcctccctcccctcctcctctggcccaggtctgacatccccaccttacacagccactccgattgaccacgattacgtcaaatgtaaaaaaccccaccagcaggcaacgccggacggtacagtccctgttctccctactgccagcccagggcggcacatcaatcacgggggggtgctcggacgactcattttgtcgcttcgtttt

SEQ ID NO: 28081 - DNA, 2300 bp, Homo sapien
tgtacctcccatcagtttaagcaacacagtcaggacaaacagaaccacctgtggcagccgccaagtaggagagaacatggcagaccctgggtagacaaaggggactggctaccggtgtgggaagaggctcagcctccccactcacatgggagacacacactgaaaccacctggggttttttggcacactccacagataggccaaaatgaaagtcatctgtggttctgagtcctgggagggggtggggcaagggctggtgggagggcatctggcctggctctgccaaaacacctggcaaggtgtggaagcgcttggctgtggggacctgtgtcctggcctccaacttccaggcatttgtcctggagaccccggcacaggtgagaaaggagatcagagatagcagcattctttttctaatagtggaaaaccaaaagccacctatccgctaggaagaggggaggtagaccaccaggacaaccagacagtggagtgctatgcagcagtgaccaagaacaggaagtttgaccaccatccacaggcaccaaagactgggccaggcctcacagaaagagacctgtgtggtgggtgtgacggctaaggccaccatccacatctcaggctgctccattcaagccagggcagggccttgagcttatggaggccccagccaggtgtgagttggagctcctcctgctccgtgcttcagtcacatcctagcactggcctctaggatccacagataagccccaaggcctccatgcaggcccatctccagacctaagggtgatttgtgtggcatgccaagtgtgtgatgatagctttcatccacctgtcgggaccactctgcttacgggtagcccaagctgagtaaggggtagagtggctgggagctgtgcctgcctgtgcccaaaatctgtgctcttctcagtgatcttgggacctgggggctgcccacctgagcagcggcaggagcagctttaggggagacaccacactcagggaggccacagtaggccggcacctcccttccactcacactcaggccaccattgctgcctgccccacacggcctcagaagcaggaggcagtaccagcctggccctgagctccctttgcttctttcagaggctggaaactgggttgaaacaagaaaaaaccctgcctgctaaaataagcaaacattttggggaaggaaggagaaccatctctgtctggtttggttactatgggaacgtttctgaatcaactacaagacagggagagaagttcaccctggacaaagcagcctggctctggcccatgcaggcttgcctgccagaggtgtgtatgcctgcggggggagccccagaagcttctgggcacccagacacaaaccctcagcctccatggtgtgggtagccaccccagcagcacctaccacctagcttggtgcctgctttcctggtcccctctgctcagggaggacggtgtgtggaacagtgggacccaagacatgccatcttcactcctcctcatgttcaaccacagtgctgagccctgctacacgtccatctgtgctgctgtgggggccagccagtcatggggcagttcccatttgcaaggagttcctgtcagcaaagctgacataggaacccaaggtcccactcactcgatccttagcacccatcccattctctggtcccttaaactccccaggaaggttctgtcagcagcccagcctaaggagttcccccgagggtgcctctaatcctagccttcctctcctgccccctttctggctgagcagcaccccaccctgcatgggagagcccagctccctgtccctcctacatgccctgtagcacgttatgaaggccccgcatggagacatgcaggcagtgctctactgtcagccttgagcatcctgtggccagggccaaggctttgcctgactcctacaacatccagcactggctgatccaggagaatgagcttggagaccaactgctgaggggaaagggatgaatgaaattaatccacaaatattcatgtgggcatctcctctgggccaggccaggggacttaggaacacagcaacagcacaaagacgcacaaaccaggagactgtgagagcagacactgggcccatacatgtgtccacccaaggagactgggcagcagctgcagagagcaaaacgacctgaccttctcacatggaaacttctccaagacttggtgtcatggaaaaagcaaagtcgctaaaaagcacacacgcacactttttttttttttttgacacggagtcttgctctgtcgcccag

SEQ ID NO: 28082 - DNA, 2300 bp, Homo sapien
tggtgtcaaactcctgggctcaagcaatacttcttccttagcctcccaaagtgctgggattacaggcatgagccagtgtgcctggccctagctgcatctttctcaggcctgtgtgtggcggtctcagcttgggcagagcttcctgttctacatgctttgtcctcgtaggacactgctctgggcccaggtgcactgtctgcagggggaggtacacttgcaagcggaggtgtgggaccttcagcaaggctttggaaagtagactgagcaggtggcccactcacattcaggaaagcctgggcaaaggcagagtctgggtgtgagcaggcaggaagaggctgagggagggctgtggccacaagaagctgcaggacctggcaggggcagggactacaagcaccccatcttgggaccaaaaggaggagggggttgctgttagaagtttccctcttgagagaagacttggcagtgccaccactacactgtcctctcagcccacagagcactgggtgctcactccacatgggtattgcccgtggaagtccaagcaaggggcccaggtggtacctcccatggcccagagatggacaatgtttgagctgttccaatagaagagtgtgtctttatggcagggccatatggattcattctcatggcagccaagagcctggggctaccccagactctctaagggccctggctgacttttgagccccagagttaaagggcacaagcagtcctgagggctcccatcctttgctgtgcatgtcattagggttgccctctgtggcaggagcctcagtaggtgtggctgggacttgtagacagcaggaggggctctgaagaccatagcacctggtcgaagtccagcataatcctctgatcttccctgtttgcctgctcccagtgtggacactgccctgtcctcagaatttagtcctgctgtgacttcctggtcttggccccttttaccttagtttctccatttccaaaggtgggccagttggatgatatcagtggttttccagtcctttttccaaaagaagcctttctgtcatgcccaaatggaaaacagatgaaagggcagctgttccagcagaggcaggaagggccaggccccacccgctcaggctgcacccccctgcagcctaggctcctgagcaggccgggtgtgagcccagcggaggctgtgggctctcctctgccctgccaccagcggccatcccagagaagtcaacccttaggtcagtggccagcctcctttctggggtggcttcagtctggaaatttgccctctttccctttctcttccctttttcctccctctgctttcccccaaccccacacacaacttttttcctatttggcaagtttgaccaagttgcatctgagagagctgcattgggattgaaatccaaaagcagagcttggtgcctgattaccatgatgacaggctgcagctgacaagtgctcctggggaccaagaggaacagaccaaggactccctcacacatgggcctctgtgatgggtgtcctatacccacctgtgagcccggtgaggatcaccccagccagcctcaggctccaatcctgacctgagtggctttgagcaagctggtcagtgtttgtcagcctcagtttctttatctgcaaagtggggttgaccagacccacctcttagagttatggggagggtcacgtgagaacactctgggaaagcatgttactaccatgggcccccagggcctgcccggcacacaacactgccattgtgtccaggggacttgtgatagggaaaaggaccatggataaaggcagacatgctacagataggctcactgaggtcagtgggggagaaggtgagatggatcagggccaattgagaaggccacatgaaggaatcgtaggaatttgatttattcaaaatacaagttttgaaatgctgatctctaaatatgagtaaatagtctagaattaagttaggtcagagcaggtagagcctcatggctcttccccgtggactccaccccatcactgggcacatcactggagaactatagagttctccaaactcccttgctgcatagggatattgagtcatttgtttagactgctcagagcctgctattgggaaccccaggctggagaaagcacacagcaagaactggccaccataggtccagctctgagctttatttccagggaggagcctacctggctatattcagaggaggggtggaggagccttggactccaggccatgcctcggcttaggcccagactccatacagcccagccaggca

SEQ ID NO: 28083 - DNA, 2300 bp, Homo sapien
ggaccccaagctgcccagcccattctgagcctcagtgtgttcatctgtgctggtaggtggagtggtgcctgcagatcccttctttggcaatgtgtctgagagagcacctatccactctactctttctgtgggaaggcatgcgcgctggggagagctaggtgctgcccgtgatggacctggaggcctctgggatgcaggggactagtttccagagagccacacactcaccacagacaacacacagtttcttcctggcctgggtgtgatgagcagatgttctcagcttcctttggtccaacttgatcttacaggaagtagataaggtatgaagtaaggtcatgagctgtgcaaggtgtgagtgtcgctttggtcctcgtgtctgctacagccctgtggacagccgggaagagtggcccaactagctctggagctagtcgggccttggggacaggtcccagccatagtggccttattgctgtgtgactgcaccagtgtccagtgtttctgaacctgtccctatgtgtgtctgtcaaatgactatatgaatgtaggtagatggcaaggggctgttgtggcttgagcaacatgcagatttagaactccttgcttaagaccctgaccatggtgaggagccccttgtcctcacacagccttgaggtagcttgtgctcattgtgactcccctgcaagtgaatgatctctaggtaacccagcctccttcttctgtgtccccagcagcaagtccagtgcctggcagggagcagtatccctcgaggagatcctgaggcactgcctcttgagttcctcctggagggaaggaaggagggcagagagtgtgacattacccaggctgaaggggcaggttggacctggggctgatttggactaggggtacctggaaggggcacagagtaagccttggaccgctggctccaggaaccagcccaggggtaggccaggtggaaaccagccagctcagagaggagatgtcactaggacaggtgtcaccaggataggggctaaatgggtctgaggcccctgggtgtctgtggagggaggaacggcgctatgtgataagagagaagctcgctatgtgataagagagaagctcatgggggcaaagggttgggggtgggtaagccagggcttggggcagcatctctctcacctagcccgtgcaggttggcccatccctgcctttccttggcctcccctcagctggagtgggaggagcagccaggagttggtagactgtcccagtgcagcctaccttcatgggaaatcaggaagatgctgtgtgcacactggagctgtgagtaccaggggcattggccagacgctgtgagtgaggccctcccctcctgagcctgtttctcatctgtagcagggtacagtacccgcttccaggccggagagcgaccctccctgagctctgcaaagctgctcatgtcctggggatggggtactgttgctgttcttggaatactgaaactgggggaaggggtgtcctgagagctgcctactactcccaaccctacccctcaaacccagtgctttctctgtgggcctcacagcctagctggaagatgaggccccttccagctgtaaaacccacttaccatggcatctcttttttgccctccgccctgaggacattactccagcggtcttcactgcagcccccctgcccaactgtaacagcaaggacagctcggctgtggccagtcgtttcccccacacacctacacttctgcctgccacagggcactactggcacaactccagggggcgccattcacataggcaccgcctgcagaggggggatataaccctcacacacagttggccaatgccatcccggcctgccgcactcctggccacccctacaccatgctctctggggccccacagcttcctgcagtgagagctgcacccactttgcccggcagcggtccacagcccgccaccagcggccagtccagggaaccggagaggattggccggcaaaagtcagttgcgctcctgggcccgcttccagtagagtgccggcgccccgtccggccgcgcctgccccgccccggcccgccgcgagcgagagagcgaacgagcctccgcggccatggcccggcgctcgccctagctccactgcacagatgccacggcggagccggcgggtaggaacttggcgggggcgggggccgggactggggccgggactggggccggggctggggctgcgcaaccgcttcgcctccgctgcccgtctgggtctccactttgctggcgcttttgctcaatcgt

SEQ ID NO: 28084 - DNA, 2300 bp, Homo sapien
atgttggccaggctggtttcaaactcctgacctcaagtgatccacccaccttggcctcccaaagtgctgggattacaggcctgagccaccaccatgtctgaccaaaaatgattaaggattttaaggcaggccccacagagcattaagcccctagagctggcacccttcacaactctcttcccctcccagcaccgcaggggccctcctggccctgggacctcccatggagcaggctctctgtccaggatggagatggggaccctcctcactgccctgtgcccctcatgggctggacatgcccaccacccaggaggaaaggcgtaaagggctgggcaccgcccttttggaaccagaggcttggtggccccagatgggtctggctgaacccgcctttcggggggctgagataagccagccccagttactcagctgacgccccctccctgcagggcctggggtatggagcttcccagactgcacacctagcccctaccgcacttccattgtctccagacacgcgcagcaacggtgcccaggccaaaaacaggaagcagcagctctccctcctccagttcccgggaactgtctcagccgatcccccagcacccctccctggagcctcacctataggaggacggacacctcggaccctcccctgcacccagtgctgtagggagcaacttcagccctgggcctgggatgaatgccctcgccagcctggggccaggagacaggctctccctggctcagcacctgagcgtccacttacaggacactcacctgcagaggtgccctgagcgccattgtgggttaagggactttctcccctctggagacagtccctgagaagctgaaggtcttgggggcctctcaccaaatgtctttgggaggtgggaaaacatcaaatgcgggtgtggcttccctggaacagctctgtgtggggactcaggagccaagtcccccagcacacgcctctaacactttcagtaggggccacctctctggagccacgggtggctgccaacaccctgtggttcccagcaggcaccacccaggcaagagagagaacaggccggggaacaatgggctggcctggccgcaagcgctggggcagatcacagaccggatggcctaagctcatgccctggggccacctctgactccctgcaagtgtggcaagggtcccttttggacaccttgagaagctgcagctgggagaggaccacccgcctgtctggatgtccagcccaggtgtcagggtccaaatgaccagtcccaggccgcagcccttaccacccgccctggctgcaggggctcccagaagccaccaagggcctggctcggccttgcctatccgcatctgagcttcagtttcctcatctgctcaagaagggaggtgaatactgattaaattatgcaaactcttagcggcaggattaggtgtggctgggacagccaaggctccccagggtggtggcatctctggagcccggggatgggccctgtctcccttccgggccccccgctgggcttgggtaccttctctccccttcctccttcctccctccagaggggacccctgcagagctgcctccgccccagggctcagcctgtgtctgacccaaacagctcctgcctccccctgaggatgagttgggtgcacctccttcctgcaggaagatgagggctagagatggaggtctatgtcagggccacagagtctggaatcctccctggagctaaaacagccctgccttattcaccctgcgcatcccatcctctgcttcagccccgccgggctcgccctgcatgcaaggcggggctgggacccagggtctgagcttcgccctctggacatccggctcatcgcctgccaaaggtcctgtggctggaggctccggcctcctcaccctcccacagggtcccagggccgatccaggcctgcgggccaggaatgtgctaacggggcaacttgggccttgctggtccacgcaggcacctgtggactttgagaggggactgggtggggaggggcggggaggggcggggcggggcggtgccgcagagtgcagggcgggcggggccaggccagcagggagtgagcttgtctggccgcctcgcctcggagccactgcactgctggctgcagacacaggctgcaccatgaagccagccctcctgccctgggccctgctgctgctggcgacagccctcggcccgggccccggacccacagcaggtatgcctccctgcccttctgtgtccccgtctgtctgtccatctgtctgcagccaggcctg

SEQ ID NO: 28085 - DNA, 2300 bp, Homo sapien
gaccggatggcctaagctcatgccctggggccacctctgactccctgcaagtgtggcaagggtcccttttggacaccttgagaagctgcagctgggagaggaccacccgcctgtctggatgtccagcccaggtgtcagggtccaaatgaccagtcccaggccgcagcccttaccacccgccctggctgcaggggctcccagaagccaccaagggcctggctcggccttgcctatccgcatctgagcttcagtttcctcatctgctcaagaagggaggtgaatactgattaaattatgcaaactcttagcggcaggattaggtgtggctgggacagccaaggctccccagggtggtggcatctctggagcccggggatgggccctgtctcccttccgggccccccgctgggcttgggtaccttctctccccttcctccttcctccctccagaggggacccctgcagagctgcctccgccccagggctcagcctgtgtctgacccaaacagctcctgcctccccctgaggatgagttgggtgcacctccttcctgcaggaagatgagggctagagatggaggtctatgtcagggccacagagtctggaatcctccctggagctaaaacagccctgccttattcaccctgcgcatcccatcctctgcttcagccccgccgggctcgccctgcatgcaaggcggggctgggacccagggtctgagcttcgccctctggacatccggctcatcgcctgccaaaggtcctgtggctggaggctccggcctcctcaccctcccacagggtcccagggccgatccaggcctgcgggccaggaatgtgctaacggggcaacttgggccttgctggtccacgcaggcacctgtggactttgagaggggactgggtggggaggggcggggaggggcggggcggggcggtgccgcagagtgcagggcgggcggggccaggccagcagggagtgagcttgtctggccgcctcgcctcggagccactgcactgctggctgcagacacaggctgcaccatgaagccagccctcctgccctgggccctgctgctgctggcgacagccctcggcccgggccccggacccacagcaggtatgcctccctgcccttctgtgtccccgtctgtctgtccatctgtctgcagccaggcctgggctgacatccctctgggctcagcctctgtccatctgtcaggccatctgtggctgtgctaggggtgatgggaagaaattctgagggtccatgtggaggggcagcccatggggatgggaggtctgagccgggcccaccctaaacctgctggtagctaggagggaggcgggggagaccagcagaggcctccgcctgtgtccccagccctgacagggcgggatcacggagggggagccaggattgtgggtcctcatcagggtggggctgaatccaggaaagtctagggaaagccccgaactccagaaccaggacactggtcccaggctgccccccgtcccccaccccatttcccatcgaccctcttgccacttatctcacttgcaagcatctctcggcctcctcccccgacccctgtgcgccaccaaatccttggccagtacatatttattgttgcttttaagtgccaggcactgcacttggtgaagtggggccagcggggtggctcaggcccaggcctggccctcgactggcctcttttgatgggggatggggaagggccagggaagtgcaattccagcctgggtgcatgcacctgccccagtccctccctgcaacccttccttcatgccagcccctggaaatatggccttgcccaccggtcttatggcccataggagaagttttgggcccggcgcccacagccccttgtggtgtgcacccccacttccctttccccactgctgggacccctgcttgaaatgtccctcctctccccagaaaggaggggagcggccctggccttctgccctgagcacggagctctctttggggtctcaattgcagcccctgggagagcgagaagtgtcacgttcagaccctgcaccattccctaccaggcctcaaatgagactcttggcagccatatcccccaccccagtccaggcaagcaagaggggttcttctgcaggcttcagggcccccagaaggcgtgctgaccacagacaccctggggagccaagagaggtcgagggctccagctaccgtggcccactgaggacccctgcctgtgggatagaggacttggtggctgaagggcagtcatgcccaggggcttctcctga

SEQ ID NO: 28086 - DNA, 2300 bp, Homo sapien
aggggcactctggatatcaccaggggcactctggccagggcccaggtgaggccaggtcggggctatccttcaggagccccgaaaacctggtgataccaaagggcccacaaacagggttttgtgcctgcagagtagagtaccaccggttctgagccctggagggctgtgtctctggggctcccagttgagtgatgtacgagtcactcctcaatccttattttatttatttaatttaaaaaattatttaaacaaatagagatggggtctcactatgttgaccaggctggacttaaactcctgacttcaagcagtccccccatctcagtctcccaaagtgctaggattacaggggtgagccactgcacccggcctcaatccttatttcggcctgagaggaaaggccgtggccccatttgcaggggagaagactgaagctggaggggcaggccttgctctgggttgcacagcaggaagagaagtgggagctggccacgaggcttcctggacccgacacgctggtggggtacaccctggttctccaggtcccgtggggctcagcccaggactacctcggggggtgagggacttaaatcctctccttcattctcatcgccccttcccccatcatttcctgaggaaggacattcagggaccttcctggctgtgcctcgggtcaggaccagaatgacacccattcctttccctgggcctttgctcaggcggtccctgcaccctggcctctgcctgaccaggatggtggggagaggaggggggacgtcccccacgctgctgtctccactgttcctgctgcccaggcctctgagcttccaggactgcagcgggtgggtgggtgggctggcctaagcccaggaatgcacttcagctcctggttgagcaatgtcactgaggcttgggagtcgggtgggggcgggaggaggcatccacaggccccccaccgcgagaggcagccgtgggaacagcctgcctctaaacaatcattccagtccaggctgaccaggggctctggctggacataggggcctggcaggctgtgtggcctgtaaggacacagtctgtctctgtgcctcagtttctctgctgcccagatgggggggcccggcttccaggtgtagacatctggagcaggcagtgttcagctggggaggaagcggggaggactgtgggggccacgtgggaagaagtccagcccacatcacctgcacccctgctgagcctggtcaacagagcccctcagtgggtcctcactctcctggctgcctcccatttaggcaccctgaggcctggggagaacagagccaggccagtgtccctagagaggctgcgctgccagcacagtaatagcggatttggattcagggaagcagacccgcagctagggtgggaaagagctacaggcagggcgtggcctccacacagcctccctccctggaggtccatgctgcatttccaggacagcaagtcctggacaaatggtcccggatgccaagggctagaggcatggtctgtctgcattccccacatgggcgtcttgtagtcaccagcatttgatgctgtcaagtccccctgtcctctgtgcagactgggaagcccttggccaccctggggagttgtgggacccaggccaggctgcagaagcataaggacttgaacccaagttttaagtgacaccaccttgtgtccccctccctctgcctctgttcagctccaccttgatgctgactaggctgggccatgaggagagggttaggggatagagatgggagctggggagcagggctccactctgggaggggggcagccttgccggatccaggggagagagttgagcggccccagctctgctttcccagagctgccgggaacccggggaatggtgtggaggttccagggagccctgcccctacctggcaaccgcagtgcagcaggcaccaagttctcctgcacattgcgacagtgtgaccctgggctctggcgggcggtaggtggggcctttggacctactagcagtgagggagttaacacagcagctgactcctctaggcaaggaaaactcccctcagacgctttgctgcctggcctcctgccagcaacaagcaggagctgaaaaccagaagttgaggcgtgagtttggccactccgtagtgtgcacttggtgagggcagcagctcgccacagctgccagccatctgtccattcacccatctgtccatctggcagcccgctgttcagacctgtctgtctgtccgcccatctgtaagcccatctctgtcccattgtct

SEQ ID NO: 28087 - DNA, 2300 bp, Homo sapien
cctgccgagaccccagagctggcctgaggaggtggggagggagggtggggagggggcacaggtctcaaaaggcccctgactgtggctctgatcacaaccctctggcacccacaaccttccgtggctccccaggacccaagggcaggcccaggatcttgcaagaccagtctgactccctgtctctgtcgcgttccagcaactctgaatgtctgtctgcctggtcctcagcctccagacccttgctgcattcaatcactcattccttcatgcaaaaaatatttctagagtttgcactgcatgcctggcactggggaatcaacagggaacagacacttaggtcctgccctcatgccaagaaaaacaaacacacacagggaaagtgctgaaaccacaagccaggtaaggggaatcaagaggcatgaggtatgggcagagtggtcagggagggcttctcagaggaggcaacgtgtgaaaagagcctggaatgtggcctaaatggtcagtgcaaaggccctgaggcaggtggtataggctggtgagcgataggcaaagagtgaatggagtggggtggggagaagaggatgaagatgcaggctggggcccatcccacaagacctcctaggtcccataacaactggcttttgctctgtgccatgcaggcttagggcagaggaatgagcaggctggggagtgttttcacagggtccctctggcagctatgacggggataaggataaagcccaaaggggaggctgtgggtatcaaccaggcaagagatgatggcctgggtgggagaaagagaagaatcaaggatggtgccgactagcgaggtaaaccctgcagaaagggcaggtttggggatggtcaggagcttgattctggatacttcatcagacctgaagagcatgggtgcacgtataaaaaaataaataaataagcatgggttcacgggcaagggcgggctgagagatgaacatggaggtattgacattgagtggctgctggatgccatgagcctggccaaggtccccaaggcagtggcgaggaggagatgaggaggtcaaggaggagacagaggatggacccgaaggccgaagaaaatgcctcaagggagtttcaacaccgggcgcggtggctcacgcctgtaatcccagcactttgggagggggatcacgacgtcaggagatggagatcatcctggctaacacggtgaaaccccgtctctactaaaaatacaaaacattagccgggtgtggtggcgggcgcctgcagtcccaactactccagaggctgaggcaggagaatggcgtgaacccggtaggcggagcttgcggtgagctgagatcaggccactggaatccagcctgggcgatagagggagactccatctcaaaaaaaaaaaaaaaaaaagagagagagtctggctctgttgcccaggctggagtgcagtggcgcgatctcggcgcatcacaatcccttccccgcccgcccccgggttcaagtgattctcctgtctcagccgccggagcagctgggactacaggcgcgtgccaccatgtctgactaaatttgtatttttactagagacggggtttcactatgttggccaggctggtctccaactcctgatctcgtgatccgtctgccccgacctcccaaagtgctaggattataggcataagccaccacgcccggcctcttttttttctttttcttttttttatctggagactgagttttgcacttgttgcccaggctggagtgcaatggtgcgatctcagctcactgcaatctccacctcagcaggagagcaggaatcttcagtgatccacgggcagatctgccaccattgtgggcacctgttcctcccgcaacctttgtgcccgcctctctccttccagtacctattgcatgaccccccacgtccgcctcccgccattgccagcaagtgcctcgcgcgggtacctggctgcgcttattaatccgttaagctcgctctgtcacgggcgccgtgatgtgctcacgcgcccactccctcaggtttaaaaggcgcgttgcccggcaacagaagaaactgctggcttagcctttggcggagttggcggctggacgaggacgctcagagcccagctctcgagagttcaagcaaccgacggttccccactgctcccaggagcggttacctgggcactctgtgcccctccttcctgttcgggcccaggccgaggacctgccagtagggctcagttgcctggagcccgttcagcccatcccccagttcactttgcctgtgggatctc

SEQ ID NO: 28088 - DNA, 2300 bp, Homo sapien
acccactcctgccaccttgggagcggttgccagacagagccgcactgggtgctggtgtcatccagggaccccacacacttccttaaatgtgatcctgcttccctctgggcagctgcatcctctcctcctgcaggaccgtctggaaacttggctctcagtttgatctcccttctctcctctgcctgccccaagcccctctttctaaaaaagtgatgccatgttcatgggattatttcttgaaaatacttggcggcctccatgcttctgttttctttgagccaggtggtcaggagggcttacaaagaatgcctgggctcccccgcagctgccggcagatggggtagcgaatggtcctgtgcctccacctgctccgggagggagtctcccgtctctaggcctggccccttcctaaccctccacgtatcctgttctccagagacttcagaacccactcctgagaacagcggagccaggcgcttagaggaagaccaaatgctgccaggacacggattgtccagggattacattccagcatcttattaggtatctggatctgttgggaaaaaaattagaaactatgtataaaacttaaaaatattcaagtatcaaaaggttatttaggatgaaagttttaaaacaagtcatcagcaagctgctgccaccaagtggagacttatacaaaagttgagcgagtccactgagctgagaggacagaaatgaagtcacctgtgctggggcaggggcagggacactgggggcagggagtgtgtgggcagagaagccagagaagtccaggcctgtggaagccaaacaggagagcgtgggccggaagggcggtcaggatcgggggacgaggtcgctctccctggagaacgaaccctaaagtgcgtagcctggggttccctccctgggggtcctgtcccccgacgtttcacgggccttctgagctgccttccaaggaggactaacacggcaacaaaagacccatttctgcacaaaaatccttctgggaagaaaaagaagaaagccaagaatggagtcaaaacgctacccagtgctgactaagcctctcaaaccctgttctaagtggagtgtggtttctaagtcagggaaatggaagaggccccacccacacagggacagggccacggcccccacaggatgaagcagcagcgtttattcaagatacaacagtgagggaatccggtcacgttcccttctccccagagagggcacttcttgacaagtgattcagtagaaatcttttagactctataagttaagttcataaaaaccattgctttcaccctgtctccgagggccaggcctggactcagagatgaactggcttggggcgccctcgggtggccgcataaaaaacccacagtctgaggccagcctggggctttcagacctgggcgggatctgcccaggccacctgtccttctgctttgggccgctgtctcttggcagatggcctgacacctgggggtggcccaaggatgcctcagaaaatcttgattcccactctacagatggcccgattagccagaggtttccaggccatctgtccgcctccaggagatggactgggacctttagacatcggtggagaacaggatgctctgtctcttgctgtccagggcagggatggcctccagccgcaagaagtacagcagcacctcgacctgccctcgcagagtggggaagaggagagtggctcagagcggggctcacagctgctggtggggaggtctttggggcccaagtccccaagtccacctcaggtgctagaaacccctgctggtgtcatgaaccccttacagtgagacgggggtggggtggggtcctgacaaggcatgacttgttgggtggggggtggttatttattttagagatgcacagggccttgctctgtcccccaggctggagtacagtggctccatcatggatcactgcagcctctaactcctgggctcaagcaatcctcctgtgtcagcctcccagatacctaggattacagatgtgtgccacaatgcctgcctaatttttctttgtattttttctggagatggggtttgctacattgcccagactggtctcaaacacctgggttcagttgtcctgcctcggcctcccaaagtgctgggattacaggcatgagccaccacacccgaacacttggggtggttttaagcccccagcaaggtgcaccagcaggaccaggaggtggcctgggcaccccctatcactcccatccatgcaaacctaggcaagtccctctctctgaatctcagcca

SEQ ID NO: 28089 - DNA, 2300 bp, Homo sapien
cctctacagggtggcagagaaggaagcagtcaataagatgtccctgcacaacctcgccactgtctttggccccacgctgctccggccctccgagaaggagagcaagctccctgccaaccccagccagcccatcaccatgactgacagcaggtccttggaggtcatgtctcaggtatgggaagacagtctccagcccatgcaaccccagcctgacagaggtggtctctgcctgccccacccccagtcctgcccatcttccgacttgcattgtatgtggtggtggctgagattcagagagagggacttgcctaggtttgcatggatgggagtgatagggggtgcccaggccacctcctggtcctgctggtgcaccttgctgggggcttaaaaccaccccaagtgttcgggtgtggtggctcatgcctgtaatcccagcactttgggaggccgaggcaggacaactgaacccaggtgtttgagaccagtctgggcaatgtagcaaaccccatctccagaaaaaatacaaagaaaaattaggcaggcattgtggcacacatctgtaatcctaggtatctgggaggctgacacaggaggattgcttgagcccaggagttagaggctgcagtgatccatgatggagccactgtactccagcctgggggacagagcaaggccctgtgcatctctaaaataaataaccaccccccacccaacaagtcatgccttgtcaggaccccaccccacccccgtctcactgtaaggggttcatgacaccagcaggggtttctagcacctgaggtggacttggggacttgggccccaaagacctccccaccagcagctgtgagccccgctctgagccactctcctcttccccactctgcgagggcaggtcgaggtgctgctgtacttcttgcggctggaggccatccctgccctggacagcaagagacagagcatcctgttctccaccgatgtctaaaggtcccagtccatctcctggaggcggacagatggcctggaaacctctggctaatcgggccatctgtagagtgggaatcaagattttctgaggcatccttgggccacccccaggtgtcaggccatctgccaagagacagcggcccaaagcagaaggacaggtggcctgggcagatcccgcccaggtctgaaagccccaggctggcctcagactgtgggttttttatgcggccacccgagggcgccccaagccagttcatctctgagtccaggcctggccctcggagacagggtgaaagcaatggtttttatgaacttaacttatagagtctaaaagatttctactgaatcacttgtcaagaagtgccctctctggggagaagggaacgtgaccggattccctcactgttgtatcttgaataaacgctgctgcttcatcctgtgggggccgtggccctgtccctgtgtgggtggggcctcttccatttccctgacttagaaaccacactccacttagaacagggtttgagaggcttagtcagcactgggtagcgttttgactccattcttggctttcttctttttcttcccagaaggatttttgtgcagaaatgggtcttttgttgccgtgttagtcctccttggaaggcagctcagaaggcccgtgaaacgtcgggggacaggacccccagggagggaaccccaggctacgcactttagggttcgttctccagggagagcgacctcgtcccccgatcctgaccgcccttccggcccacgctctcctgtttggcttccacaggcctggacttctctggcttctctgcccacacactccctgcccccagtgtccctgcccctgccccagcacaggtgacttcatttctgtcctctcagctcagtggactcgctcaacttttgtataagtctccacttggtggcagcagcttgctgatgacttgttttaaaactttcatcctaaataaccttttgatacttgaatatttttaagttttatacatagtttctaatttttttcccaacagatccagatacctaataagatgctggaatgtaatccctggacaatccgtgtcctggcagcatttggtcttcctctaagcgcctggctccgctgttctcaggagtgggttctgaagtctctggagaacaggatacgtggagggttaggaaggggccaggcctagagacgggagactccctcccggagcaggtggaggcacaggaccattcgctaccccatctgccggcagctgcgggggagcccaggcattctttgtaagccctcctgaccacct

SEQ ID NO: 28090 - DNA, 2300 bp, Homo sapien
acacctgggggtggcccaaggatgcctcagaaaatcttgattcccactctacagatggcccgattagccagaggtttccaggccatctgtccgcctccaggagatggactgggacctttagacatcggtggagaacaggatgctctgtctcttgctgtccagggcagggatggcctccagccgcaagaagtacagcagcacctcgacctgccctcgcagagtggggaagaggagagtggctcagagcggggctcacagctgctggtggggaggtctttggggcccaagtccccaagtccacctcaggtgctagaaacccctgctggtgtcatgaaccccttacagtgagacgggggtggggtggggtcctgacaaggcatgacttgttgggtggggggtggttatttattttagagatgcacagggccttgctctgtcccccaggctggagtacagtggctccatcatggatcactgcagcctctaactcctgggctcaagcaatcctcctgtgtcagcctcccagatacctaggattacagatgtgtgccacaatgcctgcctaatttttctttgtattttttctggagatggggtttgctacattgcccagactggtctcaaacacctgggttcagttgtcctgcctcggcctcccaaagtgctgggattacaggcatgagccaccacacccgaacacttggggtggttttaagcccccagcaaggtgcaccagcaggaccaggaggtggcctgggcaccccctatcactcccatccatgcaaacctaggcaagtccctctctctgaatctcagccaccaccacatacaatgcaagtcggaagatgggcaggactgggggtggggcaggcagagaccacctctgtcaggctggggttgcatgggctggagactgtcttcccatacctgagacatgacctccaaggacctgctgtcagtcatggtgatgggctggctggggttggcagggagcttgctctccttctcggagggccggagcagcgtggggccaaagacagtggcgaggttgtgcagggacatcttattgactgcttccttctctgccaccctgtagaggacggaagcagagggtgctgtttcaacgccaccaccaggagagaggcagaggggctgtgccgtgctagagtcctcagggagggagtgacctcgaccctggctgtgctgcaagctgactccagccttggtacttctgggtctcagtggcccaggacaaggggccagctctgggctgatggggaggtcttcatgatgtgcttgggagggaagaggcgggtccaagtgcactgctggccacggccaaagctctgagctctttgttaaggccacagtgcagagggaggcgggtggcaaagaggagaggcaggggcgggggtggcagtggtgctagtccttagaagcagtgagttactgcagacaggggtcgggggaaaaggtccttggtgctgggggtctggtgggagcagaggggcaccccaacggcctggagacctggagtcctgggcagccacaagagagctgggctacctttccaggcggtctagaaggaaaaggaaggtgagcaggttggcctccggcagggacaacaacaggttgagcatgcagctcttccttgcaactgggtctgaaagagctgcaggaggcagtgggtgactcccctgggttacgacaagccggagacctctcccgaggtggtcacatggagcgcccgggacacgagtccttgcgcagtttaggcttgtcatcatcgtcacacccacagcgctggccgccagtgaggaccctgtgaggggcacctgtgtggggtgtgaaccacctgaacgccttttctctacctcgcagggctcagcagcacccggtgaacagcagcaggaggagccgctagagcagctgctcatgggcagagcagcccttgggcaactcctgccaccaccccctccccagggagcccaaggcaggggaggctcagcatggaatgaaacaggggagtgagggacacaaggaggtgggaagtgggagggtcccagccccaccaagtacgcagagacccccttgtcgtcctggacaccacaggggcacctgcaggctgggagaccaggtcctctgtgcatgggcccgggaggcagacctgccccaagggtgatgcagaggccacaggtgctgcacgctccagcgcccactctagacatcagcctccaggttgactaagggtcaggtcatgtttgaaaccatgcttggctggaccgggacccatggcaaga

SEQ ID NO: 28091 - DNA, 2300 bp, Homo sapien
ctgctcactgcaacctctgcctcccaggttcaagcaattatcctgcctcagcctccagagtagctgggattacaggtgtgcccggctaattttttgtatttttagtagagatggggtttcaccatgttggccaggctgttcttgaactcccgacctccggtaatccgcccacctcggcctcccaaaatgctagttttacaagcgtaggccacagtgcccagcctagataatctttcagaaaaagaagcaaatggaattctccccaactcactgtgaatttagtataggcttaaaaccaaaccagacataaatagtacaaggaggcaaaagtatggactaacttcttatggacatatatgcaaaaacgctaaataaaatattagcaaataatccagcaatggattaaacatgtatcacgaccaagttggggttttcctaggaaactaagattatgtaataaaagaaaaaactattaaagtagtacaaactatcaaaggaaaaaacctgtatgatcattgcaacaggttcatttgcgacataatacaatttttttctttttttttttttaagtctttttggctgtaagtttattcaatgcaaaataatcctctccaattctactgaggtggctgacggtgtccacgaccaaatttgcctctaaactggaattcggttgctgacccagccccagcctcggctttcttgtcggcaccagggggcacagcactccttctgtaggtatctctgtcggcttctcctcttgtgagtcttgcaggtcgctcaccctccagacctttagaccgaggcctgccagtccctggacggctgcggcgtagggtggcaggcacaatctccaggggcagatgaaggtaatcacggagatactggatatcctcattggtaaggtaccagtagacatgtctccaggcaaactgttccttcacgtagtagcctcgggactacatgacaggaaggttgggcacacacattcttttttttttgagaggagtctcactctgtcgcccaggctggagtgcaggggcgcgatctcggctcactgcaacctccgccccctgggttcaagcaattctcctgccttggcctcccgactagctgggattacaggtgtctgccaccgcgcctggctaatatttttgtatttttagtagacacgggtttcaccatcttggccaggctggtcttgaactcctgacctcgtgatccgcccgcctcggcctcccaaagtgctgggattacaggcctaagccaccgcgcccggccgggcacattcttgtctgccaactccaggtgcttaggcatgtggacatccttcttgaccaccgtgacttcctctttaaaaaggagttcataaatggcaatccggtttttcttaggcatcagcattctggggaggagcagccgctaaggtggcagggtggcccggatgggggccgatggaactcgaactcccccagaatttctttaatattttatatatatatatatatatatatacatatatatatgtatatatatacacatatatatacatatatatatacgtatatatatatgtatatatatacatatatatatacgtatatatatatacgtatatatatatgtatatacatatatatatacatatatgttgctcgcttattctttttgtctgttcccttatgtaccgggagtgccaggaggacagggctttgtgttttcctcactgctgtctggctcatgcatagcacagtccttggcacacggtaaacacgctgaggagaacttttgggactagcggactctgagcatcattccgctgggcccagtggggcctctgaagggacccgccttgcccggctccagcccaagacctgaggcatgcgcaccggctggccggctactttcttgaccggccaagtggcagagcggctgcgcgacccagtgccgagacggacgcgagccggagatgggggaaggggagggggtggtggtgggggacggcggcgcctgcgcagtgaaggaatgtaggcggggcctccacgacgcctgcgcagacggccgcagccctgctgggcgcgaaggggctggccaagggcggggcccgcgagggaggccgggcggcccggcaagcggcgctgcggggtaggctgctttcctgaggccggactcaacgggtctcggctgagccaccgggtgagctcaccgcccagcccaaaccaggagattgcgagggagcgatgcggtgcagcgcggtaagagcagcagccgggttcccgcagtgttcgctggcgggttgg

SEQ ID NO: 28092 - DNA, 2300 bp, Homo sapien
aaacttagaattatggtggaaggggtagcaggcacattcttctccacatagtggcaggaaggaggagaatgagagccaagcaaaggggaagccccttaccatcggctgtcatgagaactcactatcacgagaacagcgtgagggtaactgcttccatgattaaattacctcccaacaggtccctcccgaaacacatagggattatgggaactacagttcaagatgagatttgggtggggacacagccaaaccatatcagtatcctctagattaattttcataaaatgtacttttccttacatttctttcctactcaggatcatttattgacttagtgtgactcactgaattctgcctatcttttgggactctatatgaacattccccagcagcttccgttaactgtgtgactgtacttttcctttctgtgtgccatgttcacttctgcttcctttcgttgtctgtctttttgccagcctgaattccgcatcctcctgtatacctgttctgttagtggctatctccctctatctgtggagatcatttgctccctgttacctctacagcctggatcccaccacctaatgaaccagcagggtctttaaaaatacttattgattagatgtggatcttattttttaacataaaaatttgttatttcttaagtatttacaggtatttaaacatattcctggccaggtgcggtggctcacgcctgtaagtgcggtggctcacgcctgtaaattcagtggctcacgcctgtaatcccagcacgctgggagaccgacgcgggcagatcatttgaggtcaggagtttgagaccagcctggccaacatggtgaaaccctatctctactaaaaatacaaaaaaattagccaggcatggtggcacgctcctgtaatcccagctacttgggaggcctaggaaggagaatcgcttgaacctgggagtcagaggttgcagtgagccgaaatcgctccactgcactatagcctgggtgatggtcaagagagactccatctcaaaaaaaaccaaaaaaacgaacaaaaaaaacttcctgttctttttgtattaaacaaatgattgtgtcagttttcacaggtttaaaattttagtagttaagtaatcatgtgattcacgtagatttgattgacgcatcatcattatttaacattagtgcttcgttgttttttacatttagagagacagtataacatactggttaaggtgcaaaatctggaaccagactgcctgggtttcaattttggctcatctatttattacctgtgacatgttggcaaattatttaacatctgtgtctgagtttcttcatctgtaaaacaaggtgataatagcacctacctcacgtctttaatgaggcttatataagttaatgtatgtgaagtgttaatgtatttgtataaccaagtgctaggtatgtgttagctattgttataattgttattatttatgtggcattttatggtgttaaaactattttgcatttactttggtcagagtaaaatttttgtgtttctagtaggtagcttagatttttggttttcccagagactgcttttcccttcttgcccacctatgatctcccttcactatctgtgtacagttagtttaccaccgactggctaatcctggagtcatcttcacctgtcttgccctagaatattatgcctctggccaactggttaaaaccccacttctggattcaagttaatgtatatcatttaaataacagctttgtagaaatgtaattcacattccataaaatttactcttttaaaaacatgtaaaacaaagtgtataacttatttctccttgataattaaaagatgaatgatcttctggttttgaagaaattgaactttaacagactctaaggcaagattattgtagatctaaatcattgtgtagatcctggatttcatctcattacacctggggcaggaactgtgtattctatgtagccttttattgctgacatttttgccttacattttttgtattaaacacataggcacagcttcttcaaccaagcggagcacttctacaggtaataaagaatccagttctactagagaaagattacgtgaacgtacccgattaaaccagagcaaaaaactaccttctgcaggtcagggagctaatgacatggcattggccaaacgttcccgcagtcgaactgctacagaatgtgacgttcgtatgagcaagtctaagtcagacaatcagatcagtgacagagctgctttggaggccaaagtgaaggatcttctcacgctgg

SEQ ID NO: 28093 - DNA, 2300 bp, Homo sapien
actccatctcaaaaaaaaccaaaaaaacgaacaaaaaaaacttcctgttctttttgtattaaacaaatgattgtgtcagttttcacaggtttaaaattttagtagttaagtaatcatgtgattcacgtagatttgattgacgcatcatcattatttaacattagtgcttcgttgttttttacatttagagagacagtataacatactggttaaggtgcaaaatctggaaccagactgcctgggtttcaattttggctcatctatttattacctgtgacatgttggcaaattatttaacatctgtgtctgagtttcttcatctgtaaaacaaggtgataatagcacctacctcacgtctttaatgaggcttatataagttaatgtatgtgaagtgttaatgtatttgtataaccaagtgctaggtatgtgttagctattgttataattgttattatttatgtggcattttatggtgttaaaactattttgcatttactttggtcagagtaaaatttttgtgtttctagtaggtagcttagatttttggttttcccagagactgcttttcccttcttgcccacctatgatctcccttcactatctgtgtacagttagtttaccaccgactggctaatcctggagtcatcttcacctgtcttgccctagaatattatgcctctggccaactggttaaaaccccacttctggattcaagttaatgtatatcatttaaataacagctttgtagaaatgtaattcacattccataaaatttactcttttaaaaacatgtaaaacaaagtgtataacttatttctccttgataattaaaagatgaatgatcttctggttttgaagaaattgaactttaacagactctaaggcaagattattgtagatctaaatcattgtgtagatcctggatttcatctcattacacctggggcaggaactgtgtattctatgtagccttttattgctgacatttttgccttacattttttgtattaaacacataggcacagcttcttcaaccaagcggagcacttctacaggtaataaagaatccagttctactagagaaagattacgtgaacgtacccgattaaaccagagcaaaaaactaccttctgcaggtcagggagctaatgacatggcattggccaaacgttcccgcagtcgaactgctacagaatgtgacgttcgtatgagcaagtctaagtcagacaatcagatcagtgacagagctgctttggaggccaaagtgaaggatcttctcacgctggcaaaaaccaaagacgtagaaattttacatttgagaaatgaactgcgagacatgcgtgcccagctgggcattaatgaggatcattctgagggtgatgaaaaatctgagaaggaaactattatggctcaccagccgactgatgtggagtccactttattgcagttgcaggaacagaatactgccatccgtgaagaactcaaccagctgaaaaatgaaaacagaatgttaaaggacaggttgaatgcattgggcttttccctagagcagaggttagacaattctgaaaaactgtttggctatcagtccctgagcccagaaatcacccctgataaccagagcgatggaggaggaactctgacttcttcagtggaaggctctgcccctggctcagtggaggatctcttgagtcaggatgaaaatacactaatggaccatcagcacagtaactccatggacaatttagacagtgagtgcagtgaggtctaccagcccctcacatcgagcgatgatgcgctggatgcaccatcctcctcagagtcggaaggcatccccagcatagagcgctcccggaaggggagcagcgggaatgccagtgaagtgtccgtggcttgcctgactgaacggatacaccagatggaagagaaccaacacagtacaagtgaggaactccaggcaaccctgcaagagctagctgatttacagcagattacccaggaactgaatagtgaaaacgaaaggcttggagaagagaaggttattctgatggagtctttatgtcagcagagcgataagttggaacactttagtcgacagattgaatacttccgctctcttctagatgagcatcacatttcttatgtcatagatgaagatgtaaaaagtgggcgctatatggaattagagcaacgttacatggacctcgctgagaatgcccgttttgaacgggagcagcttcttggtgtccagcagcatttaagcaatactttgaaaatggcagaacaagacaataaggaag

SEQ ID NO: 28094 - DNA, 2300 bp, Homo sapien
ctcctgagctcaggtaatccacctgcctggtcctcccaaagtgctgggattacagacatgagctaccacgcctgacattatgtcgtaatttaaaaagaagggaagggaatactgttccaccaatttaatgaccttttttttttttttttttttttttttgagacggagtctcactctgttgcccaggctggaatgaaatggcatgatttcggctcactgcaacctccacctcctgggttcaagtgattctcatgcctcagcctccaagtagccaggattacaggtgtgcaccaccacacccagctaatttttgtatttttagtagagacggttttaaccacgttggccaagctggtctcaaattcctgacctcaagcaatctgccctcttcagccttccaaagtgctgggattacaggcgtgagccactgtgcgcagctgatttaatgctttttttatgtgctctctattaatcaaacttcatctaaaattctgaaaatatagataaaagcaaaataaagatgccaaatgtaataaacttcaaataagatgaactttaagtggtgtttatcagttgacgtttaatgtatgaggcatcactttgtaaatctttgtaaagataggaggtgaaaaatatttctacaagttgcaaaaaactaatacttatgagctacattcagtagctttttagtacatgattagttagtacagtgcgtctcaaacctaatcgtatataaaaatcatgtggagagtttttaaacaggtaaaattcccagacctcatcctggtaaaccataatctctggggactggggcctaagcttgggattgttagtttttcaaaactccctgggtaggaattctacttctagctatgtgggagtaacaggctggattattctgccatcacaaacaacgattaatagaaagatggacaaaatataagaaacaattattttcagacattgtacgtaactgtgatccctgaacaaaaattttaaaatgaggtaagtcctactgtggcccacagtcttttcctggaggcaatttccaggtggtggtgcagggaagatgaacctacatggagcagggaagagaaaaccaattggatctgagtagacacaaatcaacattcaaggagaaggcgactgctcgaatttgcagggcagatactgggaggagggagctgcatagagaaaggagtatagaaatctgcgtaggcatccctttgagtcttttcctgaataccaacctgcacctgcattgggtgaaaccccacaaggataattttccaggaacagccccgcaagaataattttccaggaacaatttccaggaacagggagctatcacacaaacacttctggtagctcacctagggcaggaaatcatttgagttcccaccagccgctgtggagacacctctttgaatagatggcattcattatagactcctaaaggaccacacctgaaagtatcatagaactaaataccctcagagtaaatagtattctagatctgccgtaaaagatctttaaaaataagatgcagaaggaccaaggagatccttaagtagctatagtaggcagcctctaaaatgttccccagcgatcccccattggtggtagttgctccttgtgtaatttgctcctgttgagtgttggctgcagctcgtgatttgcttccagtgaatatggcaaagcaaaagaagtggtgggataaggttatcactgctaaaatcgttacaaaaagctttgcttctgccttgaatgttcctcttgctatcacttagagccacctactccagggaatcccagttcccatgttgtgagccagccctgcagagaggcccacattaggaagtgtgggaacagatcttctgaagcttgccagcagccatgtagatgagcttggaagcagatcttcgatcctcgagataactgcagccctgctgacaacctgattgcctcctcgtgctagaccttgaaccagaggcactccgctaagctttctgacccacagaaactatgagatcataaatggattgttttaagccactaaagatttgaagtaatttgtcatgcagcataggtaactaatacagtagtgtacttatttgccaaagtaataatttttaaaggaatacagcaaaatataagactccatcataatctggcatgcaataaaaaattactagacaatgaagaagcaggaaaatgtcacctataaccaggggaaaaatcagtcaatagatgcagacctagaacggatagaaatgataggattagcatgcagcaatgta

SEQ ID NO: 28095 - DNA, 2300 bp, Homo sapien
taggccagagttaaagaaagtgccttaactcttcttgtgagggcagccactgccctccgtggccaaggcaggacctccaagactcagtggttgagttgtctcctaccaccatgcccgccctccccaggtactgggtccatgccccctgtgcccaccctccccaggtgctgggtccatgctgtttgaaccaaagccttatttaaaggtggtcactggagatgctctcaggccagaactcaacagctatttttgggaatagggatctcccgtgtgcctaacgcagtagctattggtttgaacaatgtccagacaagacctgtacctttgagaatataactgtgtttggcacctgcatagcaccatgaggaagaccagccaccagtggaagcggggtcactgccccacagactggatgcaatgaggggctcacaggaggcccagccagcccgattgtgggctgaggggtctgcattcaagcacgatgttctagaataggagtttaacgtgtctacgtaacctagaatgtggttattaggaaaggggctgtgcatgtgggtgcagctggcggcacacctggtcaccagatggccagaagctgcccatcagccctgcccagatgtcagcctgggagctcaggctgctgccgctggctggatgccctttggtgaaatgcctgttttcagctaagaaaggagaggccaggcaagcaaagtcatgccacaaagcatatcagagacccccgcagactcctggccccgtcccgccccctgtctgagttgtgtttttgttgctgttcctctgttgatggccagctctgctgttggcatgagccactgatgttcatgtgagaattactgtttttaagtgtctctccacttaggtgtcctcagttcccacttttgctctcatttgccttcacagaggccactccacctgtccggatccagctgtctggtcatggtttggtttatttattttgtccttcaggggctgttttgccctaagaatgagggggcttcccctggtctgcagttcccaactttatcccttgctggccatgcgagcccagccctggtgcctcatgggatgggggggtaggggtccccaggatcttctggaggaaggtggccatggatggatgggctgtatctgtgttttccctctgggagtctcatgggtccagcatcaggcctgaggtcagcaacagggaaagagggtgggcacggggagggcttggccccgcctatctagaggcttgcctcgggcccctccttggggaaggtttgcgtgcagagctgcaagggagagggttccagaagcattgccttttgcctcgtctaataggatccttaggacactgtgggctttaggaatgactatagatgctcacacgtgtttaaagtgacatttggagatgctctcagtcctgtggcatctggcacgaagtctccaagaagccactttgcctcttctcccttcaagcacaagctttactgcaaaagggccagtcgcgtttctatttctctcgatcccaggcttctgcggaccgacgatacgtttaaatgttgttctagtaaatattcttgaatgtattaaaatggctgaaacaacaagcttgggcttttctagcttgccctccactccctgccgtccctctgacgtcgcataaaccagaacccagctccctcctgggactggctgtggagagaagggcacctctgagccagcctgtggccctaccccaaggcgcacttcctcatgtgggcagatcctgaccaggagtccagggtggcctcccctgggccacagcacatcaccgtgtggcctggggctgtgggacagtgagccctgtaaccactagggttctgtgacagatgccaagaccccagagaccgtggcagagctacccccaggagagcggaagcccctacacagcccagacacatgccttccctgggggctggggagtgtgtctcgaggggttttgtttgttttgaggcatgtatcatcttggaaataattgtcaggatgtataaaatagagaaaaagaaaaaaggtatcctacccagaggcaaccagataaacttttttgcctgtgcattgttttttgttggttttttcgagacggggtcgatcacggctcaccacagccttaacctccagggctccagcaatcctcccacctcagcctcctgagtagctgggaccacaggtgtgtgccaccatctccagcagtttgtttatttattttttctttttttttttttggtagaaatgggcttttcgccatgttgcccaag

SEQ ID NO: 28096 - DNA, 2300 bp, Homo sapien
ctagagtttctcaggcaaatcccagccactacccctccatccgtgtcccctgtttccccagtgctgagctggctgagctgtgagctttcctgctccttgcctcaggaagccaggggcagcccagtcacctctggccagaggcgggccttaggccaaggctgacctggctggtctgagagctgtgctgggcttcttcccatatcagtctgtgaattacagatccccaaatatgccctgcgtcgcgatggaggagggcaatcaatggcaatgactgcctcatgggcaacgcgatgtgctggagatttcagtgctctcgtctgggttctggtcttgcctcctcgacccactcgctgagcaggttgctgtcccggggaatctgatatctcatctgtagaacaaggatgatgatcttagcaatgcctaatgtggaaaggccttggcttgggagcaagtgggggaaggtttagggcagaccagagggccggtgaggggtgtgtgctggagcggggaacccgggagggagggtgttaggcttgagggtcaggggacaccacagggattgctgttggcagagggacatatgaatggtagttggcctgggagccagcatgtgacttgagagcatcacgtcctgcaaagtccaggtgaggcctgggcagtgcctgctgtgtgggaccacagcccctggtggctctcagctgtgtcctgacactccaaagaaggtcttagtaccctctcacagacctaatacccgagccacctaaccccaaatgagctagaactgccttcccaaccgtgtttgcggggtctgtcttgtctattgcagcgcaaacagagccctgagcacgcaggagagcagaggaaggacagacagaagatggatggatggatgaaggcgggaagcacaggctgaggggatttagggcatgtgtggtgggggtgctgtggagaggagactgcacaggcaggagctgagctggtgaatgggagggttctagctcccagaagggtctgggccattgacaggaggggcttggtcctaggaggtgggtggtccagaggttgcaaggagcagaggagcccagatggggaagggaatggagctggggtgcagagaggagcccccacacaactgcccacatcctgtgcagaacctggggctctgggtggtgggaagaggcagtttcatggcggaggaggcctgggcccctgcagcctggactccatggatctggccagggactggggaggatcaggtggagagaggagcagcagagcagctgcccctcgtcccagcacaggggatgatgggagcccagggaaggcaggaccctggcttcgggcattttctctgctagaatctctcgatacctctctcccttcaccttctcctccaagtctcacccagatgatgtttctgtgagttgccatggggattctctcaccaccccccgccaacaccccgcaggggaagcttgttccaggagtcactgggcaggggctgctgctgctcttctgtgcccactcctcggatgtgccgctgcagccctggtctctggcatcggccgtcacctggtggagaggctgccggagctggccaagcagagggaggccgatggtgccacttggtgtctcctctggcatctgggcaggagacttctccccagaggccccgggctggtctgcccgtgtcacaggaggactcgcctctggtccctcagtggcctctgcaaaccctgagccagcctgggggaggctgctcagtggggaagaagcagtggccaggctctgcttggtcaccctgccctcctgtcagcctccggggctgcctcgtcgcacctgcccagggacccaacagccggtcctcacccctcccatcctcattgcagccaccctggggcattgtgaggccctgcacccagcactgccccttcaagcctcccacagggtcccgcccaggactcctgggctctgtgtccgcggggccatctagaaacactcccttgtccccccttcagcggcatagtacctgttgcccgccatctgagggaggtgcaggtgccaatccttcacgtgacgtgacgtggctcaccacagcctgtgtacatgtgagcagccgcgtgcagaggggaagctctgcctgggcctcagggactgtgacatggagcaggagccgcccccagccaagctgctttcagcacagcgtgggcccccagcaccttggtgcggggtgcggcccctcggaggagggctgtcaggtgaagcctcgtgtgagggggtgagtggcccccaggcgggga

SEQ ID NO: 28097 - DNA, 2300 bp, Homo sapien
agtcaggtgggccctggtgagtactgctcagggagagaggccaagagcatcagggataactgtgttccttgagtgtggccagggatggtgccaggagagctggtctggtgcatccctgccaacgacacactttgtgaatggctgcctggcaagtgctccatggaaagcaggggcttgggaggactcggccctctccagctgctgcaggccctccgttgctgcagggtttctggctctgctctctccttcctcctcctgcttctgtgtcaatgctccattcccaggctcctagtaggggcaaaagggcctgctgggtgcaggagaacctccagtcccaggtatggctgcagcccgtgccaatcctgttccagccacttgaggtgccgacagcattggagttggagggaaagttggggtctgtgtgtttgagctctgtcacatggacaatggggtagaggggagcctggccctttgaacagggctcaggaccaggagtgacttcctctccaggttgccagtcctgctccatccctcatgtcctggaagagagagagagacgaggtggctgcccgagtccacgtgaaaggcagcctctgacctcttgtccccaggcaggtggtggcggctggcaacacactcatagggccccatgagggttcaggattggagggggtagatttgggggcctcttagctctcaaagaggggcaatttaacgggcagaggtccatttggatccagaccattcacaggctcgaaggggacactgggagttggggctgggctcaggcctgctggggaaccaaaacttctgcttctgaggggtgtcagtaattccattttgactctgggggagccattttaaatctgtttatttccttctcatagaatcatgggtgagagctggcatggcccctagaggtcatttggggtccagctgcctcaccgtatcaatgaggaaactgaggcccagaaaagaaaagcatttttgcccagagtccctcagtgagtcctggttccgtacctgctttctgccagggaccaaactcccgttagtcattcctggtgtcagccaggcagaggagcaggtgggggagagggcgtgggaggagggaggtgaggcagctccctccgagtggaagctcacagtcagctgcagcgccgcccctgccctgactgcagctgactggcaggggcacctggaggcagcgggttcgggcgcagtatgagagggcttaccctctgcggcagtgggagacaggaccaggcagctccccacatccttccacatccgagctccaggggtctctggcttgtcctttcacagggcggctggtgtcccttaggtgggtgctggtagttcctgggagagttgacgggatggagcaggccaggggggctgagaagttggcctggcgagagaaggtgggtgggactgggagagcctgggcagggaggggcctttctgggagggagtgtcatggggctggccgagatccaggacccaggagactggccaagctgccacaggaggcctgagaggctgagcatgggggggccaacactgacagactttaacaagtttctggctcccccaggaaaaaaacagaccacatctgatccttggccctgagtccagagtgggaggcaccgtgacaacaatgcgcagagcagggaatgcagggagccatggatagtgctggggtgagctggagtcctggcaggggcccagctagggcagtactcattctgcagagcctgggagaaggggctgcctccttgggaggggtttgtgtgggagtctcagcgggaattctattggaccaggggaaccagccttgctcagtgacttctctgggtgtcctcctctaaagtgagggtcaaattcccacctctctcgcctcctggctatgaccacagcagaccaggcagggcatggggctaggcggggtcaggggccatcctcaggctgacacctggcctgtgggtagggtgggatctgaaactatagggtcttcagggggccaagtgtggggtaaggggtggcactttccgcagggctcgccctctgcagatggttcagcttctcatcggctgtccctttgcaggtgcctcaggaaccctgaagctgggctgagccatgatgctgctgccagaacccctgcagagggcctggtttcaggagactcagagtcctctgtgaaaaagcccttggagagcgccccagcagggctgcacttggctcctgtgaggaaggggctcaggggtctgggcccctccgcctgggccgggctgggagcc

SEQ ID NO: 28098 - DNA, 2300 bp, Homo sapien
gagggatgcactttctagcctcatctatggcctgggtaggtggaatccatgccgagtaattcagcctctgggaaaatcttcatttgcacaattacttggctgaagtcacttcacaaaagattcaccataaaaatcccctccaacagccagcccctgagcacactggctgcctctaagacgatgagtccttggtgacttgaggagcaacagaatttgcatataggtccaagtgactcactgtggcattcaaccaagtcacttcccctctctgggtcattttcctaatgtgcacactgcaaggctggcccagaggatctgggggaaggcaggtggcgggcggctcctaactctgaggtcctatggtttcccctggctccccactccaccccagcatcatccgggaagttttgcttgtgtgtgaggaatggcccagacacacccgctggcagcacgtgggtcactgggaccacagctccctgctaagcccaatgccagaccctggccacactcatctgccaaaaagcagagcacagttggcctcaggcagcctaggggaacccaggccgcctgggagggccaggctgccctgcgcccataggggtcagtcagttcggcatgactgctggccacgtgctggccctggggagcccctgctgagcctggggccccgtcgccagctcaccatgctgacactgcagaccaggccctgatcccaggctcaccctggctccgggcacagaccaaagcctgggcaccaacagcctttgcacagatgtaaccccggccctgctcaccggagcgggatgcggatggcaatgtagcggtcaatggcgatggccaggagactgaagatggagctctgcgtgaggaccaggacgaagcaggcaatgaagaggcagccgtggcaggcagcgcagaacccggtgctgatggtgatggcaaaggggatggcgagcacacccactgcgatgtcggccgccgccagtgacaccacaaagtagttggtgacgttctgcaggttgctgttgagccacacggcccagcacaccagcacattgcccaggatggccagcacagcaatggccagctccaccgtgatgtacaccgaggagcccatgatgggcatggccacagacgacaggcaggctcagcacggacgcgggctgggccagctcacggtccattgctgcagcccagccgcccgcctggctcccagcccggcccaggcggaggggcccagacccctgagccccttcctcacaggagccaagtgcagccctgctggggcgctctccaagggctttttcacagaggactctgagtctcctgaaaccaggccctctgcaggggttctggcagcagcatcatggctcagcccagcttcagggttcctgaggcacctgcaaagggacagccgatgagaagctgaaccatctgcagagggcgagccctgcggaaagtgccaccccttaccccacacttggccccctgaagaccctatagtttcagatcccaccctacccacaggccaggtgtcagcctgaggatggcccctgaccccgcctagccccatgccctgcctggtctgctgtggtcatagccaggaggcgagagaggtgggaatttgaccctcactttagaggaggacacccagagaagtcactgagcaaggctggttcccctggtccaatagaattcccgctgagactcccacacaaacccctcccaaggaggcagccccttctcccaggctctgcagaatgagtactgccctagctgggcccctgccaggactccagctcaccccagcactatccatggctccctgcattccctgctctgcgcattgttgtcacggtgcctcccactctggactcagggccaaggatcagatgtggtctgtttttttcctgggggagccagaaacttgttaaagtctgtcagtgttggcccccccatgctcagcctctcaggcctcctgtggcagcttggccagtctcctgggtcctggatctcggccagccccatgacactccctcccagaaaggcccctccctgcccaggctctcccagtcccacccaccttctctcgccaggccaacttctcagcccccctggcctgctccatcccgtcaactctcccaggaactaccagcacccacctaagggacaccagccgccctgtgaaaggacaagccagagacccctggagctcggatgtggaaggatgtggggagctgcctggtcctgtctcccactgccgcagagggtaagccctctcatactgcgcccgaacccgc

SEQ ID NO: 28099 - DNA, 2300 bp, Homo sapien
gctatcctctatgataatactactttcttctcaaatatttcctgaaggatgtacctgaggctgttttacagttaacttttttttcctataagtagaaagagtacactctaaaataacgattaatagtatagtaaatatataaactagtaacatcatcatttattatgaagtattatgcactgtatgtaatcgtatgtgctatatttttatatgactggcagtgcaataggtgtgtttacaccaacatcatcaaaagcacgtaagtaatgcactgcaataggatggtataatggccatgacatcaccaggcaatgggaatttttcagctccattataatcttacgggcccaccattagatgtgttatgtggcacatcactgtaaaactctttggcctggcattgaaaacccagttcaatctgggcctcctaccctcctatttagatgtctttttccaaccaagggtcatccccagtcaaacctttcaaaactccaattcactaactagaatgcttactatgccttacttaaatcctatccatctggcaaggtatggcaggcagcctctaagatggctcccatgatctctgcctcgtggtattcacatccttgtatgtgggctgaacttggtgactcactgctgataacaagaatacaacaaaagtgatgggatatcgcttctgagattaggttgcaaaaggaatgtggcttccatcttggtcacgcttcctctcttaaacctctcaccctggtgaagccggcaccaagtcttgaagcagccctatagagaggcttatgtctggagggactgaggcctaccaacgaccacttcagtgagcttgaaactggattcttctctaccctctgatgagcctttaggctgagagcttaactaaaacctcatgaaagactgagccagaggcacctggctgagctacacctggattcttgacccatagaaactgttggataataaatgtttattgttttaggccactaagttttaaggtaatttgtcatggaagaatagacactaggctacgcgtggcagctcacacctgtaatcctaccactttgggaggctgacgcaggaggatcctttgagcccaggaattcaagaccagcctgggcaacacagtaagaccctgtctctataaaaaaaaaaaaaaaatagacaactaaaacacaaagtggagcaatatgttacacagcaatagataactgatagacaagaccagttcaagttgctcccctgaattttccttgacctagcttagcccagagcaacctctgcctaatgtgaacttgatgtagagctgttcttctcattggtcattttgcacaagggcaacattagttatcttctatcctctgtgtctcttgtcttttccaagtaacctgaggtcagtagctgcttaaatttcttgtatgtctctggagaaagtgtttgtgcaagtagagaaagcggtaggctttgagaggctagaactgcgtctgaagggtcttttcattcatgtttggtgactgactgaaaaatgacttgttggtgggaaattgaagtgtatgttagaagagggaccacagcttaggaagagctgatttttgatcttcatcaaaatgaggcttcagtggcaaatactaacagccaatcctccttgtaaattctgttgatttccttcttattgtgtaaggagtttagccttctgttggcagttgtgttgtgacaagcagcagagagggggtggctctgggacactggggtcacttcagaggaagggaagttgattgtcttctcagggccccttctctcacatttattctttccagggcctctgcagcaggactgtgctgaagcccatttcctacacgtagcaccatttatttaaaacacacactacatatacacaacagaccaaatgcaaaggaaaaaaggggaaaaaggctgctgaagaccagagtcactaaaagttcaggctaagaatagacaaggaactctgagagctgctcagctatgtgacctcctgcaggggcttggcaagaagcccaattcagctttgttttttctgtgcttttacaaagaaagagcactagcttgggagtcaggagacctaggtaccagactttgctttgccagtgcctctttctgtggccttgggtaagtttttcccctctctgggcctcagtttcccatttgcaaaataaaagtgtttaagactaggttccaagattttccaattctaatgctgagaggatacagaggaaaacagaaagaatgctggctgaggaaccaggagacttgcc

SEQ ID NO: 28100 - DNA, 2300 bp, Homo sapien
ttttttttttttttttttgagacggagttttgctcttgttgcccaggctggagtacaatggcacgatctcagctcgctgcaacctccgcctcccctcctgggttcaagcgattctcctgcctcagcctcccgagtagctgggattacaggcatgcgccaccatgcccggcaaatttttgtatttttagtagagacggggtttcaccatgttggtcaggctggtctcgaactcctgaccacaggtgatctgcccgcctcggcctcccaaagtgctgggattacaggtgtgagccaacgtgcccagccgtctttactttaaatcacaaagaaaaggtactaggtcttatctgtctttatatggctctcttagcagtgccttacacatagaaagtcctcagagtttgcactcttgagaaggcagctccatcagatactagaaaccgtcagctaacatttatcaaaacaaggaacaaaacttgtgaattagcagctgaaacaaaatacctgaagtataatatttttaatgttagtagctgattctagatataaattagctccctttgtgctcattttacttgcctcttttttttttttctttgagattgcgtctcactctgttgcccaggctgaagtgcagtgttaagatcatagctagggagcctcgaactcctgggctcaagcgatcctctcacctctgcctcccaagaagcaggtgcgcaccaccatgataggctaatttgtaaaacattattttgtagatacagggtcttgctgtgttacccaggctggtctggagttcctggcctcaaacaatacccctttctaggcctcccaaagtgctgggtttacaggcatgagccaccgtgctggccttttctgacttttaaacaaccccgcagcgtaatctttgcattcctattttacagataaagcaacagaagcctccagcgactaagttaaactttcctggggtcacaaggtttacaagtggctgaataggatttctacagactggttccttcacccggctgcccgccgaagtaagcgggccttactgccctaattctcaataggaccccaaagaggacgcttctttgctcctgaagggatggcaccctctggattcgcggtaacagcaaatggggctctcactcctaccatctcagtgacagtttaaagcgcaccctaccgcaggaaagtgcccatatttgcacacacgcggcagagggcagggctgaaaaggggccctagggtgcagggggcgcgccctcacccggggaccccgcattttacaatattagctccaccgaggcgcacggaaccgcaggcgagcaactgaccttcggctccagcggccccaaagccgggggtgggaacgcgcgacccaggtagcggcatggactccgagcctggcccctcgggggttaaaactccccagacataaaggctccggacgacagaggtgcagccgccgcgtgcccgtgggacactgaaactcttcccttaccttcctcggtagtcctgtgagggaggctggcccggccggctgccctacggtgcggacaggaggtcgcggtcgggaggggccctgcccggcggttgctgctggaaccagcccccgcaagggcccgcagcggccgggccgtttacctcagacccgcgccgcagcctcccggagcccgcgcccaggactccctcacgacctctccagggtcccggcccgacaccaaggggcaggtgaggggtggaacctggaggcacccgcgccagggcccctgagggaggcgggagggggacagcctcagtcctgactcgcagccgaggcgcgacgactccgcgcagtcccgcctgtggaggggcgtgcctcatcgcttgctaaccgagaggcgaagggcaaggggcgaagggcaagcgccggatcctttcgccccctccccacgtgaggccctggaggctgattggccgtgtgctgcggaggcggcaagaggaacgtgtcctggcacgtgccgaaggagcgctaaaggccaggggcggtcccacccgcgaagccctggaaggcggattggctgcgcgaggaagtggcgtgtcctcacttgagctgtctgggagcgagagtaagagataaaggcaagggcgcctgaccgggcctgggcacctcctcccactgcgggcaaagggcaggcagttcgtgcgcggacacaagcactggcggaccgtggccatggcgggcgctgagtggaagtcgctggaggaatgcttggagaagcacctgccgctccccgacttgcaggaagtgaagc

SEQ ID NO: 28101 - DNA, 2300 bp, Homo sapien
gccccatctcaggaactgccaacagccttatcatggctaaatccagcagacttcctgctgtcctcacccgctagacatttctgagccatctgatgcttctttcctgtcctgccccagagtcctcacctccagaatctcccacaaagtctctttctctgaccccttgaatatccaggttttccagcattctctccagcgccctcttttgtacctgctcctccttcacctggaatgaccatctccagggcagctcaacaagcccagcctcgcccacctgaggcccacctccacatagcaaatagcccctgagttatttccacctgcagaccctgaagctactgtagcaggttgagctgtgtctccatcctgacacctggaacctgtcattgtgattttatttggaaaaagggtcttcacagacgtaattaaggtcaggatctcaagataagatcatccgggattatccaagtaagctccaaatccaaagacgtgtgtgtgtgtgtgtgtgtgtatgtgtgtgtgtgtgtgtgtgtgtgtgtgtgtttgagacagggcctcactctgactcccaggctggagtgcagaggagagattttggctcactgcagcctcgacctcccaagctcaagtgatcctcccgcctcagcctgccatgtagctaggactacagatgcatgctaccatgcttggctatttttttaaatgctttatagagatgggtgtctcactatgttgcccaggccggtctcgaactcctgagttcaagcaatcttccagccctggcctcccaaagtgctgagattacaggtgtgagcccggccaggaagtgtctttttcagctttgtggacacagtgtccagcagtatacagccctcagaaagtcctggtgatgcacaagcttgcagggagtggaaaaaccagcgcccatggcttgccagtgggaaaggttccctcgccaactaaatgcagacagcctctatttccaagggtcagccagaggtcgggtcaccgcaagaaggatggtctggggccggacaatcagtacacctgctgggtgctctggttggagacagtgatccagccagacatccagaagacaagcccggctccggggaggagggttgggatggccacagagaaagccctggagagtaaaatcccgtccttttccttccggttctgggcaacgtgggggagaagagatttgtaaaggtcacgccaggattctgcaacccccaaggaccccggggccgtcccatcaagacctactatggtctctgcccgccaactcaggacttctcaccgcctcccctgagcccttcagaccctgaggccctccctgcctgctcccccagacccacactctgtggccccaagaccccattagcttagcctcttggctgcggacctgagttccttgccatagagaacgcgcttcacttcctgcaagtcggggagcggcaggtgcttctccaagcattcctccagcgacttccactcagcgcccgccatggccacggtccgccagtgcttgtgtccgcgcacgaactgcctgccctttgcccgcagtgggaggaggtgcccaggcccggtcaggcgcccttgcctttatctcttactctcgctcccagacagctcaagtgaggacacgccacttcctcgcgcagccaatccgccttccagggcttcgcgggtgggaccgcccctggcctttagcgctccttcggcacgtgccaggacacgttcctcttgccgcctccgcagcacacggccaatcagcctccagggcctcacgtggggagggggcgaaaggatccggcgcttgcccttcgccccttgcccttcgcctctcggttagcaagcgatgaggcacgcccctccacaggcgggactgcgcggagtcgtcgcgcctcggctgcgagtcaggactgaggctgtccccctcccgcctccctcaggggccctggcgcgggtgcctccaggttccacccctcacctgccccttggtgtcgggccgggaccctggagaggtcgtgagggagtcctgggcgcgggctccgggaggctgcggcgcgggtctgaggtaaacggcccggccgctgcgggcccttgcgggggctggttccagcagcaaccgccgggcagggcccctcccgaccgcgacctcctgtccgcaccgtagggcagccggccgggccagcctccctcacaggactaccgaggaaggtaagggaagagtttcagtgtcccacgggcacgcggcggctgcacctctgtcgtccggagcctttatgtctggg

SEQ ID NO: 28102 - DNA, 2300 bp, Homo sapien
ttcctcagccaagaatcatccaacccttggctttccagggtgtggtgaggctggcagtaaaaactaacaggtcttttggaaagcagtatgtttcatgagctcctaaaatgctcatgccctttggcctgataatgatgctcctagaactgtagcctgaagaaacaatctaaaagaggagggaaggccaggcacagtagctcacatttgtaatcccagccctttgggaggccaaggctggcggatcacttgaggtcaggagtttgagaccatcctggccaacatggtgaaacctcatctctactaaaaatacaaaaattagccgggcatggtggcaggcacctgtagtcccagctacttgggaggctgaggcaggagaatcgcttgaacctagcaggtggaggttgcagtgagctgatattgcaccactgcgctccagcctgggtgacagaacaagacagaaaaaaaaaacagggaaaggcaatgcatgtgaaggtgctcacaacagcttacttacaataagggaaaagctgacagcgggggaagtgtctgagctaagcacattacagcccacctcttccacaggttattgtacagccactataaagagtcatgatgaaggtaatgcaaagtgatgaaagcctgtgagcaagaaaaagacgtgttcaggctgtggtcagaactcttggaaaaaaaaggaaaaaaaagtttgcctatggatgaggatagtcatggagtgtggataaaaggcaacaggtggtttattaagatggtaggatcctggcttgttttcttaaaatgatgaatgatggaattgatagtgtttttcagcataatgctgggcaaatccccaccagcattggatcacagcatccagaaccatccatccccttttctggcaccttctgccgcctgtattagagacagacatacacatgtgcatgcacacacatgggtcagcagggtgtcctcattcatttttgagtcccacagttctaagtacatagtagtgtctgaatgcttttgattaggttatcctcataatccaaggatgtgtcccttacagcttgggtgaccaaagatttctaccacctgtgtacattcattggcaagtcaccatcctatcctcttgctgcatcttgcctttccactgcgattatttttaggggtgtgtgtgcaccgcgctgggaatatggcaaacgtccccactccccatcagacgtcatgattcctgcacacactgggctctcactaaccccagcttcctttcccctggtggttttgagagcataaattttatttccagctgtgggtttgggtcctatgcagaacacctccctggagaattgcaactaagatgtttatggcaatcgccctgcaagtgtctatttaattcctgaaaatgtcatttactggtgtgtttctgtaaaaatcatttctgaaaagttttgtcagcttggcttagcagctgggggaaaaaagcagcaaaatgagtcccctcaatcaagcctgtgattttttattttttcagactcatgaatcctcctgagaattaggcttatgacaagcacccaccccctccacctactccctggtttaaaccaggtgcctgctgacacgaaggaagattccggggcattttgatcctagtcacacagtgtttctaagtgggcattactcctgtcaatccacagtcttaaagatgttcctcagacaaaagataattagtgacaagaaggcccactagattccatgtcatatcttagttggcgggccagagaaggacagggtctctggttggggccgtgtctcccatcgcattctccctttgcaggtgctgaagtgaggaaggcccacagctcagccaagcacatggggtgcctccctcctgggccactagcccactggccagtaagagaaccagggagcctttacttagagactcaaggttcagaagagggaaatgggaagtcactgggaaatggcccagcttggaggaggtgaccctgctgccgaatctgaccccttatcctattacctaagttcctttcttgtttactggccctgaaatcacccgctttggagattgccttgcaaggcagcatagcagagtaggagagttagggtagggcaggtacagcctgtgctcagccctcacaggccctgcacaagcccaccaggcccccggctcccttctggcattcaccaggagaggttctgcccagcccagcaggtgggttccaggagaagggatggaggtgggaagtggtggttatggaactcctaccacttggatcttcacc

SEQ ID NO: 28103 - DNA, 2300 bp, Homo sapien
aggacagggagacctcatccctgtccctcatcatttctccttaaagcagctgaggttgaggtagagaataagtgagggaccagggattgtgggcaagagccttgcaggcaagagactggttctgtgccattaaatgagggcacttcttacttctaggttcaaagagtgtggcagcaatttgtggctcaaacaaatgagtttccaatattttcagcccacccacagccctgtatcaagtggcaaggccaccattactgactctgtttatttcagctttggggatcccttgactccatagccacattgctttctggttgaggccccagggattttgttcttcgctgactcagactagacgtaaagccagagtgccagaattttcttgcactgattctccatccagggggattggaggccaggggacacctgcacttgcagaaacctgtcatgaggggaatcctaagtttaaataacatgaagccttttttttaaaaaagtgtttttcgtttttttttgtttgtttgtttgttttaagtgaaaaggtctcactctgttacctaggctggagtgcagtcgtttaatcatggctcactgcagcctcgacctcccgggctcaagcatcttcacacctcagcttcccgagtagctgggaccacaggtgtgcaccaccatgcctggctaattttttgtatttttggtggagatgagctttcaccatgttgcccagactaggctcaaacttctgagctcaagtgatctgcctaccaaggttgggattaccttccaaggttgggattacaggtgttagtcaccatgcctggccattttttgtttgtttgagacagggtcttgtcctgttgcccaggctggagtacagtggcacaatcacagctcactgcagccttgacctcctgggctcaggaggtcctgtcacctcagcttcctgaacagctgggaccacaggcacgtgccaccatgcccggctaattttttgtagaggcaagattttgccatgctgcccaggctagtctcaaactcctgggctcaaatgatccacctacctcagcctctcaaagtgctaggattacaggcatgagccactgtgcccggccccacacaagtcttgaacttctagcctcaagtgatcctccagcctttgcttcccaaagtgctaggattaccggcgtgaaccactacacctggtcacttgaagcttttctaatgggcagtacatcttgctccttccaccattccttgtaggagagagtgtctcctgaatcctgggtgacatcaaaggattcaagttctgcctcccctttattattattattaattttttgagacagagttttgctcttgttgcccaggctggagtgcaatgatgtgatctcagctcaccacaacctccacctcccgggttcaagcaattctcctgcctcagcctcctgagtagctgggattacaggcatgtgccaccatgcccagctaattttgtatttttagtagagatagggtttctccatgttggtcaggctggtcacgaactcccaacctcaggtgatctgcccgccttggcctcccaaagtgctgggattacaggcatgagccaccgtgcccggccttctgcctcccctttaatgattacttttagttctgaaaagtacaggaaagctgctgaaacaggtattgttttagcctactatccgttcactcacatttactgaacatctactaggtgtcagatactggggctatagcagtggagacagacaagatgatgtgtttgagggaggatgggaaggaacagaagtgcttctttaaaagtgatgacattggccaggcacagtggctcatgcctgtaatcccagcactttgggagactgaggcaggcagatcacttgaggctgggagttcgagagcagcctggccaacatcatggtaaaacctgtgtctactaagaatacaaaaattagccgggcgtggtcgtgtgtgcctgtaatcccagctactcaggagactgaggcaggagaattgcttcaacccaggaggtggaggttggagtgagccgagatcgcactactgcactcttggtctgtctacctcaaccccaactctgcatgctctgagcagccagctccacccagcactcaccatcccacccactttcgtctctcctgcttcaacatctccctcattctgttgtgtctcctgtagttgcatttgttgcagttcacttgagctgagccccgaggcccttctacctctagtactgcctgtccaggacaggcacaagcatccag

SEQ ID NO: 28104 - DNA, 2300 bp, Homo sapien
ccctgctctgcacccctcctcccccaggcttccagactacagccctctgtgtgaggctccctccttactctgtggcttgggctgtgacactgactagctgggctatcttctgccaggctatgactgtccatgcctttccatgtccagctataaaatgtggcacaagacagcagctctctctcagagactcagctgcgcctcctcctcttgccctgcgctctagaactccttgatcctgaggcctggcaggccccacagggccatctccagcctcggcaagggcggatcggacctagaggtgctcatgttgggggtgataaggttaggcgaggccttggcatctgtccccataacagctttagccttctaaacacaaagccacagccagacgttgctgcctggagccaaagggctgcctggaaggccctggcctgagctcagttagtggctgtcactaaggaaggcaagcagtgcactagcctttaatacttaacccatctcagactcagtctgctcagctgcaaaagtgcaaatcacagtgggcacctacttcactggttcgttatgaggattaatgaggcactgcatgtaaacaactgcacgcagcgcgcgcctgcctcatagaacactccctgtgaatgtaagccattcctcctctgaggctcaggaaaggcaagtatcttgtctcagaccacagggctagacaactggaggaggagggttgtaaatcccccaccaactccacacagcagacacaaaagggaacactccctgggagtgacacctgaaggtcagggtcccacatgctgttgacctcttccacagttggcacttcacttcagagtttactagctagaactccgtttgtcatcaaccccgcgccttcagcaggacaggaatcacgtcttccccctcccctacgtcttgggcaagcaaactaacggccaagacattgaataccagtccgggtctccgccccaaaggggctcaggctaccgcgtggcagagagaacgaaagtgaagaacaagagcaagacaaaacgccgagtctcggaggccagggcactggcccttccattgctcggtgctctcggccagtttcctgcccttcccagcctcagtcctccacggtttcccaaggcatgggagctcccaaggcggctccagcaggacttttcgcttctggggaaggtggtgcccctgctacccggaccttcccaccatgctgacaagggtcgcaatcctgcgagtgtcaggaaacccccactgactggaaccaggcgggtgtgggggcgaggcgggagtcggcccaaggtcgcgcgactggaccctgccccgcgctagggaggggtccctttcgttcctagggtgaagactgggcccacagagaggcactgaccgggctcgagcggcggccccgctgcctccgcctccgtcctcatgacccgggcggcgcggggcgcccatggccccggcccagagcgggctacagcttccgcttcggctggggcgggagggcggtcggtgcgtgtcgagttccttctccgccaccgccgccgctgcggaggagagaacgggaggcggcggctgggccgccccaagcgccgccccagcccttccaggtctcgaatctggaggccccgccccctccttaggccccgccccaaactttgatcttagaggtccccagcctcttgatttaagtctgctccggccattcgccgcctcagcgttgagtggccccaccctctcgcccaatcctcgcgcagacgcgcagctcaccaggacgcgggccccggaagccccgcccctttctttgagccccgccccaaagctcgtgcatttcctgaatagaggctcgtcccttcggcaagccccgcctctgccgggtcccgctcttttgccagtcctaggtgtaagccctgatcccgcccagtgcatccccgaggccccaagcaactctcctccaactgtctttagggataaccctgagcgggcagccgctctactctatacctaactttatccgtaccagatacctagcctcactcagggccccccttacctggcggtgccgggatcaacaaatgaaattgtgacgggaagtcctggcccttggcccaacctcctgctgtccccggtctgagggcccaagccccgcgtctccgccttgccgtccagcctgtccttggtgtggggtgcttggaagtgtgagcaccctctctggctctttgccggccccaagggtcgttgcggcggcccccgggcccagtcatcagccctcttttccggtgccggaa

SEQ ID NO: 28105 - DNA, 2300 bp, Homo sapien
gcatctcccatgggtcatgtgtccccgctaccctatgtcccttaatcttcagctaaaggaccattagccaatactgtgtgtgtcaggggagggggactggaatgttaatttgttgcactgttatttgttaacccttaattgtagatgattacgttttgagaataatacaggcccgagctgtccaatacagcagctcatgtacacacgtagctatttaaattaaacttaactaaaacacaatagaattaaaataaaaaaacccagtccctcaatcccagtggccatattccaagtcctcaacggccacatgtagctagtggctaccctatggaaggtgcagatacagaccaaaggaccatgcacatctaggagagcaggctgtacttttaattcagccctttaacccttcacttattttactatcaaggatattgagaaaatatcaaagtgacaacgtgctatatgcaggaaatgcttgtcatggaggaaaatcagggaaagcacctgacttgacctaatcaaaagcatcaagcagtgaactttttattgagatgagcaacaactctaagtttcaacttaagcgtacctaagacaggagaacatgaggttgaaaggacaggctcctttggtgaggatccctggctttcagccttaggagtctagattttatgctgaaggtagtggagaaccactgcagaattatatgtaaagaatgacgcaatgaaaagatagcagcatttatttacaaaatggatagaacgtaaggtttagaagcagagaaacttgttaaaacttctgcaacagttaaaactgctgcaacagtgtggaaagcatgaggggaccattgcctgaaaggggactggggcagagatacaaagaactttttaaaaaatgaccggctgggcgcggtggctcacgcctgtaatcccagcactttggaaggccgaggccggtggatcccttgagcccaggagttcgagaccagccagggcaacatggtgaaaccccgtctctacttaaaaaaaaaaaaacaaaaaaaaactcataggatttgggggaaggagatagtcaatcagaaatgacttcgagattactgcctggaagctttgaaaaacactcacctggagagatacagaatgtgagaagcatgcacgttgaggggaaagctaatgaacttacttccaggagctagtgaggcgacgctgatgtttgggtggcccaagcttcccgctttcttccctccccgagccccgcagagttccatgcagcaagtctttctccagcccctggcccctcacaggcgcctcgacctcccctcgcccgtccccagcctcaccggctctggcctacttttcttctcttcggtccgctgcgaaagatgctacggcgaaggcgtgagtcaagcgaatggcgggcctaacacccagaattccactctttcccaaaatgctgcgcgcagggcccgcctccttcctttccccagtgttgagcgcggtctcgcctccgcttcctcctcactccgcctgccggctgggaaactagggcaccagtacgatagttccggcaccggaaaagagggctgatgactgggcccgggggccgccgcaacgacccttggggccggcaaagagccagagagggtgctcacacttccaagcaccccacaccaaggacaggctggacggcaaggcggagacgcggggcttgggccctcagaccggggacagcaggaggttgggccaagggccaggacttcccgtcacaatttcatttgttgatcccggcaccgccaggtaaggggggccctgagtgaggctaggtatctggtacggataaagttaggtatagagtagagcggctgcccgctcagggttatccctaaagacagttggaggagagttgcttggggcctcggggatgcactgggcgggatcagggcttacacctaggactggcaaaagagcgggacccggcagaggcggggcttgccgaagggacgagcctctattcaggaaatgcacgagctttggggcggggctcaaagaaaggggcggggcttccggggcccgcgtcctggtgagctgcgcgtctgcgcgaggattgggcgagagggtggggccactcaacgctgaggcggcgaatggccggagcagacttaaatcaagaggctggggacctctaagatcaaagtttggggcggggcctaaggagggggcggggcctccagattcgagacctggaagggctggggcggcgcttggggcggcccagccgccgcctcccgttctctcctccgcagc

SEQ ID NO: 28106 - DNA, 2300 bp, Homo sapien
aaaggacaaagtaaaatattccaaacctccaaatggcttttctgcctcaagattatgtgtctcgttcatgcccacacccccagagcctataacagcacctgactggtatgcattaggcacttaggaaatcactgctgaatgagaacaatttccagagaccctcaacacacacttttctgtccttcaagacacagggccattcctcccacacagcctcacatgcaaagcagaatacctggcagttcatgttgtcctctgcttcaatgagcttcccccgatatacctcaccggtgttcgtctcacatgtcacaatgtggccctcggcctcatgcagtactttaatcggcacaccaatagacatcttggcaggaagagagttctacaatgagagagacaacagtcagttcatctttcagagtctgaaaaggcatgtggcacacatcatgcttcctttaaggcctggcactccataaaacttagcaaaaacaccaaagctgcattttctaccaaggaaaaaaaaaaaagctcagctcctggtttggaggaaactatctggcaaatatgtgcaagatgtggggtgaggaggaatgatgggatggacagaagtaaaactaggaatgaaaagagagcatctcccatgggtcatgtgtccccgctaccctatgtcccttaatcttcagctaaaggaccattagccaatactgtgtgtgtcaggggagggggactggaatgttaatttgttgcactgttatttgttaacccttaattgtagatgattacgttttgagaataatacaggcccgagctgtccaatacagcagctcatgtacacacgtagctatttaaattaaacttaactaaaacacaatagaattaaaataaaaaaacccagtccctcaatcccagtggccatattccaagtcctcaacggccacatgtagctagtggctaccctatggaaggtgcagatacagaccaaaggaccatgcacatctaggagagcaggctgtacttttaattcagccctttaacccttcacttattttactatcaaggatattgagaaaatatcaaagtgacaacgtgctatatgcaggaaatgcttgtcatggaggaaaatcagggaaagcacctgacttgacctaatcaaaagcatcaagcagtgaactttttattgagatgagcaacaactctaagtttcaacttaagcgtacctaagacaggagaacatgaggttgaaaggacaggctcctttggtgaggatccctggctttcagccttaggagtctagattttatgctgaaggtagtggagaaccactgcagaattatatgtaaagaatgacgcaatgaaaagatagcagcatttatttacaaaatggatagaacgtaaggtttagaagcagagaaacttgttaaaacttctgcaacagttaaaactgctgcaacagtgtggaaagcatgaggggaccattgcctgaaaggggactggggcagagatacaaagaactttttaaaaaatgaccggctgggcgcggtggctcacgcctgtaatcccagcactttggaaggccgaggccggtggatcccttgagcccaggagttcgagaccagccagggcaacatggtgaaaccccgtctctacttaaaaaaaaaaaaacaaaaaaaaactcataggatttgggggaaggagatagtcaatcagaaatgacttcgagattactgcctggaagctttgaaaaacactcacctggagagatacagaatgtgagaagcatgcacgttgaggggaaagctaatgaacttacttccaggagctagtgaggcgacgctgatgtttgggtggcccaagcttcccgctttcttccctccccgagccccgcagagttccatgcagcaagtctttctccagcccctggcccctcacaggcgcctcgacctcccctcgcccgtccccagcctcaccggctctggcctacttttcttctcttcggtccgctgcgaaagatgctacggcgaaggcgtgagtcaagcgaatggcgggcctaacacccagaattccactctttcccaaaatgctgcgcgcagggcccgcctccttcctttccccagtgttgagcgcggtctcgcctccgcttcctcctcactccgcctgccggctgggaaactagggcaccagtacgatagttccggcaccggaaaagagggctgatgactgggcccgggggccgccgcaacgacccttggggccggcaaagagccagagagggtgctcacacttccaagcaccccacaccaagg

SEQ ID NO: 28107 - DNA, 2300 bp, Homo sapien
actaaaaatacaaaaattagccaggcatgatagcagtctcctgtagtcccagctactcgggatcctgaggcaggagaatgccttgaacctggtggggcagaggttgcagtgagccaagatcatgccactgcactccagcctgggtgacagagtgagactctgtctcaaaaaaaaaaaaaaaaaaaaaaaaagttgtgcatagttggaaaagaaaatactagatttcatgggtgattggcaactagctctaagtggaacaagtgcattttcctttccttccaggtcccagagaaaaacctccatgctgggttgatagcagcagctaggatcagttgcccaagactctggattctcgagatgaagaccgtcagcagaggctgatctctcctgtgggctcatgtcctaaagcaccttatttgggctcaaatatcctcccttttaggacagaaaagaagttcccgagtcttggtcatgttgggcctgtggagcacatcatcttttctacgtgtttccttttgatgttctcagcatccctgcaagatgttctcagcatccctgcaaggcaggctaaggcatgaggagctataggcccagggagctgaaggcagattctaagagctgggtgtggatgctgcacccctgagcctgggccgcctgggttttgctcagtctgggaagtacttccaaacccactctttgctagtcttttacaatcctgcgggagggcaaagcccagatcatcatggctgcttccaccatgtagctgcagatcaggaaactgaggtccagggaggtccttactggctttgctccagggacaacgaggcttgaggtctgttccccacaggaggaccatgatggttctcctgcttcaaatggcccctttggaaggggcttgctcatttaggtgaatcctggggccgagcagccccagtgatagtccctgggatggctgtaggagagggagcagcatgcaggcgttaacgtcacagactggcaccaggccacccgggcttacactctggctcctccagttcctggctctttgaacttggacaagtaatcccctttctttattttttgtttttttgagacagtctcgctccgtcacccaggctggagtgcaatggcacaatctcggctcactgcaacctctgcccaccaggttcaagcaattctcctgcctcagcctcccaagtagctgggattacaggcacccaccaccacgcctgactaattttttttttttttttttagtagagatggggttttgccatgttggccagcctggtcttgaacttctgacctccacccgcctcggcctcccaaagtgctgggactacaggcatgagccacgccgcctggccaacaagtccccttaacctctttctgcctcagtcgactcacctggaaaacagagcacctacctccttcaaatgagaagagaagtaaaggagtataaggccatcagaacagtacctggcccaagggaggctatggaagtgcttgttgaataaaaaaatggcttcatctctggcctagccccaaaggtttgagttcctgccattgccacccagacagccctgggtggaggccctgctgacattgaagagtgcctgccctcctcccctcaatgcggtagacactttccaaaacttacgtcatcctcactctcactccagtgggataatgggaggcttggtgtacctcattcccaagatgagggaacaggctctgagaggaccacatcgccagcaagtgacaggctgggaccaaggccaggcctgtctgcctcctagactaggcctgagtgaggaccggcctgagtacggcccacctgcttcctcctccgtttagagcttgggctggagctgtcctggccagtgctctctgcctcaccaggctgcatgagccacaagctgccacttgtggagctcggtggccctgccctcgacagccttgctggtggtcgtgaaggctctaaacacctgcatggcaatgaggccaaccttctccgcttgatccgtttcaggctctggctccgctactgcatcgtgtgcttctgtccaagaggcagagagactgaaactatctgctgccgcctggattctcccagagattgcctggaacaccagctcgggtcctcgcacaccatcctggtaggaatctctcagtgacaattgagagtttgtgggctggcttagggccagtggtgggcagggagtcagcagggcgcaagggactggagagcttggcatttctccaacaggagtttcagggagagctcagaggcctgctta

SEQ ID NO: 28108 - DNA, 2300 bp, Homo sapien
tcacgcctataatcccagcactttgggaggctgaggcaggcagatcacctgaagtcgggaattcgagaccagcctgaccaacatggagaaaccccttccctgctaaaaatacaaaattagctgggcgtggtggcacatgcctgcaatcccagctactcaggaggctgaggcaggagaattgcttgaacccgggaggcggaggttgcggtgagctgacctcgcaccactgcgccccagcccgggcaacaagagcaaaactccgtctcaaaacaaagagaccctctgaaagagtattcagccccacaccagtcctgtgggagtagacaggaggagaaagtggaggagtgaggcaggaaggccagggcaggtctatgcaggcggtggggtgagggatgggtaggagaggaggctggaggcctgaatcttggcaggagtggtggggagagagaagggatgactaggtgagctgggggagagaggaggacggaagagtgctggggggttccagagcttctggccccagtgcctgggaagatggtcatggaggtgccctatactgagctggggcatgggtggtgaggctggcttcagggtggcatgcctttgagacatctgagagagaggtccgcccccaagggaaggatccatacctgtccgcaaacagatgctggccgcagcttaggaaaaccaagggataggtgggaaggcagaggatctgaagggaacactgggggacaggggaatttgagggtcataagaagagcaaacccccccaccataagacgaaagaccccaaagaatcccactgacaagtcctaaccccagagaaggcagtgtcacagcacaacactacctcaagggaactggtctaagggttctgggattcacttaccacttccctgagggctcccatgtccctcccctctacttatccaaagggtcctccaaggctgagtggctcacacctgtaatcccagcactttgggaggatcgcttgagcccaggagtttgagaccagtctgggcaacatagtgagaccccatttctacaaaacattttttttttaattagctgagcatagtggtgcctgtctatagccccagctcctcaggaggctgaagtgggaggattccttgaggaggcagatgttacactgaactgagatcacgccactgcactccagcctgggtgacagggtgagaccctgtctcaaaaaataaataagcaaaaaaagaagggggccacccgccactggactgttggcccatggccgcctgtggggagaatccagccagccttagggaggagatggagagacaggaacgggcataagcagcatctggctggctggggtggtgcctcgagatgggagacccaacgggctcactcaactctctcttcaccactcacaggacctgggccttgagaggaccctccttcctgatatcctctacagagatgtggccttcctcaacccggtcgaccccatctcccatgacctgcttgtgaacctggcccgggacctgcagtgccccaagaaggtgaggctggcaggcacgggccctgggctgggcactgtggtggacaggggggccaacagagcccagggctggggactgggaggctaggtccttctgcggcttgctgtgtggccttaggcaagtcactgtccctgtctgagacctgctgccagcatcagtatattaggctggccaccagctagagcaagtgtgagctgtgctttgcaggaccctcagagtcctgggcagacccattttctgtgtggcagcactgtgcaccaggcctgggggcccagaccaggaagactatagctgggcagaagtcatatggggaccctgcgggtcacagactgttctgagaaatccaccaacggaaacaaactcctagcctctgaattcctgggccagaagagagccgctctcggctagagcccccgtctgtccgcaggtctccatcctgtacagacacccttgcggacgggtgctcactgctttcccctacaacagctggggtcataagcaaggccctcctccttgctggggtggagtttgccacctgcagcctccaccccacagctgcccagaaccccatgctgacagcacctgcagatgtcctgccatgagcatcgacacagccccaggatgtgtggctgtgaccagccaccggacccagactcctagtcacagtgagtccccaaccaaaaccagggtatccgctctgggccctgccagctctgaatgcccaggtctctgcacagtcggcccctaggactctgcgcc

SEQ ID NO: 28109 - DNA, 2300 bp, Homo sapien
cagggacacagagggtgggggatgagaggcaggggctggggcagttctctgccttccacaggactctaagctctgagcactcccccataccgctgcctaggttgcccctttcatgcctccaggctcagccctccattccctcctttctcccctccccctgcccagtattctcacatttgaggggacagtgcccaggcctggctcagcctctgggaggatatggtcaggatctgggagccctcccagctgtggctccagccctgaggctgcaggggaagaggaggagggcttaccgggctgcctgctctgggcaggggggtctgagaggtccctggggcatcagagctgcagcttaaagctctgaccgggtaggttgccacttcagttcagcaacagcgccttggccctgggggagggcacgcaaggccgtcatgcaggtttgccagggaggaaacctgtggtgccaaggtggccccaggacaatgctggctgcactggagtgggaggagaggctgttgggtccagctggcaggtgccaggggagaagggggtgcaagcactgctccagcaggggttgggggtccgtggatggtcaaggggctaagacatcctgctgtcctctgccttgtctcaggggcccagccccacaggatgacagagcctagcaccctgccctctccccactgccatctctgggcaggcagtgcttaacccaaaggaaggaaccttgaatcttcatagggtaattagcagacacacacacacacacacacacacacacacacacatacacacgggtgcttggctgtcgtccctcatatatgccctcggacagtgctcagcccttcctgcacaacaggtaccagtcctcacaggctaaacacgtgctccttgcttagagaagtgggaactgcagatcagtgcctcaaacgttccccacgcaggagatgtgagcgtcccagagccgggattggggctgcaggggcccagcaggcctgcagcagagacctaggcttctgctgagggagccctgggaagtgggatacaccttgagctgggtgggtccgtacctcaccctggtcctcagaggagccagggcccccatctcactctgcctgccgccacccccaccccttgtcagggaggcagactgaagccagcggcagatacagcccgcctgctgccagcttgcccagagctgggcttaacggttaacctgactcttcgtccggtttatttcccaggctggggtcagaggtgggggcctgccccaaaccaagaagcaggaggcagtaaatatttgccagtgcaggagtgtccatgtagcgtgagcaggtcctacaccacaactgccagctgcagagatttcttttcttttcttttttttttttttgagacagagttttgctctgtcacccagggtagagtgcggtggcgccatctcggctcactgtaacctccgcctcccaggttcaattgattctcctacctcaacctcccgaatagctgggattacaggcgcccgccaccacgcccggctaattttttgtattttcaataaaaatgtggtttcaccatgttagccaggctagtcttgaactcctgaccttagattccgcctgcctcggccccccaaagtgctgggattacaggcgtgagccaccatgcccggcctaatttttgtattttagtagagacggagattcaccatgcagggcatatttctaaaagcaatgggggcaatacctaacactggcacacacagcagaacccccccaccccgcctagaatgctctttgcacggtcaaagcgactattccccagtcagcactggggccagagggtaaagaggtgccaaaagccacctcgtctcggccgagctccgcgtctcccctggcggctccaggccctcgggttctagcgccaagactgacgcaagcagggcctcctccagtgtgatcaggccaaaccgaggaacccactggcctcgctccggcgcggggtggggcgggcgctcagccttcggacccggacggggcagggccgcggtgattggaggcggggcgactaggggcggccccgggagcggggcgcagacagcccggcctcctgtgggttcggcgaccatcgcgcggcggccatgggggcgcggctgggccggcgggccgggcccgaggctggctctgaggccggggcggcggccggctgcgggcccgcgccctacgagcgccgggtgcggtggctccgcgagatccagtccacgctccgcgagcggcggccggagcgcgcccggcagctgc

SEQ ID NO: 28110 - DNA, 2300 bp, Homo sapien
gaagtcagttctatttagccagtttaccaagtgtctccttggtgcaggacaccaggagacacaaaatgtcctggataatattgggtttctggctcccaggggtccctgagatgttgttccagcggttctggagtatgggccaggcaccgcttgcatctggaccgatccgcattgttcgatcattgtgagcctcatgatggcagttcgggatgtcatgcccccatgcgccccccaaccccaccccgccatggccctcaccatggcccactcagggcatgaggctttctgggtgattgctggtattcagtgttgtcagcttcttggacctgtcagtgggggtggggctgcaatgagatgccagttgcaggaagtggtttgcacagccttcctggtgtcatgggtcactctcttgccgagtggctttgggcaggtcccttcccctctcaggctgcaggttcctatgccaggagctcccttcttgccccaccagggccttgttttcccagatacagaggtggggcagatcccagcccgttgaaacagactgggctttggaggccacagtgggcccatttctcagagggactgtgtggctggatgctgagccaggcactggactggccctttgagcctcctgtctggccaaggcccctgaggcactgtgggctgctggtgccagcacacaagggtgataaggagatgaaagtcactaggatggtggggcggcacccgccccgggctgtgttggcagctgcccctggctggaggccagcttggccctggaaccctcctcaaggaacaaggacacaaaagagccagctcagccagcctctacctagcaccccaatcagcactcccttcttcccatgacccctaccctctgcccagctcctgtaactggccaaggagctaatggacacccaccagggtcttaatgagtgagccagggttaatgggttactgggcccggtgacacattcaccagcctcccagggctctcaaagtccacactggcctggccttgaacgtcttagctcggccacctccttttccagctttgacacctcggggctcaggacgggcctagggtggtcaagaggtcccctgcagccctcacttcctggaaaaggctccatttcctggccttcaggctcaggtggttccttccgcctggcaggtcctccccaaatccaatcccagctcgggctggattcccaaggcccctattctggtgtctgccccttccctagggctcttccccctggggtgaccatactctcatgcccagccaggtcagggctccttgagagaagaatctggaggggccaggatttgatgggagaatgaatgatggaatgaaagaaggaacgtaagcgtgagccttgctaagagtgacaatactggcaggctgcagaccatgtgtggacctcgatctgagggcttagaggcttcggcctgccagcgctgtgggggcacccaccccatctcattgaatggggcagagcaggtgagggcatgagatggacagatgggcctcatccccctgcttccgttgcctggggtcctcggtcagcctgtttgctcagacccctgaaattgggggtcaaggaaggaccctcctggattatgtgactcccttcagtccaggtgaccagggtccttggagtgacagctcctagagccccacctgtagtcctgcaagctggggagagggcctgttaggagaggcatcccctgccctggggttgtagaggtgaactaggctcctcagaccttgtggggcctcagatgcttacatctccagcccctcctggcgtgggcatctggctgcagcccagctctgtggccccatctcccagggaacctttggtctaatctgcctcccgctgaaacccagcctcattcagccccaccgaggctttcagagttcaggtctctcattcagggtttgagaccccaccgggctcagagacacctgcagcctgcagcggtcccagatcacagcctcagggatgggaccaggagccagcccacatcccacctgcagcagttcctgtgcctttaaagcctcccctccccccgccccgcccccaggccactaggggagggaaggaggagctgggtcacagcagggaatcttagcttggttttggtgtgctgctggatgaccagaccgggcgtcgggtgagcccagaagtgagagcagttggctgtgccccagtgctgtgtgacccagaggcgccgctcaccctctctgagctggtggacatcataggtggggaagctcaggtcagggcact

SEQ ID NO: 28111 - DNA, 2300 bp, Homo sapien
ggctctgagccactctggagagtggcggggggcccagccagttctgtggctgggactttcccaggcagacaagtctgtctcttcctccccagcgggtgcagcccagaactgtcttctgaggaagaggtgctctcctgggcccccactgtccccaggcctcaggtaagcccatcagggtcccaaggaagggggtctgggtttgaggccaaccatggcagctgacctactttctagcctcagtttcccctagtgtgtgcagctctcacgctgtttgggtgagaaccaggcctctgggcttggacattctttcagtgagtttttagggtggagggatgggaaatggaagcccaggacctcagcagggtgtcttcctccgatccggggacatctgcctgtgggaggctgggcccaccctcccttgctgacctgccctgggaggaagggacagggcccagcactgcctactcccctccctgttcttcccagcagtctgagcctggctgggtgtcccctgctcctccagcagcctacttgggcctttgggtagacagattaacagacaggcgaggctgggtcatggttggaccaccccaggaccctgaccgggggctcagctcatgaccctgagcctgggagagatgaggccatgccctccagggcactcagcatgacccggcccagtggacgggactgggtagcttccttggtgcagggggctgtcatgctaggacggggtcactgaccaggccaggcccctgccccatgacttgtggtggaaatgtccttttgtttttgtttttttgcattttttttgagacggagtttcactcttgttgcccaggctggagtgcagtggtgcaatcttgcctcactgcaacctccacctcctgggttcaagcaattctcctgcctcagctcctgagtagctgggattacaggcacctgccaccatgcctggctaattttttgtatttttagtggagatgggggtttcaccatgttggccaggctgttctcaaactcttcacctcaggtgatccacctgcctctgcctcccaaagtgctgggattataggtgtgagccactgcacccggccatgtgatgggaatgttctgtgtccataatagatgctgcatattgctggcccagctcctgaggctctttggacctccaggaatcggtgtctctatcaggaacccttaaccctgacccggactcccagctgggacccggggtgtcggagtggcaagagcgctgtcaggcctggtgaagggtgtgagctgtccaacggggcagggaggaggcagggcctgttctgcagttggacagacagagccctctagctgctttctggaagactgaagggcaggtgatgttggagggagggagtgcaggcaggggctgtgagggagttcaggtcagaaacaggtggcgcctggattcaggctgtggtggtcacggtggggatgaggggctgctttggattgtgctggggatgtggggtggtgcgctgctgcatgactactgccaggtctctctgctcttagtgtctgcatccagggctgggagggggtcaaatgaatcacactatcggccccaggcccaccaagcctggggaggtggccacccttccatgatggcatttggatgttccctgtgtgtggggagggcacagggactccattcgtagaccacctctgggacagtgtgtctgcctctgaggtcagacgctctgcactgggacagggtggagtggagggaaatccagcttggggctcattggaggggcttgctggcagacaccgccctttgtgggaaactgactgtgggagaggggaaccccaacctctgtcaccacatccctcttccctgttgtcacacctgtcacctgctgccatagccatgagacttcccaagggtcactgctgccactcactgcacagcctggaagggagtccacaggggacatacagtgagcaagagacctgtgccactcaggcctcctgggggtgtccccagtgcagccatgatgataatcacagctaccattcaccaagccctgcccacagtctaacctactctattcacaacactcccagcagcaaggcaagtgaggtgctgccgtcatccaggctggacagttcagtgatttgcctgaggccccacagcaggtgagtggcaagtccagcatcagagcagggcaggctggcggtgccccctgagccccctttgccatgctgaccacatgcacatcctgggcttctgcaggaatgccctgtcccctacctgccctgctccg

SEQ ID NO: 28112 - DNA, 2300 bp, Homo sapien
acgtctgtaatcccagcactttgggaggccgaggcgggtggatcacctgaggtcaggagttcaagaccagcctggccaacatggcgaaaccctgtctctactaaaaatgcaaaattagtcaggcatggtaggttgtgcctgtaatcccagctacttgggaggctgtgccaggagaatcgctagaacctggggggctgaggttgcagtgagccgagattgcaccactgcactccacagagtgagattccatctcaaaaaaaaaaaaagaaagaaagaaaaggccctctgaggccaagcttggtgtctcatgcctgtaatcccaacactttgggaggctgaggtagaagttgaggccaggaggtccaagacaagcctgggcaacatagtgagtctacaaaaaaaatattgagaaactacataaatatagtgggggtgggggtggggaacaagaaaacaaaaaattcaaagcatagtgaaaagaaatatagcaaaacccggccgggcatggtggctcacgcctgtaatcccagcactttgagaggccgaggcgtgtggatcacggggtcaggagatcgagaccatcctggctaacacagtgaaacctgtctctactaaaaatacaaaaaaattagccacgtgtggtggcgggcgcctgcagtcccagctacttgggaggctgaggcaggagaatggcgtgaacctgggaggtggagcttgcagtgagccgatatcgcgccactgcactccagcctgggcgatagagcgagactccgtctcaaaaaacaaaaaaaaagtagcaaaacacaacaaaaaaattaaaatttgctgggtgtagttgtgcctttagtctcagctactggggagggtctgctggaggatcacttgagcccaggagttcaaggctgtgattaagccactgcactccagcctgggtgacagagcaagatcctatctctaaaaaaaaaaaagaaaagaaaacactctgtggccacagatgagagaaggcagacaggaagccagtaagccaagcaggcaaagggcaggtggccccagcccggctgttgggtggtgagcagtgtcagggagacaggagtgccggagctgatgaggttcccaaggaggtgaggttgcctgtggccccctcccagggcacagtcccacccctccagtagtgcactctgtcctccctggtaggtacaggcttttccccaccaccatggtgcagccatgcctgcccccaacaccactgctgcagctccatcctccacgcagtggtgcagccccatcccagcacccatttgagctgctgtcccattgcagggggcattgtgacagctgaggacctgaacaactaccgtgctgagctgatcgagcacccgctgaacatcagcctgggagacgtggtgctgtacatgcccagtgcgccgctcagcgggcccgtgctggccctcatcctcaacatcctcaaaggtgagtggtcgcaccacagccgtgtggtaggacccatgacactgcctctctctccccacgccccacccctcctgcatctctgctcgccccccatgccacgtctttccatcactgagctcccgaggtgtgtccctgcgtcacagttcaccatgtcctgaaggaggcagtgcagagcgacagggctgaagcgggcaatgctcaagggttggaggaggaacaggagtcatcaggagggagagaggtgcaggagctcagggctgcagggccggtccagagggtaccccggtccagtgggtgaccctgccacttggtcattgaatggccagagctgatgcgtgacgtgaggtccaggctcgggagccctcaccttacttcactctcaccacagccttctgaagcagctgctgctattggttattaaacgctccttgaggtgggcaaagtggctcaggcaggtgttaaccctctgagcccctcagagcctctggggctcagcaacatgcacctggctctgatcaaccagggtacaacttctcccgggagagcgtggagagccccgagcagaagggcctgacgtaccaccgcatcgtagaggctttccggtttgcctacgccaagaggaccctgcttggggaccccaagtttgtggatgtgactgaggtaaggggcaggggctggcccactgtgggtgtggggcctgccatagaggcatcaggtgggctccccagggtggctacagcctcacatatgctttatgaatccattcctgccacagacttcgattgcgggcctactgtgtgctcggatggactcgtgggtgacccccagtc

SEQ ID NO: 28113 - DNA, 2300 bp, Homo sapien
actgatgtcgcacctcagggtgtgtctcaaaagtgagacttgaacatagcacagcaggatgtcggggtgacacaacctgttgtcccttctctttacctacagtaggctcccttggctgttttgtttttgttgtgtttttgtttgtacacagagtctctgtcatccaggttggagtgcagtggtgtgatcttggctcactgcagcctcaacctccagggctcaagcaatcctcccacttcagccccctgaacagctgggaccagaggcacgtgccaccaaacctggataatttttgtattttttttagagacagggtcttgcccagactggtctcaaactcccgggatcaaactatcttcccacctcagcctcccaaagcgctgggattacaggtgtgtttttttttttgagacagagtctcgctctgttgcccaggctggagtgcagtggcgctatctcggctcactgtaagctccgcctcctgggttcacgccattctcctgcctcagcctcccgagtagctgggattacaggcgcccgccacaccgcccagctaattttttgtatttttagtagagagggggtttcaccgtgatcgcgatctcctgacctcgtgatccgcctgcctcggcctcccaaagtgctgggattacaggcatgagccaccgtgcctggcctgttttgttgatttttaaagcccagggcagtagtcttggaaaatgtcccacatcgtggatttgcctttctgtttccttgagggcagattcagacagaacacctttccctgggattggtcaactaatccgtggggtgttgctgaaactttattttattttattttatttttgagacggagtctcgctctgtcccccaggctgtcccccaggctggagtgcagtggcgggatctccgctcactgcaagctccgcctcccaggttcacgccattctcctgcctcagccccccaagtagctgggactacatgtgcccaccaccgcgcccagctaattttttgtatttttagtagagacggggtttcactgtgttagccaggatggtctcgatctcctgacgtcgtgatccgccctcccaaagtgctgggattacaggcctcggcctcccaaagtgctgggattacaggcgtgagccaccgcgcccggtgttgaaactcccttgaggcattttcttcggccttcgggtccatcctctgtctcctccttgacctcctcatctcctcgccactgccttggggaccttggccaggctcatggcatccagcagccactcaatgtcaatacctccatgttcatctctcagcccgcccttgcccgtgaacccatgcttatttatttattttttttaatacgtgcacccatgctcttcaggtctgatgaagtatccaaaatcaagctcctgaccatccccaaacctgccccttctgcagggtttacctcgctagtcggcgccatccttgattcttctctttctcccacccaggccatcatctcttgcctggttgatacccacagcctcccctttgggctttatccttatccccatcatagctgccagagggatcctgtgaaaacactccccagcctgctcattcctctgccctaagcctgcatggcacagagcaaaagccagttgttatgggacctaggaagtcctgtgggatgggccccagcctgcatcttcatcctcttctccccaccccactccattcactctctgcctatcactcaccagcctataccacctgcctcagggcctttgcactgaccatttaggccacattccaggctcttttcacacgttgcctcctctgagaagccctccctgaccactctgcccatacctcatgcctcttgattccccttacctggcttgtggtttcagcactttccctgtgtgtgtttgtttttcttggcatgagagcaggacctaagtgtctgttccctgttgattccccagtgccaggcatgcagtgcaaactctagaaatattttttgcatgaaggaatgagtgattgaatgcagcaagggtctggaggctgaggaccaggcagacagacattcagagttgctggaacgcgacagagacagggagtcagactggtcatgcaaggtcctgggcctgcccttgggtcctggggagccacggaaggttgtgggtgccagagggttgcggtcagagtcacagtcaagggccttctgagacctgtgccccctccccaccctccctccccacctcctcaggccagctctggggtctcggcaggtggtccgcaacatgacctc

SEQ ID NO: 28114 - DNA, 2300 bp, Homo sapien
gggccactgagacccagaagtaccaaggctggagtcagcttgcagcacagccagggtcgaggtcactccctccctgaggactctagcacggcacagcccctctgcctctctcctggtggtggcgttgaaacagcaccctctgcttcggtcctctacagggtggcagagaaggaggcggtcaataaggtgtccctgcacaacctcgccactgtctttggccccacgctgctccggccctccgagaaggagagcaagctccctgccaaccccagccagcctgtcaccatgactgacagcaggtccttggaggtcatgtctcaggtatgggaagacagtctccagcccatgcaaccccagcctgacagaggtggcctctgcctgccccacccccagtcctgcccatcttccgacttgcattgtatgtggtggtggctgagattcagagagagggacttgcctaggtttgcatggatgggagtgatagggggtgcccaggccacctcctggtcctgctggtgcaccttgctgggggcttaaaaccaccccaagtgttcgggtgtggtggctcatgcctgtaatcccagcactttgggaggccgaggcaggacaactgaacccaggtgtttgagaccagtctgggcaatgtagcaaaccccatctctagaaaaaatacaaagaaaaattagtcaggcattgtggcacacatctgtaatcctaggtatctgggaggctgacacaggaggattgcttgagcccaggagttagaggctgcagtgatccatgatggagccactgtactccagcctgggggacagagcaaggccctgtgcatctctaaaataaataatcaccccccacccaacaagtcatgccttgtcaggaccccaccccacccccgtctcactgtaaggggttcatgacaccagcaggggtttctagcacctgaggtggacttgggggcttgggccccaaagacctccccaccagcagctgtgagcccccctctgagccactctcctcttccccactctgcgagggcaggacgaggtgctgctgtacttcttgcggctggaggccatccctgccctgaacagcaagagacagagcatcctgttctccaccgatgtctaaaggtcccagtccatctcctggaggcggacagatggcctggaaacctctggctaatcgggccatctgtagagtgggaatcaagattttctgaggcatccttgggccacccccaggtgtcaggccatctgccaagagacagcggcccaaagcagaaggacaggtggcctgggcagatcccgcccaggtctgaaagccccaggctggcctcagactgtgggttttttatgtggccacccgagggcgccccaagccagttcatctcggagtccaggcctggccctgggagacagggtgaaagcagtggtttttatgaacttaacttatagagtccaaaagatttctactgaatcacttgtcaagaagcgccctctctggggagaagggaacgtgactggattccctcactgttgtatcttgaataaacgctgctgcttcatcctgtgggggccgtggccctgtccctgtgtgggtggggcctcttccatttccctgacttagaaaccacactccacttctaacagggtttgagaggcttggtcagcactgggtagcgttttgactccattcttggctttcttctttttctttccagaaggatttttgtgcagaaatgggtcttttgttgccgtgttagtcctccttggaaggcagctcagaaggcctgtgaaatgtcgggggacaggacccccagggagggaatcccaggctacgcaccttagggttcgttctccagggagagcgacctcgtcccccgatcctgaccgcccttccggcccacgctctcctgtttggcttccacaggcctggacttctctggcttctctgcccacacactccctgcccccagtgtccctgcccctgccccagcacaggtgacttcatttctgtcctctcagctcagtggactcgctcatcttttgtataagtctccacttggtggcagcagcttgctgatgacttgttttaaaactttcatcctaaataaccttttgatacttgaatatttttaagttttatacatagtttctaatttttttccgaacagatccagatacctaataagatgctggaatgtaatccctggacaatccgtgtcctggcagcatttggtcttcctctaagcgcctggctccgctgttctcaggagtgggttctgaagtctctggaga

SEQ ID NO: 28115 - DNA, 2300 bp, Homo sapien
cccagggcttagcatagcaaaggaagaccagccgggtcaccctggtggccatctgtccctgtcccacctgcagagtcagaacagcctctccccagtggggatcctctctctctgccaaagcaacagcggtccctgccccaaccagactaccccactcagtggagttacggatgctgctccagcatcctaacactgcccagctggtgcctgcctgtgctcacccacaccccccaggccggccttccctgcagcctgggcttggccaccttggcctgattgagcactgaggcctcctgggcacccagccctatcactgcacctgctgcttccagccccaccccaccggctctggggttcttcccagcggcgctgatcatgaagtcaacatgcacgcaagtcgtctcaggaaactttttaatgaaagtgtcggccacggtggtgtgtaggtggctgagctcagattgcagctgctaagacaccagccacttaccaagagaaagccaggctgcttcaaacccagggcccgcggcaaaaaagcatcacttccggccggggagtctggaagccacgccttgtgggaggtcacactggcatctaggccttcgcctgcactgcagaaggagagccgggtcccctcctggagaacgctgcgttccccagccccacaccggctttgccaccacacaggctgttgaggcaggaggcgggtaagacgtagctgtagacccaaagcaaccaccagccctgggaccctgtgggagaggagcacttttagaacatggaaaagtgtggtcatcccatcattagacagcacacatcctacataaataaaaagtcgtatggggaaggaggttggggagggaataaaaaattggcacagacattgatagactggtttccagtttcaaggtaacagatgcacatcatgagaccagaggaggcagagacaagggctggatttggcttttctaagcaacatgtgttcctgtgcagggctgaatggtcgctgagacagagatggaagccaggacaagggagcccaccgggcccagataggtacagagagcagaggctcctgttctgtcctcgccacccacgagggtgacactgcttgtaaatggtggctgtgctctcccagcaagtaaaaagcacaactaaatccacactgcacacagacgcagacagaaagccttcaagtagctctgttttctgctccctgccttgccaggtccacaagcagagaggagtgtcaggcacatggccccactgtcaggctccccagtgagctgtgggttcagcaggagctgcccactgacacacaggggacacccactcctgccaccttgggagcggttgccagacagagccgcactgggtgctggtgtcatccagggaccccacacacttccttaaatgtgatcctgcttccctctgggcagctgcatcctctcctcctgcaggaccgtctggaaacttggctctcagtttgatctcccttctctcctctgcctgccccaagcccctctttctaaaaaagtgatgccatgttcatgggattatttcttgaaaatacttggcggcctccatgcttctgttttctttgagccaggtggtcaggagggcttacaaagaatgcctgggctcccccgcaggtgccggcagatggggtagcgaatggtcctgtgcctccacctgctccgggagggagtctcccgtctctaggcctggccccttcctaaccctccacgtatcctgttctccagagacttcagaacccactcctgagaacagcggagccaggcgcttagaggaagaccaaatgctgccaggacacggattgtccagggattacattccagcatcttattaggtatctggatctgttcggaaaaaaattagaaactatgtataaaacttaaaaatattcaagtatcaaaaggttatttaggatgaaagttttaaaacaagtcatcagcaagctgctgccaccaagtggagacttatacaaaagatgagcgagtccactgagctgagaggacagaaatgaagtcacctgtgctggggcaggggcagggacactgggggcagggagtgtgtgggcagagaagccagagaagtccaggcctgtggaagccaaacaggagagcgtgggccggaagggcggtcaggatcgggggacgaggtcgctctccctggagaacgaaccctaaggtgcgtagcctgggattccctccctgggggtcctgtcccccgacatttcacaggccttctgagctgccttccaaggaggactaacacgg

SEQ ID NO: 28116 - DNA, 2300 bp, Homo sapien
ctcctctgcaggattctgcagggttccgttttcatgctcctatcagtgttgcagcacccgtgctgctgtgcagttacacgcgtctaggtcagcctttcaagtgaagtacaggaagaaacaaaaagagatttcccctatacttttcagatgcagaagtctctttccttttcctctgcccagtgagccaagtgatttctcagggctttaggtccctctgccattgctgaggctgcaggacagctttgcaactggggagataaaaacaaaacaaaccaaggatgatccccttactccttgatgtgcaggagacccctttcccactagcctagctagaaatttaggtggtttatcacagactttttactttcagtgcctgctggacagttctatgactccacatgcccttgggtaaaccagaagaaagaggaggaaaattaacttactatagtcaccccattgaaagggcctttgcaaaactcataactgagaaaattatgacagtgaaacagatcagacctaaccgaccacaccttgcttctaacgcctaagctgtctttgttcattcctgggcataggccaaactagtcttggggaagaattgtttatagtttaaattctgaaacaaaactgataatagtcctttcctgaaaaaaagacgcttcttgcgtggggaactgtcctgcctttgtaggactaacaaattagctacaagatgagagattacggcttaggggccatgcagcttctggccgcaagagtctgaacctccccaagttgcttctgggaataaaatctccgttgcaaaacttaagatcagtgcttgagatattttgcataccctgaattccgatgcagcagatgacaccacccagactgataatctggctcaaccagtcctgcgatctcatccaggaagagaaatcagcaagaactcacttccacccccatgattccatctccaacccgaccaataagcactccctacttcctgagcccatacccaccaaatcatttttaaaaactctgatccccgactgggcatggtggctcacgcctgtaatcccaaggtgggtggatcacttgaggtcagaagtttgagatcagcctggccaatatcatgaaaccccgtctctactgaaaatacaaaaattagcctggtgtggtggcatgcacctgtaatcccagctactcaggaggctgagtcaggagaatcgcctgaacccgggaggcgaaggctgcagtgagcagagatcacatcactgcactctagcctggacgacagaacgagactccatctcaataaatacatagagatataaataaaataaaataaaataaagtttcttaaaaaaaataggaaatctcctgaaaaaccttttcagaaaaatagccacaggtgcatgtttggctcgtgtttttcccagaaacaacctaaatctggcttgataaaccttgattgatgtatttgccccagtcactcatgttgtaaccagcaaaagggcccagctgctcactgcttgtagaaagaagtcaaaatgataatgacatgtgatttaaaaagaaagaattttataatctatgctagcaagggcaagagcagagagcaattccactcttccacgtgaggaaagaacgcaggggttttttttgtttgttttttgcgacggtgtcttgctctgtcgcccaatctggctggagtgcagtggcgcaatctcagctcactgcaacctccgccttctgagttcaagcgattctcctgcctcagcctcccgagttgctgggactacaggcacatgccaccatgcccagctgattttttgtatttttagtagagacggggtttccccgcgttagtcaggatggtctccatctcctgacctcgtgatcctccggccttgacctcccaaagtgctgcgattacagacgtgagccactgcgctcggatgaacgcaggggtttttatttattttattttattttttaagatatttatttatttgtttattttttgagacagagtctcactctttcacccgggctggagtgcagtggcgtgatctcggctcactgcaagctccgcctcccgggttcacgccattttgctgcctcagcctcccgagtagctgggactacaggtgcccgccaccacgcccggctaattttttgtatttttagtagagatagggtttcactgtgttagccaggatggtctccatctcctgacctcatgatctacccgcctcagcctgccaaagtgctgggattacaggcgtgagccaccgcgcccggccaaagcggtt

SEQ ID NO: 28117 - DNA, 2300 bp, Homo sapien
accagagcagcagtgccctaaccacactgtccttgccaggcaaatattcccaagattcccctttctggccttccagagccaccttgatttcatcccatttcccagttctccaggctcccatgggctctgggatcacatattatcttcccagtttatttccttttgcctgaggaagccaaagtcagcttctgtggcttacggccagagacccctgacactgaccaatggaaaaaagggggctctggatccactgctgcacggagaggcactctaagctgccctctagtccttctgaaggaaggcctgaatactgggggaccctaaaaggcattgcaaatccttaacatcaccatcaaagtcatacagggttttggccctgcacctctctggccaacatcccaccaccgtccccattgttcacaccactccagccccacaggcatctgtgctatttgtcactgtttgactggacacactccctcctcagggactttgcatttgctgttcccttgactcaactgctcttcctccagaaatccccatggcctactccttttcctctttgcttaaatgtcacctgctcagtggggcctccctcaaccaccctacttcagaatacgatccccaggggtctgggccctccctgtcccccttgcctacttaatttttctccagaactttccagcatggtctgtccttttcttacatattttgttgtccgcctcctaaactccatgagggcagagttcattgtctgtcttgctcacttagaaatctctagcacagtcacttggcacagagtaggtgctcaataaatattgacctgagttgcattctgggtggatacagttagggacttggggtgaccaggggctcttgatggaacaaggcttttcccacagagcccactgcttgctcagccccagagatcctggctgacaagtgcctccttttggggccagactcctgggaaaaccccactcctccagtgacctgcatgtcggggagggagccacttaagtcccggcctctcctgaatggataaccagtgtatcttggaagactcttttttttttttttttttttgagatggagtttcacttttgttgcccaggctggagtgtggtggcacaatcttggctcactgacacctctgcctccagggttcaagcaattctcatgcctcagcctcctgagtagctgggattacaggagcacgccaccatgcctggctaatttttgtatttgtattttttttattttttgagacggagtctcactctgtcgctcaggctggagtgcaatggcgccatgttggatcactgtaacctctgcttcccgggttcaagagattctcctgccttagcctccccagtagctgggattacaggcagctcgccatcatgtccggctaatttttgtattttcgtagagacggggtttcactatgttggccaggctggtctcgaactcctgacctcaagtgatctgcccgcctcggcctcccaaagtgttgggattacaggcgtgagccaccgcgaccggctggaagaccctcaataataataattaataataataacagtaacagtggcaagcatttatgctcgctggcctttccccctgggtctgtattaagggcttcacatccaatatctcacttaaggctcagatcgttctgagacccattatgcccattttataccacattatacccattttaaagatgagaaaactgaggcttggagaatatcggtagtagccccaccatttcctgtgacttcctggagcctggcccacagaggagggttcaggacggacgctttccttccccgccctagggaagagggagggacgcgggcgctggcgtggaggttgggggagcctgagaggctcgggcgctgggtgcgcgggagggagcgtgcgtgcttggcgcgaaggctcctggcgcaggcgacccggctgccccgccgagcggtggctttccggaggggtggggcggccgcctcgggtcctgacgtcgggcgccctccggccgtcactcagcgctcggccccgccccgccgcggctgcagcagcagcgccgcggccggaggagctaccgccgccaccgccgccaccgcctcctgggactcggaacgcagcgctcggagccatggcctcggcccccgcgggtaagaggccgctggacacgagggcggcgggagggcagcgcccggcccccgcaccctctctcggctgacccgcggctctcgtttcttgtcccacagaggcggagacccgacagaggctgctacgca

SEQ ID NO: 28118 - DNA, 2300 bp, Homo sapien
atggaagagttctgggcagaggagggacgtggtttgatagaacttttctttaactgaaaaatattcatttatttatactatgtgaacatataccatatgcacattttaaaatggtaaaatatacataatataaaatgtgccttcttaaccatttttaagtgtacaattcagtcttgagtacatttacattcttgtgtgccaacctccagatctcttttcgaaagataaactctatacccattaaataatgcctccccatttctcctctccccagcccctggcaaccaccattctcctttctttctctttaaatttgactactctaagtacctcttataagtggaatcatgcagcatttgttattttgcgtctagattatttcacttagcacagcgtcctcaaggttcattcgtattttggcatgtgtcagaatttccttcctttttaaggctggatagtattccattgtgtgtgtagaccacattttgtctatccattcagccatcgaaggacacttgggttgtttccaccttttggctactgtgaataatagtgctgtgaacatgggtatacaaatatgactttgagactctgccttcagttcttttgggtgtatgcccagaagtggaatgactggatgatatgctaattgtatggttaatcttttgaagaaccaccatactgtctaccatagcagctgcaccatttcaccttctgatcattgcacaagggttccagtttctccacatccccaccaacacttactttctgttttttcatagcagccatcctaataggtgtgagtggtatctcattgtggttttgatttgcatttcccattgaacatctttccatgtgcttgttcgtcatttgcacatcttcttcagagaaatgcctattcaagtcctttgtccatttttgaattcagttgtttgttgttgagttgcagttctccatatattctggacattaaccctttatcacatagatgatttgcagatattttcttctatttcacgggttgccgttttcactgtttattttgttctttgatccacaaaaagttttaactttgctgtccagtttacctatttttaattttgttgctcatgcatttggtgtcatatccaagaaatcattgtcaaatccaatgttgtagggaccagccccacagggtcggtgggtctctccctgtgtgcggcaacaagagagtgtagaaataaagacacaagacaaagagacaagagaaaaggcagctgggcccgggggaccactaccaccaatgcacggagaccggtagtggccccaaatgtctggctgcactgttatttattggatacaaggcagaaggggcagggtaaagaatgtgagtcacctccaatgataggtaaggtcacgtgggtcacatgtccactggacagggggcccttccctgcctggcagctgaggcagagagagagaggagacagagagaaagacagcttatgccattatttctgcatatcagggactattagtattttcactaatttactactgctatctagaaggcagagccaggtgtacaggatgaaacatgaaggcagactaggagtgtgaccactgaagcacagcatcacagggagacggttaggcctccagataactgcgggcgagcctgactgatgtcaggccctccacaagaggtggaggagcagagtcttctctaaactcccccggggaaagggagaccccccccccccctttcccagtctgctaagtagcgggtgttgttccttgacaccttttgctaccgctggaccacgatccgcctggtaacgggcgtcttcccagatgctggcatcactgctagaccaaggagccctctggtggccctgtccgggcataactgaaggcttgcactcttgtctaatggtcacacctcactatgtcccctcagctcctatctctgtatggcctggtttttcctaggctatgattatagagtgaggattatcataatattggaataaaaagtaactgctacaaactaatgattaatgatattcatatataatcatatctaagatctatatctggtataactattcttgttttatattttattatactggaacagctcgtgtcctctgtctcttgcctcggtgcctgggtggcttgccacccacacaatgtcatgaagctttctccgttttcttgtatgatttttatagttttagcttgtgttgaagtctttggtccattttactttaatttctgtatgtggtataaggtaagggtccaattttattcttttgtat

SEQ ID NO: 28119 - DNA, 2300 bp, Homo sapien
gaaaagttgaaggagaggagaaagcagaaagtttctgtagttctgtattataaggacccatgctagtgaaatgtctgaagttcatctcagtactagtgtgaggcccctccacacttcacccatgcctggtggcttcctggggagtcagtaactgacaactctgatgtacagagccccgtattcagagctggggatgcagaagcacattaggtgaggtccttcccagtttcatgggggttgtggtggtcactggtgggattgaggcaaccccgagggctgcaggagcatatgggaagcacctaagacgggcaggggtgaaggcagtcagagaagactcctggaggagctggttgttcgtaaattctcagaaggaattacttttcgggccaagagggtgaagaagggaagagaagacagcacaggcagaggtctggaggggagaccagcgtggtgtggtgtgtgtgtccgaatgggtttagggaggggcaggaagggcatggtgggtgtgagttgctgagacatgaaggagtaggatggtggaggcagcagtgagaggggaggctggagaggaaacaaggatcacgactgctaagtggtgcacggttcagggggcggggtggtcaggctgcaacagagacctggatggaggctgctggggccatgcatctaggtgaaagtggtgtaaccctggcccaggatggcactgggaattgggaggtgggcagggcttggaggagtctcagggaggtgggcaggagggagtggctcaggcgaggcccttgggcaggatggaccctcagtccccctcccgaagtcctgagtagccataggagagggtcgggctccccaccctctcttttcccatcctggctctccttacctagatcagccaatccgtccccgtggtgcccagaggtctggcagacgcagagcctgttacctgggctgtgttactcagggacaatggaagctccccacctctttgctgaatcccacaaggaaaaagctggaaatctgtggcccttctgtaaggccattgctgtaaggaaaggaagcgggttggttttatttgtattgtatcctcagcacctgtagcccatgtggggtacatgggaggccctcaggtcatgcgttgattgagtggataggtgggggaaggtcagcatcttgctcatcttgtattccatatggctagtttggtgcctggtatgtaataggtacttatcaaattgagtgagtgaatgaatggatgaatgaatgagtaaagagagagggaaggtagtaaaaaagaaagaaacagtcttctcacttttggccgggcgcagtggctcacacctgtaatcccagcactttgggaggctgaggcgggcggatcacgaggtcaagagatcaagaccatcctggccaacaaggtgaaaccccgtctctactaaaaaaaaaaaaaaaaaaatacaaaaattagctgggcgtggtggcgcatgcctgtagtcccagctactcaggaggctgaggcaggagaatcatttgaacccgggaggctgcagtgagtcaagattgtgctacagcactccagcctggtgacagagccatactctgtcaagaaagaaaggaaggaaggaaggaagcggaggggggggagggaaagaaaaatagaaacagtcttctcacttttgtatccccagggcctatgtactatctagcacatagtaaggactcaatgaatagttgaaatttatatatgtatgcatgaatgaataaaggaaggagggaaataaggaaagaagtagccttgctccctttgtgtcttcagagcctaaccagtgctaggcatagcatagtaggtgctcagttaatatctgctggatgttaactgcgtgaatgttggatggatcagagccactctcttccacgttggtctggccctccccaggcgcccctttgttgacacctcgggtgacattgcatctgccctggcaggtggacgagcagattcatgcctgctatgcacagaccatggctgagtggctgggctgcgaggcgatcgtgcggcagagggagcgggagtcccatgcggccgccctggccaaatgctcatccggggccagcttggacagccacctgcaccggatgttgcacagggactcaaccatcagcaatgaggtgatgggcggctggcctcggggagcgcgggggctggggaaggtcagggtctgcttcattgggctgttctaagagtggtgaagactgggtgtctggggcctggtgacagtctcacccctggctttttctttaagagtgtg

SEQ ID NO: 28120 - DNA, 2300 bp, Homo sapien
gaggctaagacaagaggattgcttgagcccaggagttggaggttgcagtgagctatgatcatgccactgcattccaagcctgggggacagcaagactctgtctctaaaatgtaataaataagtccaggcccagtagctcacacctgtaatcccagcactttggaaggccgaggcaggtggatcacttgaggtcaggagttggaaaccagcctggccaacatggtgaaaccccatttctactaaaaatacaaaagttagccaggcattgtggtggggacttgtaattccagctacacgggaggctgcggcaggagaaacacttgaacccaggagacagaggttgcagtgagccaagatcgtgccactgcactccagccttggtgacacagcaagactctgtctcaaaataaataaataaaataaaataaataggcaaggcgtggtggctcagcctgtaacctcagcactttgggaggtggaggtgggcagattgtgactagcctgggcaacatggtgaaacgtcacctctacaaaaaatagaaaaattagccaggtgtgttggcagacacctgtggtcccagctactcaggaggctgaggcaggaggatcacttgaggctgccaaggtcgaggctgcagtgagccgtgattgtgccactgcactccagcctgggtggcagaatgagaccctgtctcaaaaattaattaaataaataaatacataataaatggggagcataattccccactttttttttttttttttttgagatggagtttcactcttgttgcccaggctggagtgcaatggtgccatctcagctcactgcaatctccgcctcccaggttcaagcaattcttctccctcagcctcccgagtagctgggattacaggcatgaactaccatgcctggccaactacctacactttagacacggactgcacatagtgacttgtttccaaaaagtgcagtatggaaggcagtgatgggatgagaaacctgacaaacacgacctcagccaggtgaccatggccaacatcagcagtcataaatcatggtgacagtatatacccttatgatgtgattaaactggcccattacctctgtggttttcctctcgataacccatagcccagtcttaccatgagaaaggcatcagataaattccattactaatagtgcagcatcctgcaaaaatacctgaccagtacgcctcaaaactatcaaggtctctaggcgcggtggctcacgcctttaatcccagcactttgagaggctgaggcaggcaggtcacaaggtcaggagatcgagaccattctggctaacacggtgaaaccccgtctctactaaaaagacaaaaaaattagttgggcttggtggcgggcgcctgtagtcccagctacttgggaggctgaggcaggagaatggcgtgaacctgggaggcggagcttgcagtgagccaagattgcgccactgcactccagcctgggcgacagagcgagattctgtcttaaaaaaaaaggaaaaaaaaaaaaaaactatcaaggtcatcaaaaacaagaaaagcctgagaaactgcgacagccaagaggagcttaagggaacataaccaattgatgtaatgtgctgttctggatgagagcttggaacagaaaaatgacattcagtacacgctaaggaaatctgaatacaatatggactttagttcataatgtgtccgtattggttcaacaaatgtaccatgctaatgtccagatattaatagaggaaaccacgtgtggggtgcatgagaagtctttcctgtcttctcagtttttctgtaaatcaaaacttttctgaaaaataaagccttttggccaggtgcagtggctcaggcctgtaatcccagtactttgggaggccaaggcaggcagatcacgaggtcaggagatcaagaccatcctggctaacacggtgaaaccccgtctctactaaaaatacaaaaaaggtccacccccaacattggaggtcatatttcaacatgagatttggagaggacaaacatctgaaccatatcacttgggcagcggggcatctgactgttctgtgatgctttctcagaggcccttgccttcagctgcttcacggagctcatgaagaggatgaaccagaacttcccccacggaggcgccatggacacgcactttgcaaacatgagatcgttgatccaggtatgacccagcatccattcttgctttggacttttttgggaaacagttagtaaagcttagtggctccagactgagctatttagagccca

SEQ ID NO: 28121 - DNA, 2300 bp, Homo sapien
cccaaaccaagacatccatggtgtttcagtccaaaagtaagacgcagaatgcaatacgtaatgctagcctggccaacatggtgaaaccccatctctactaaaaatacaaaaattagccaggtgtggtggcatgtgcctgtagtcccagctactcgggaggctgaggcaggggaactgtttgaatctgggaggcagaggttgcaatgagccgacatggcaccactgcattccagcctggccgacacacagcaagactctgtttcaaaaaaaaaaaaagataataccatctgcagcaatgagaaatgcacgcatacagcaccacaccaattttgcaaacctaactccacacaaaatgacatacattaaataattaaaataaaaaaaaaacaaagtggctgctataaacagcatctgtgttccttgaggccagcctggccaatatagggagaccttgtttccacagaaaagaaaaaaggtttctaattagccacatgtgatggaacgtctctgcaaaaaaataaaaataaataaaaattagctgccccagtagtcccagctactcagcaggtgggaggatcgcttgaacccaggagtttgaggtggcagtgagctatgatcatgcactgcactccaaccttttttctctgaaagaaagaaagagagagagagggaaggaaggaaggagggagggagggagggaaggaaggaaggaagcaaggaaggaaggaaagaaagggaaggagggaaggagggagggagagagaaggaaggagggaaggaaggaaggaaggaaggaaggaaggaaggaagggcgggcatatgtgtgtgaattattattatttttttttttttgagacggagtctcgctctgtcgcccaggctggagtgcagtggtgcgatctcggctcactgcaagctccgcctcccgggttcacgccattctcctgcctcagcctcccaagtagctgggactacaggcgcccgctcccacgcccggctaatttttttttgtatttttagtagagacggagtttcaccgtgttagccaggatgttctcgatctcctgacctcgtgatccacccgcctcggcctcccaaagtgctgggattacaggcgtgagccaccgcgcccggctatgtgtgtgaatttttaaaaggtgccccgactgggtagaagcagccctttagaacagaggaggctccatggaagaatggataaataggccgtgcgcggtggctcacgcctgtaatcccagcactttgggaggccgaggcaggcggatcacaaggtcaggagatcgagatcatcctggctaacacggtggaacccgtctctactaaaaatacaaaaaattagccgggcgcggtggcgggcgcctgtagtcccagctactccggaggctgaggcaggagaatggcgtgaccccgggaggcggagcttgcagtgagccgagatcgcaccactgcactccagcctgggcgacagagcaataatctgtctcaaaaaaaaaaaaaaaaaaaaagcgataaatgaatgaacgaacgaacaaatgaacaaatgaaagtatgcacggaatatgagaagagccctgcatggaccagtgaggatgatgtgccatgaagaaggtggaggggcaaatgttcaaaggtctttcagggctaacatttattctaggacttgggggttgtacttctagaatttgctagggcaaagtaacccccactaccagaccacagttattagtacctcccatttgcatctccaggctcaaggggggctgatgatctggggtctgatcataacaccagatccctggctagggagcacctcggccagcccctttctctccttgtccctgcagtctccattagtaatcttccctgttgacccctaggtcagcgatactgcctaatgttgagcagtgtgtgggtagctctggggctctctctgacctgcacctcagccttcagcctcatctcccctgcctggttccagaccccgaccttctcctttggcatcctcacctactgctcctggcctcagggcaacagttggaaccagagctgcgtgaccttcagttccctggaggatattcctgactttgcctggaaggtgagagctggctcaccaagtcactgggtcttcaggggctcgtttaaactcattaaggcaggaaagctggctgagcggaattcgaggaggctttcctcactgcctgagtgtcccagtggcttcgaatttgccattactctccttagaactgagcatagaagttcttcaacctgacagcccttcagaa

SEQ ID NO: 28122 - DNA, 2300 bp, Homo sapien
ctgggaggaacttggccggataaaaggaaatgagtattttaacatcaggatagatacattgctttgcccaaagtcgggttcatttatgttctctccaacagtatctgagtgtccatttccccacatcctcacccacactgggtgtgttcattcttttcaattttatggtatttcattgttttaattatacaagcagccctttcaattactccactttttcctttccatctcaaatccttaaacactgaggtgtttctttttctttttgtttctttccagcaaaaggaggggcacagtttggatggagcatgcatcccgagaagcccctggaagcctgggacactccgggataagtccaggcagacggagcagaaggttagctctaaccaagaccccgacagctgtcgcggtggaagctcagtggaggccccgtgcccttctgacgtcactccagaggatgaccggagcttccagactgtgtgggccacagtatttgagcaccacgtggagagacacacagtggctgaccagtcgggacgttgtctctccaccacaccccctggtgacatggcccatgcccgtgtctcagaacccaggccgaggcctgagatgggctcttggctgggcagggacccaccagacatgacaaaactgaagaaagagaactccagagggtttgacaatcccgagacggagaaattgggaccaaccacccttttgaatggtgaactgagaccgtatcacacgcctctccgggacaaataccctttgtctgaaaaccacaataataacaccttcctcaaacacttggaaaatcctcccacatcgcagagaattgagcccagatatgacattgtgcatgcagtgggagagcgtgtgcacagcgaggccatctcaccggcaccggaggagaaagcggtcacgctccgcagcctcaggtcttggctctcactgaaggacaggcagctgtcccaggaggtcacccctgctgacctggagtgtggtttggaaggtcaggcggggtccgtccaaagggccagtttgatttgggaagctcgaggcatgcctgaggctagtggaccgaagtttgggggcaattgcccgtttcccaaatggacaggcggggcagtggtgagctcgcacaaagccaccgtggcagtcagcgaagagcactgtgctcccggggccacctccgtcagggctatcaaggctgccatctgggaaagccagcatgaggggccagagggggccagaagcaagccaggagtgggagcaaggggcccaccccagggatgccccctcgatcctctttccagggctacgaatgggccttctgactcccaagcacgaacacatccagatgcatttgctgtgcagaaagggcccttcattgtagccgccagggagggtgatccagggccggcccaggtgccacagcctgcagtcagaatgcggaaagccggcgccatggaccagagaatggacagatggcggcggcggactttaccccccaacgtgaaatttgatacattcagttctcttgtcccagaggactctccacatgtggggcacagacgaacagattatgtgagccccacagccagtgccttaagaaaacctcaactatcccactacagggtggagacccaggaggtgaacccaggtgcttcacgggaccagacttccccagcagtgaagcaagggtcacctgtggaacccaaggcgacattttttgcagtcacctatcagattcccaatactcaaaaggcaaagggtgtggttctgtcaggagctgaaagcttgctggaacattctagaaaaatcactccaccctcgtctcctcattctttaacatccactttggtttctcttggtcatgaagaggcattggagatggcaggcagtaaaaactggatgaagggacgagagcatgaaaatgcaagcattttaaaaactctgaagccaacagaccgtccatcatctcttggggcctggagtctggaccctttcaatggaagaatcattgatgtggatgccttatggagtcatcggggatcagaagatggccctcgtcctcaaagcaattggaaggaaagtgcgaacaagatgtcccccagcggcggagctccccaaaccaccccgactctgaggagtcgtccaaaagatcttcctgtgagaaggaagactgatgtgatcagtgacacgttcccaggtaaaatcagagatggctacagatccagcgttcttgacattgacgccctgatggcagagtaccaggagctgtcgctgaaagtccctgg

SEQ ID NO: 28123 - DNA, 2300 bp, Homo sapien
cagggctggcttttcagctgtactgtctggcagttagggagcagggccggccttccgactgtgccgtcagggagcagggccagccttccgactgtgccatcagggagcagggccggccttctgactgtgctgccagtccctggctctgccatcgctggggccaacccctgacttgtcaggcagcgagcagctgagacccagtgcctgctgggagtggggcgctgagaatcaatgaaaccacaggcctgcctctgaagagctttgaagctaccccgtggttttctcagctgctgcacccagcaccctctccttgttttttgtttttttgttgtttttttttttgagacagagcctcactctgtcacccaggctggagtgcagtggcacgatctcggctcactgcaagctccgcctaccgggttcacgccattctcctgcctcagcctcccgagtagctgggactacaggcgcccgcctccgcggccggctaattttttatatttttagtagagacggggtttcaccgtgttagccaggatggtctcgatctcctgacctcatgatctgcccaccttggcctcccaaagttctgggattacaggcgtgagccaccgtgcccagcccaccctctccttatttaagtgagtttcctgttagatgctctgcctggtgtccagtggtgaggctgaaggatgcagcacagatgggcccaggatgttgctggggcagtcagtgtgccaagctccagcctgggggcgggagcctggtgcagaacccagggcctctgcctggtgcctctgtgaacacctcccccgcctcagttttcccctctcagcagtgagaaggaccttgcctcagaagcacagctgtcttgcatccggcgctcacttgccggagtctctgggttatggcctcggcttatgaggagcaggtgttgagtaggggatccaggagcgtctggcttgtatttgaatccctgtctcactgtttagctgctgctcacctcaggaacctcttttgaccctgtgagttttggtttcctcatctggacagtagaagtgatgatactgccctcatgatatgaccatgaaaactaaactagatggtttggcaggattctaccttgttgaatcctcaaagccctgaacacagggataatttgtcgcattttacagaaggggtaactgaggctcaggaggatgaggtgacttgctaaaatcatgctcttttgaaggaaacatctgggaaagtttgccttggatttgcccgaggtgtgcttttattgcattttaatctctgaaaattgacattctcctcactccccacctggtgcagctggcagctggtgcctcagggagctgatccctccctttgccagcaccccactccccatgctgggctgggtgtccacaggagtggacgggcccaggaatcatggctgggaggcctgggttccagccttgctttagctaccaactcaccgcgtgaccttggccaagtcccttgacttctctgggcctcggttttcctctctgtaaaatggggatggccacaccctccttctggggggatcagaagcttagctgagtttaaaaggaacatgactgacatcaaaggagcccggtaaaccaatgggatcctgagttgatttccttccctgtaacgagtggcagggcctccttctcctcatgtggtttggggaggaggaaccacatacatttgggctcacacgcacagcacacagtcagtccacacatgcacaaaacacactcgtatgcacacatgcacacatacttgactccacgtaaaagcatgtacacacacactccttcatgcataaacacacacacacacgcgtgcacacattcagttcccgggcatcaccttctctcttcttgccttcttgccgtacaactgaaaaccctaaaaccctccgtgcctacggctcccgggagggtgagggtccaggcagctgggttcagaaggatccacccctggacccgccccactggacgagaagccagagatgccccgggcggggctcataggaccgagtggtggcttctcagttccccaggcagccgtggccattagtggagccgactggctggtcccctggccgtgagccggcttctgaatgatttatgccgccttgaacttgactccagcgtgacaggagtgagaagagccgctcccgctagaggaaagctggaaaccgtactgtgctcaccacataacctctgggtgctggaaatggagtattactactgccccagcctgctgaagctcttgcgctacct

SEQ ID NO: 28124 - DNA, 2300 bp, Homo sapien
agcctgggaggccaaggctgcagtgagctgtgatcatgccactgcagtccagcctgggcaacagagtgagatcctgtatccaaaaaaagaagaagagagacagggagagaaagagaatgaatagctgtaaggactgggaatacatagaaaagaaagagatctgttggccatattgccagagagtcctttgtgataaactttctcaagtgaggccctttgaccagtgtctagaaaacaaatatttgttcaaaactgaagtgaggtggtggtggaaaggacataggatgcattctgagcgacctgggtttcaattgtgtacttggtgtccgaacaataaatatttacagagccctgactctgggccaggtaccatgtcagacctgggaaaacctggggtgggagcagctctggtgcatgcctggtgacatccttgctgtgtgaccttgggcaagtgaatctatgtctctgaatctgcatttccttgtctgtaaaagtagtggggttggggggacatggatccctgctagaaggagaaacctcctttaacaggtgtgcctgacctccaggatccagctgctgcccacccccttctaacaacccctgacatgtttgggatctccaggcagaggacagaaaacctgcatgggtcagatgagcggggcctggccgaggacagtgggtgttagggtctagtcgtacccccaacccctagtactccagccctgtaagggttaaaacccagggagctcacgtgacctagtgtaaaccatgaatcattcccattgctcccagtgctgagcctgctgcccaggacagggcagatgctgtgccccgggttgccatggcaactccgcctgtactgaaatacagccctccccagtccttcctgggggacctcagaggctgtctcacctggatcagtgttgccttccagagagggagggagagacagctgaaaaggagagagagaggagagacgcttagagacaagcaagtggaagttgagacacagggagagggaggagagcgaggctgagaaatcaacagagaaacagaccacgagagggagacagactgacagccgaccagaggtcccaagacgctgcctgtaaccttagaggcagaagccgtttcccagcagtgctaaccttcccggggctgccagatcgccgacatacacgcacacacacacagagtgcacacacatgcacacacgtgcagccgcatttcctggtgcgcttgctgtgagggcacaggggtgggtaggctggcaggcacgtgaagttgccatcagccccgagggaccgtgagcgagttgggacttgggggagaaaaaaatgggggcggacgtcagctccctgggcggccgccgccaccgcctccgcctccccgaggcccctcctgcattcctgggcagcgaagcccctcgctaagacgggggctgatgtcatcccgggctgctcagccaggggacccgggggccctggtggctgcctccggaagtgagctagccgcctgccggccgacaggtttggaatctccagccagaggacagaaaacctgcatgggtcaggtgagcggggtctggccgagggcagccgggcagggggcagcagggtgcggcagcttgcccaccggaacctcccagggtgcacctcaggggggctgcctacctgaagggaagtgaggacgagggtgcccaaaggccgccccctccacccccacccccatccccatcccccgcctttcgggaccgtcacgccctggagtgagtgcagccggcttgttcctcaaagctccttgtctcggccgatcagctgggtgagccctggaactggaacctggactgcccagtgtgttgactttataactccgctggggtggactcccagcctggcacttagctgcctcttaattctgagcggcacccgtggatgcagccggctcctggctcagggatgtttacttacccttggtttgcctgaagaaagctgctgtttttaattttttttcctccaagcaagcccaaaacttccatgagcaaaagagtccaaagaggcaagaggacactggcgttttaattgctctctccctccctaacttccttcttccctctcctcctggctggccccatggattacctgggagataaactcacagtggcccagacccacatgacccagtggatgggcaccgtgaggaggtccttccaggaagccctcaatttggtgaccaccacggtgggccacgaacggacgagtgcagagtcggccagccggacccccttcaagcgtacttcc

SEQ ID NO: 28125 - DNA, 2300 bp, Homo sapien
aatatttaagtgaagtccctgagtaaaaagggcgtgtgtgggttttccagctcattgaaaatctttgaagtgatggtttgagaggaaaggtttggttgccacaagaactaatttttaagcaccacaagctaagaacggccacgctcaccacacatttaccagcacatcaatgcacgatcatccccatttcacagaggaggaaatcaaggcacagagagggaaggagtctgtccaagatcacacagctgggaagcggcagagccaggactcaacccctaggcagggggtccctggccttgcgtttcgttgacttatctgcaacactgcacatgttcctatcctaactctgcctttatcctgctcaggcagagtatctaggcaagcaacagagagagagcattcacaagtgtgcagattctgtgtgcctggcactgtgctgggggcttgcttcaatctcataccaaggccttggttctcctcattggacacaggaagaaactgaggcttaagaatgggtcagggctcctcagccaggagtctgattcaagctgtcaaggccaaggccagctggtgcctaccacccagtagggtggctacatgggaaggagcctgaagcttgaatgtatttagcatgtatttacactcttggtggcatctcgacgcaacacggaatggttctctgcaccacccaacttcatttattcaaccagctggagaggccactcctgccagtggcaccaacctgtaacacagggtaagacgcctaggggattcatgccaatgcccatggtcacaccactccccagggtggggaaagagggatgccaacagagcctgcctgtcaccaaccccataccctgagagagaacaggagtgacagagaaacaaacagagacagagcaaggcagaaagacacatcacagagacagagatacacacagagggagacagaatgaatgaggggccttctttccctgtggcaagtcacaccttccagaggttggggaatctgtctcataaatccaagccccactaatttgttctgggccacaaagaagcacagacccactgtgaaggagacgtcctgtgaacgagacacgtgtcatgcccaagtgctcggctcctgccttgcatttgcaactgcctgctctggctgctgcgtgacctggggtgagtcacacctctgggtcagcagaggggatactgagcccctgcacctggcagggcagctgtgagccctgccacctcgagtgtagggagggccagctcagggctcctccctaaatgctgggtcccttaatgactatagcactcctggctaggaggaacccagaaaaaggggctggcttagcccttcgcctgtcctcaagtgctcccataaactgggccaacacagtcaggtggcagaagtctcctatgtgaaaatggcaggccctctctttaggctcaggtctggtcagtgacctgggcagccctgaattaattgggagggtctggggagaacatctgctgggagctggactgcaaagagccgtgaatggggaggtcagagcctggggttcgggacctggctctgccactcactcactgtgcttcccccacagtaggcactttcgctttctgggcccagtcccacctctccaaatcatcagaaggaccttacgattgtttctgcactgtcgcctagcaggacacaggccaaggttttaatcattagctgtcattccaccctgctgtcccaatccaagccctcccgagcctgcctgagtaagaaatcaaggcctccctccctggcccactcacaccaaacccaaggttcacggccagcgggcaaactcgcccaccacacctcggtctcctaagaccctttccttggcaatccaatgaaagctcggtggaacgacaaaagctacaactcagcgtgcacatgacaccgccacttgtgcttcctaggagggtgagaggagatgaggcaggtgccactaatccaccctaaaaatagggagaaggatgagctttcgtgtcgggggttggggtgttcacacttaaacataaatcaactggcaaattcagcccaactcacgtgctggccctgtccacacagacgtcgactccagcaaaaatgtcctgactgacttcaggagagaggaattattgctacgtgcctctttcccaggtacaggggacaggaagtgcctgggctttgactgacaactattctggaagaagtaacttccccggtttgatgtctgggaccccctccctgggaggactggaggggaggagctttcagtgttgtt

SEQ ID NO: 28126 - DNA, 2300 bp, Homo sapien
gtggtggttctcagctgggtggattgtgccctccagagcatgtctggtaatgaaaggaggcattattggttatcacaagaaggagagaagatgctccaggaagtgagtagaggccagggatgctgctcagcatcctgcagtgcacaggacagctcccaccccgaccccaccacaaagaatgacccgaccccaaatggcagtagtgtcaaggttgaaaagtctagattggggagatgtggtacatcaaagtgctgagcgtgcagtaggtctgcaaggtcctcaaagatgtgatgggagggggagccacgccatccccacctctgccttcctccttctgtcccagctggtggcaactacatcccaactcagggggtccaaaccgactgctttctgtgaccttcagcaggaagtagccccttggcttgaactgtccagagtaggcaggatgctgggaataaaagtcaaaaataacagatactgtgcgcagtgctttgcttgcatgacctcccaaaatggcccaagtggagagaaggttctccatttatggtgaggagacagtagctctgagaccttcaggaactcgtccaaggtcacacacatctgcctgactcagagtccagctgtcatccacagcatctcaccaccatctccctctagggggtacagggtaactgtgtttttgtttgtttgtttgttttttgagacggagtcttgctctgttgcccaggctggagtgcagtggtgcgatctcagctcactgcaagctctgcctcctgggttcacaccattctcctgcctcagcctcccatgtagctgggactacaggcacccgccaccacacctggctaattttttgtgtttttagtagagacagggtttcaccgtgttagccaggatggtctcgagctcctgacttcgtgatccgcctgcctcggcctcccagagtgttgggattacaggcgtgagccaccgcgcccggcctgtaactgggttttatgctgacttgaggattttagccaaaaacaaataccaacaacaacaaaagaaaaccttgttaactcactcctttgctccaatataattttattcataaaataatcacttattagatattgattacaggcaaaattatactttgttagacacttaaaaaattcctggaagctgggtgcagtggcacgtgcctgtagttccggttattcaggacactgaggagaaaggattgcttgagcccaggagtttgagtccagcctgggcaatgtagcaacaacctatctctaaaaaataaaataaaaatacctggatctaccttttttctttggtcataaataagttgactgtgatggtcacttttatttctattgaggctaagatcccaggtcctggagcaggccagccccttctctctgctgtgtgattctgagtaaatgggttcacctctctgaactcagtttctccatgtataaagtggaatcagaattcctcccctaaggatggctggatgagaattccatacaatgcttgtgaagctggcacaatgccttgcgtgtagtaggtgttcaagaaatggtagctattattcgtgcgtgtcttctacatgaagaaagtcagtctgtgagttctgtgacggcatcctatggaaacggttgggtggatttgcgcccaagttggagagtatggttagcgtgatctgacttaaaacttaggccacatggcacatggaaactggagagtgtctggggtccctcactttaagaactagaatttttccaaaggttgcgtgtgactcaataggaaatggtgaccccaagaaaccaaagaaagggagttggtggttgtggggagacacgggagagctgcacaccgtgccccttgcctggcgctgctgggcttcccacaaagccagtgaggttcatctgtccccaggaagtcatcagagacggtggctgaggagacaggcactgggggcctccgtggacccgctattggagtgaagtggcctggatggaattgggtggacagggtgctgcctcagcaggctgggatgtgctgggctgtcagaaagtgctcataaatagcatgccccttgcgaagacaggcgagtctgcagacggccgtggctcctctgttcttcccgaggctacagcaacaggttcattctgggatgggttgggggtggggaggcaaaagccaccctggcaggcccggaccttttgtagtttctgtgggacgcgcatggctgaccgcctgcaaagaaaaacagcgcctcccttaagggtcaggtcccagtgagaggaccc

SEQ ID NO: 28127 - DNA, 2300 bp, Homo sapien
ctctgtctgccatgcctcacggcctgactgaccgtaccagtgaacccagcgtacccctggccctggcagccggacggctgatgcatgcaaagcgggcatctccttgcccagccgcctgaccgccctggcgcggccgaatctgaaagctaatgacattattgtgcagagacacaatgtctgtgggcatttgctgacccgagctttggtgagagcttaatccagcattctcaccctgcttttcgcaggagcacagcggtcactcatcttggcaccggcacttctggggaaggtataaatgccacctcccgctggccgagcttcacggcactcgcaggggctggtgtcactggtaagattgcctctcttgcttgtcttcccttctttctctcatcctcacccctgtccgcaagcatgggagcacccagattctgacaagtgactttgggcagagacttcaatgctgttagcctcagttttcttttctggtaactgggaagggggttaaaaagccttctttattgtaaggattcaagagaagttaggggatcatccagcacagtgcctggcacacagtgggcattggggcaatgttctttattattaatattaaacagactatcagcatccttgtttcgccagtcgctgaggaggagaatgtaactgagggttttgcaagaatcaaaccagtgacagttcagcattgtttctaggtgggtgagtcagttttcctccacatctgcaattagggggcacccactctgtgcctagcctctgggagtgctaggggataggatgcagccacaggtatgtgacaggtcccagcaacaggtgatttcaatgccactaaagcatggtagaaatgactctaataatgccacaattgctgccatttgctgcatgctgagtgtgttctgggaccacggccaagtgcttccggttttatacattacataattgaatcctcacaacctgttcacaggtattattagacatcattactgtccccattttatagaacaggaagttgaggcatagggagaggatgagacctgcccagagtctcaattctggcaggcagcagagactgctcctgaactggaccaactgagcttcttcagtctgtgaacactcaggactgggaagtgatatggcaggacctcaggcactctgacaagcccagagggctggtttcttgcgggagagcagtagatttggctgccaaggtgcttaactgcatttcttcctcctgggaaacatccagtattggcctttcatgtggaaggggcttctggaagctggcgttatctctgaagagggaggccaggcttcctctcttacccctggggaaacacagcctggtttgaccaccccttctgcaggaagggggaagaggctgacaattttccaggcttttctgatgttctcactagctaaggcaggtctaccctgctgcctgccacagtgcctggatttctaccgtcgcacccatttcttctctttcttgtaatgtgggttctgtatcagatgatttcactaatgggggagtaaaaccagtggcagagaagagaaatctaggtaccaggatggggagaggagtcccagggagagggtgggagaaggagcaggggaacagggaactttgtgagttcctaaactgggcaccaccacaccaccaaatacagccaatgcataggttttgtttgttccacacaattttatttaagaaattactgcataaaggcagaagttctgggattgaccattctatattctgtgtggtatccattgtctggggttgagtgttgggaacccactttggacctcatttaagctctagtttattactgctctctttctttgagtagacctcgtttttccctcctcctgcagctggcctggatagaaataaatgaagctaaggacagaagttgaagtagctgcttacggaccccacagctctgggacagtctgaaaccaggagaaaaagagaatgtttggggccagaggggagtggtctcaaggccccacagagtgaaaaagccagtggcccctccaggtcctcactgctgcttcccatgtcttccaggtcattcctgcacaggacagtccaccatggcctcagatcaccagacccaggcgggcaagccacagtccctcaaccccaaggtgggtacctctcagaggagggggcatgcaatgctcctcccccagacttagttgcccttctgtaaaatgggcttggcatctttcttcatgggtaccccctctcgacccctgcccctctctgggactcagtctcc

SEQ ID NO: 28128 - DNA, 2300 bp, Homo sapien
tctcctggactcaagtgatcctcccacctcagcctcccaagcagctaggactacaggtgtgtgccactctgctcaactaatttttctaattttcatagatatgaggttttggtgtgttgcccaagctggtctcaactgatctgctcgcctcggcctcccaaagtgctggaactacaggcatgagccactatcaccacttatcccacctccagtttttaaagcattttaaaacaaatctcagttgggcacggtggctcgcgtctgtaatcccagcactctgggaggctgaggtgggtgaatcacctgagatcgggagttcgagaccagcctggccaatatggtgaaacccccgcctcgactaaatacaaaaaactacaccccccaaaaataactgcccatgagttgagattcatcaattttatatctagaaaccctacaatatttaggactccctgactttgggtggtggtggtgggggacactaggaaaggcaagagaaaaaggaattaagcctttttctaccacatttatagaaatatacagtttcttcggtgaaatttaggtttgatataggagttcttgttctctaagtttcccatttgctggaaattttaagcagcattgatttttttcaattagcttcagatatgctacactctggaatagggatgttaaactcatgacattgaagaaaggtttgcacttttccctcattttcactacttggcattgcctatcaaagagtagcacatcctgcaaaaccaacaagaggcatgggctaaggagaaaagcaagcccaaaatatctagcaagcatgtcttcatttgcacaatttagcttttcaaaaataacaaggggactggtattttctgtatcatagggctcatagatggacttgtaaaaaaaatcatgtgatgatcacttagcattaggtaacatttaagcaatcttgggcgcctaacgcttgaaggcctgatgatttcaaatggacaataactttggtttagattccaatattttatagaattgcatggtttcaaattcaccataaacaagatgcctcttttgagcatcaaattccaagagctatttagcatcaaggaatcacattagctgtacaactcatgatggtgttaattaggaaaggagctagagaaaaaaaaaaaaaccatcactgaagctttaatacactatttaaaactcactactaacctgaagaactattttttctggggaagtgctaatgatatgaactagcaaaaaattttactagttccttaattataaatcatctgagagaaaattgcaacttggtatggacctcaccaaacccctcgccaattcaatcgggccctcctttgataatttaacaacaaattcctgtctggaatcatccattcaagtgcctttttaaatgaatcccatttcaattttttaataaagtgccaccagtagatctgcaagttgagaaaagcagctcaggtgacacacgtggcaccaaaaagattattgagtgggtcaaaaatcctgcctgggcacaaaatagaagaagagcctaagaaggtgactagacttagggacttcaagaagaacaagcactgaaaacagcagtttaactacctcggacagtaagcaacaagcctgcagtccccagataagcggcccagagggagctgaggggatggagttggaaagggggaccacagagccggggaagaagcagcgaccaagaaggagcgcaaaggagtgacaggcaacgagcccacagggaccacaccaatgcaacaggaagaaccacggggatgggacaggacaggacagggccggggggagggggcgacagggatggagctggtccagccaagtcataaccagcccctccctggggcgctcgctgcgcgcagggcgccgcgctgggcactttggagcgctctctcccggagtcccccccaccggccatccgatgccccatttcagagactggaacggggaggccggccccgcatcgccagttccgcggtgtcacccgcacccaggacagcgacgactcaatgcccgaccctcccggacgcaggaggtcgctgacggccgcttggggacggcggcgtggggaccagcgcgggccggggcagctggtacctgggatcgggcaggacggtcctcttgctggcgcgggcggccggagtcgccttgctcttctccatggccatcaggtaactggcatctgccagcacagcctccgggtccgccacgttggcgagttttggcggcggcggcggttactcggacccggatgggac

SEQ ID NO: 28129 - DNA, 2300 bp, Homo sapien
ccaacctcaggtgattcacccaccttggcctcccaaagtgcaaagggattacaggcatgagccaccgcacgctgccttttttttttgtattttagtagagatggggtttcatcattttgcccaggctggtcttgcactcctgagctcaggcaatccacctgcctcagcctcccaaagtgctaggattacaggcgtgagccaccgcacctggcccaatattacacttcttaaatgcacttctcatttcttaattgtctgaaatgttatattctcataattttaaaagaataaagatttttttggggccggcatggtggctcacacctgtaattccagcatttttggaggcccaggtgggtggatcacttgagttcagaatttcgaggccaacgttgccaacgtggtgaaactctgactctataaaaaatagaaaagttagctgggtgtggtggtgcatgcctgtagtcccagctacttgggaggctgaggcatgagaattgcttgaacccaggaactccggaggcagaggttgcagtgagccgagattgcaccactgcactcaagcctgggcaacagagagagactcagtcaaaaaaaaaaaaaaaaaaaaaaaaagctgggggtggtggctcacgcctgtaatcccaacactttgggaggctgaggcagggagataatgaggtcaggagttcaagaccagcctgaccaatatggtgaaatcccgtctctactaaaaatacaaaaattagccggatgtggtggtgcacgcctgtagtcccagctacttggaggctgaggcaggagaatcgcttgaacccgggaggcggaggttgcagtgagcccacatggtgccactgcactccagcttgggtgactgagcgagactccatctcaaaaaaaagaaaaaaaatttttttgaaaataaaaaataaaggctgagcatggtggctttatgcctgtaatcccagcactttgggagcccgaggcaggtggatcacgaggtcaggagttccagaccatcgtggccaacatggtgaaaccccatctctactaaaaatacaaaattagctgggtgtggtggtgcatgcctgtaatcccatctacgctggaggctgagacaggagaatcatctagaacctgggaggcagaggttgcagtgagctgagatcatgccagcctgggtgacagagcaagactctgtctcaaaggaaaaaaaaaaaaggaatgtctagatgcagtagctaagtacgcagaagccatttcagtgtgggaggcgaggtgactgaatccagggactccaggtttctggctgaggggttgagactgcccatggtcattgtgatgagatgaagacagaaaatgagctgggctgggggaaggtggtcatctcctctggacgtgattagtttgagactcctgttgggtagcccactgggcatggtcagcaggaaattgaggagctgagagggtttggagctgagatagactccagcctcaccatgtgggcaatagtgggggtcacagagtgtgaagatggccaagaaagaggtctgggtgggggctggggagtcagcagccaggcatgggccatggagaaacagatgccagggtaagaggaaaggggagtctcagaccccaggggaaaagagtcactggaaagaggggccagtcccatgtcatatccagcagagacaccaggtacagcagaaggaccttggacatgaccatgaggagggccttgttggccatgacctgggagagatgggggtgagagcctgggggaccacaccatgtccccagcacacgaaacagtgcctggtagacagaatgtatttatggatggacggacaggtagatggatggatgaatggacagatgatagatggatgcaaagacagatgaatagatggacagatgcacagatggacagatggatggacggacagacggaatgaatgatcagaaaaggcttcatgaacaaagtgagactgagctgcatctccatgggtagatacaaaagcagaggactctcctcttgagtcaggaatgacccagtgtcctggtccagggaggaagtcagcctccttgactggggacacttgtggcagatttcagaggcccttaaaatgaggccaagtgaggtggacaggtccgagccagctgaggactcctcagccacacggcacagctgcctgaggggatgtgtcactcagggagttgctgggacctactgggcccagcgttgccatcagcaccaacagcttcagagagggggacacatgccggggtgactccaaggc

SEQ ID NO: 28130 - DNA, 2300 bp, Homo sapien
agccctggctgttattcactgtggatgaggagacaggcccagagaggggcaggaacctgcccgaggtcaccaagcacgggcaggccccagaggtttcggtctcagattctccctgctcatccctggatgtagcgctgctgtggacgtggggctgtgctaggggctgtggagagcagagggcttctgccaggaccccagtgagccagtaggggtggtgccttggccatggggcagactgggggtacgggacagccatccaccggggtgtggggaggaacagcttccctgaggaggcggtgccgtgtgacctgggccttgaaggacaggtccaatgtcaacagaacattttgggagtggagcctagagggagaaaacttgttgaaattcagagatccccctccccctaccaatacacaccaaatcagacgcctctgaccagatctgaatttggctctcagagatttccattgtagccaggcagttggggcactttctgagtgctgcctccacctcactgtccccagcctgcctgcctccgtttccctagccctgggcctgtgccgctgtcaccatcacctgggcgccctctagtggatgaatcggattatgcacgagggggcttggagcaggattcagaaggggctcctgtccttccttgaaatgctggacgccgggatcctggaacagctcttcaggtctctgcattcctcctggcaacagccagagcctgggcgcagggggctactgttgtttgaaggctgaaggctgcagcctggtagggcactcaggagacctggcagttggctgcagggccaggtctaggggccagggcatgagggatgctctgggctggctcagccccgggcccccatgcggattgtgactgtgggggcatggccacatgatgttgaggggggatctctgaccctgaccttcttggctctgtgcatccttgaaaccagaaaggtctggaacaaatcagtgaacaatgccctaactcggggagggagccacatcctgaccccagcagcctcagaaggatccgtgtcagggttatggggcaccctgggggccccgagtctgcatgggtctccacatgcaacttctgccggaaactctgaaaaatcccaactggggggtcataggacacaatcagaaatgctgatgccactgtgtgtggatccccgggccctggggggtcaggagcatgtagaaggtgggccacagggggttcataagagaatcctgtaaccgcccctgccccccaaacttagaagcccactggagggccatgggtgaaagcttgggggggtgtcctgtggagtgggtggtggggggtctttgggtttacatgctgctgggcctgagcagcaggaccccgtccacagctgatccctgggccctgctgctcagctgctctcttgagtgttgctgtggctgccgagagagcctgagtcgagcctctcttgtgccggccgtacgctgtcaggccacgctggtgagtttggcaaggcacagatgcccagagcagagaactttccttggggatttaatatgtgcgaatcttgaggtccggcaaatctttccctcagctagagagggggtttttgagactagaatcacctcagcatcctcctgtccccagctgtgtccagcctgtctgcagggacatcctgagaggactaggctctcccctcatccacctgcgtaagtgccaccctgaagcctgtccacccatgcttggagaggcttggcctcaacctgcttagccagcagcaggcttgggcctggggtgcagcagagacccaggtggctgtggggtggttgcttcatggggtggttctgaaacgcagttggaagtgcatggacagtgccttacctgttctctgtgggaccctgtttagaaaccaggtctgagttactgggggtcatcgctacattctgatggcctagctgtgtggaggccacggtggagccccatccaaggagccagggccctgggtctagccgtgaccagaacgcatgccctggaggtgtttctcatcttgcacctgtgttgcctggtgtctcaagtggccacaaaactgtgttagctcttggtgcccctgggcttcggaaccagggtttcccttcatctcagtgacccgggagcatctgggcagtgagtaaagagggtgatttacttgatgggtacgtttggtcctgcctgggagcccccccaggcacggtcctgggacctgaagctgccctcgttggtggaggggagggagagagcttcagggatgaggtggcgttgagct

SEQ ID NO: 28131 - DNA, 2300 bp, Homo sapien
ctctgtagctggtcccagggaaggagttggcctctcttctttatagcccaacacagtcccctgcacctgcccctcccaaccccaggcctgcttacctgtggccatggctgctgcccggacctcactacacacacaacctcctggaggccagctgtgggcaccagccttggcaggcatctggcagagcccaggctggtgggactctctctgcagctgctccctgccagcctggctggacagagtccccaccacactggggtcacctctgtactgctcacagctcactcagaccttcaggcaaataggttgggtcctggctctctcccaggtgtcacaatctctgcaaaattcaaaaacctcaggggccttgtagcctgaggcgtgtcagagactcctccctggagtcagtaaacacctacagattcatcccagcagtgaaaggactgcttcaccacagaggtttgatttattcctaagtaattggatgggatgccgagaatgggttcctgatggtggaactggaggccctttgctgacctagttaacagagggctagggctgggtgtgctcagtccctgaaggttctaggcccatttgggacgccccgccagaacctgccacatggtgacagctacctaaatcccagaggctcttgagctggagaacagacctctcaatctcagcaggtcccctgcacgtaccccataaccctagcctgccttcacagtacagtttgtggctgtgtattcacggatggtgtcgttcacctaaggtctctgccctgtgaccccaagggcgtccagagggcagatcccaagtctgtttcatccacctctccttccctagcagctggtccagggcctggcctgaagtaggttcctacagagatactggtgggatgatggaggcagccaggcatcaagtgacaaacgcgcttcctggatgtgctggctcctgggattgaagtatttgaggaagcgaagtgaagtgagctttcctcttgcagctgtgtgtccttgggccgggagcctaccctctctgaggattggggtccttgtcagtaggatggggcatcctcatagctcgaggggtagtgtgtgaaaattgtgttaatgatttttttttttttttgagacggagtctcactccagtgcacaggctggagtgtagtggcacgatctcagcttactgcaacctctgcctcctgggttcaagtgattctcctgcctcagcctcctgagtagctggggttacaggagtgcgccaccaagcccagcatagttttgtatttttagtagggttttgccatgttggccaggctggtcttgaactcttgacctcaggtgatccacctgcctaggcctcccaaagtgctgggattacaggcgtgagccactgcgcctagcgtactttagtgatttcttaggacgacggagggaactagctagcaaggcaggcttggaatgtgttttgggatcaaatgccggtttctgtctggcactggcgttctctgtggggccatgatggacacactgctgaggtcaagcgtgattcgtctcacgctgtgcctggcagtctcgttggaaagttctgtagacaccgtgtggacagggctcttcccagccaagccctggaggacttccaggactgtgatctccccaccgtggctgattaagcagggacccttcgtggagtctatggtcccctctaagtcatagctagacagggactcaggcaccatcagccctggctgttattcactgtggatgaggagacaggcccagagaggggcaggaacctgcccgaggtcaccaagcacgggcaggccccagaggtttcggtctcagattctccctgctcatccctggatgtagcgctgctgtggacgtggggctgtgctaggggctgtggagagcagagggcttctgccaggaccccagtgagccagtaggggtggtgccttggccatggggcagactgggggtacgggacagccatccaccggggtgtggggaggaacagcttccctgaggaggcggtgccgtgtgacctgggccttgaaggacaggtccaatgtcaacagaacattttgggagtggagcctagagggagaaaacttgttgaaattcagagatccccctccccctaccaatacacaccaaatcagacgcctctgaccagatctgaatttggctctcagagatttccattgtagccaggcagttggggcactttctgagtgctgcctccacctcactgtccccagcctgcctgcctccgtttccctagccctgggcctg

SEQ ID NO: 28132 - DNA, 2300 bp, Homo sapien
gtaggcaaatgcctttctttagatgaggcaatgtggaaaggaagcagagcagactgaccaagagcatggagcctggtgcctatggcctgggttcaaatcccactgagaagctgcacatacctaggagtgttatgtaaatctctctgtgcttcagtccctgttctgagatacacgaatgttaggccgagcgtggtggctcacacctatattcccagcactttgggaggctgaggcagacggatcacctgaggtcaggaattcgagaccagcctcatcaacatggtgaaaacccgtctctactaaaatacaaaaattagccgggcgtggtggcaggcacctgtaatctcagctatgtgggaggctgaggcaggagaatcgcttgaacccagaaggcagtggttgcaatgagccgagatccctccatggcactccagcctgggcaataagagcgaaactctgtctcaaacaaacaaacaaacaaaaaacaaatgttaatatggtccctcttatgatataacgctaacattgaattcaggtaaagccttaagaagactggtgccggccaggtgcggtggctcatgcctggaatgccagcactttgggaggccaaggcgggcagatcatgaggtcaggagatcgagaccatcctggctaaaatggtgaaacgctgtctgtactaaaaatacaaaaaattagccaggcatggtggcgggcccctgtaatcccagctacttgggaggctgacgcaggagaatcgcttgaacccgggaggcagacgttgcagtgaactgagatcacgccactgcactccagcctgggtgacagagcgagactccgtctcaaaacaaaaaaaaaaaaaaaaaaaaagagagagagagagagaactgcattaatacagatggttccatattttctccagggatcatccgactgaggaggtgggtggggaggtgtgggacaaaatggggattatggtattgttcaaaacggaggattttaatgtggtctccagttggatagaagttgtgtgtacatgtgtttgtattatctatacacacagagacactgttctgagttcctcatgtatattaatctgtattttatcctctcaacaactcttatgagaaggtacttttctgcagatggagaagctgaaacacgcagaggattcactgcctgctccaggtcaccagcttataagtggctggagcaggatgttaacccaggtggcctggctccagagtccatgcactgagctagaacaaagaagatagaaaagagggcacattcagcttgctgggctttcctgttcatgctcactctgtctctccggaagagggtcaccttttcctatcctcctgtctttggacttgaaactccatgatttgggcctttgtattctgctacttgcaccagcaaacacaaaggattctcaaatcttggacctcagactgggagctgcagtgaaagtttccgttgttttcaggcttttgcacataaacaaatccacatggctggttcccctgggagccacactactgctgctttttctcattctccagcttgcagatgacctgctgtgggactttgccttgcaattaggtgagccaattctccctataaattcccatttacaacacacacacacacacacatatgtacacacacacacacgtatatacacacacaagacttacttatcctgaatacatatgcacccaacagtggagcagccagattcgcaggtacttgaaagctgagatgggaggatcacttgggtccgggaggttgaggctgcagtgaactgtgattgcaccactgcacttcatcctgggggacagagtgagaccctgtccaaaaaaaaaagggagcttcacagggggaggtccacatgcataggttggggagttcctgctccctggtgtcccacaaggcacccttctaccctacctgacctgggcttatgctgaccatgaggtgaatcatcctgcactgtgcactgtgactggcagggggcgctgaaaccgccttttctgccccacatggtgcgcatgcgtgttctcaccgtagacgctgcgtggcgtgcgtggcgtgcgtggcgtgcgtggcgtggagtccagaatgagaagaaggaaagcggggccggttccttcaggacccgcctcagggggcaccgcggcggcttggggaccacttggagccccgtcctggggagaaaacagctcacgtctatggccctgactgcttaggcgggagctgcgtgcagctcagcttctccggggcatttttttctacacggt

SEQ ID NO: 28133 - DNA, 2300 bp, Homo sapien
tttaaatcaacttttattttgattaaattgcagcttagttacatgtgaacctttgatgacactgaggcttgtggccactgaccccgtcacccaggcagtgagcaaagtgcccgtcaggtggttcttccgcccacactccctttctgcctccttttttccatctgatagtccccagtgtctattgtttccatctttatgttcgagtgtattcactgtttagctcccactcataagtgagaacatgcagtatttggttttctgttcttgccttggtttgctaaacataataatccccaggtctatccatgctgcttaggacatgattgtgtgttttacttatggctgcgtagtattttttggtgtgtatgcgccacattaaaaaatcaaatccactgttgctggtcatctaggatgcttccacatctttgttcttgtgaatggcacgaccatgaatgcacgagagcatgtgtctttttgatagaaggatttattgtcttttgggtagatactaagtagtggaattgctgggtctgatggtagttctgttttaagttctttgagaatctctacactgctttccacagtgtgaacctgttttcacgttccccaaggtaggagcgttccctttcctttcctgcctcgccagcatgttgttttgcttttggaaaaatggccattctgaccagcgtgagatggtatctcattgtgtttgtgagttgcatttcactgatgattagtgaggtagtgcattttttcatgtcagttggtcacttgaacgtcttctttttctttatttttattttttattttttgagacagtgtctcactctgttgcccagactggagtgcagtggcgtgatcttggctcactgcaacctccgcctcccaggttcaagtgattcttctgcctcagcctcctgagtagctgggattacaggtgcctgccactatgcctagctaatttttgtgtattttagtagagacggggtttcaccatgttggccaggctggtcttgaagtcctgacctcgtgatttgcccgcctcggcctctcaaagtgctgggattaaaggcatgagccaccatgcctgaccaattttttgtatttttagtagagatagagtttcactggtctcgaactcctgatctcaggtgatctgcccacctcagcttcccagagtgctgggattataggcataagccacagtgcccagccccttgacaactgttttgtaaggaaccattgcctgaagtagaattgctggatcaagactacttttccaaaagaggataataaacatgatctcctcttttgttaatgacttagatcattcctctgaaaagccattattgcacattgctgaaatgttcgcctctgcactggttggtcccagaatgctaatcattttgagatttgtgccttctttcttctattttctgctttcttctattagccatgcccgacctgaaagccatcccttcctctttaatgtactatttttcttctaatgtggatctacaaaaacagagtttgggcagagtctaacaacaggaacaagagaagaaacagatccaaagagaggggctttgggcccagagatgttctagagtcagttctcagtggtgaaggctgactgtgcatctctcttcctaacttcacttgcagccgtgtcgtattgatagcttgaaatctgccacagtgggagcatttacaccatggaaattggcaaacgctgcaaatcaagagtgttaattttcgttttgttttttgagagttggctattaacttaccagcatactattggctttagtgcatggcgtctatatattggtatttgttgctgggccgttatttagactgccttcttatttcttaactgtgttccaggtgggtaaaggcagcatagcactgagttctagataactgaggggattttgcacttggatttgctgtgctaaggtttgggtggggctattacatcttgccgggctgggcaagagtgaaccctaggggtcaacatcagtagccaggattctgccataggaagcttggagtggaactgacctgccccctttctctctgactccatggcagctgggtgagctatgaacaggccaactgcaagggcgagcagtttgtgtttgagaagggcgagtacgcccactgggactggtggaccagcagccagaggacagactcagcagcctgaggcccatcaaagtggtgagccccctgccatcatcctactttctctctctgccaccttggagcaggaggtcctgggaccaggaaggagcccg

SEQ ID NO: 28134 - DNA, 2300 bp, Homo sapien
tgttgttgttgttgttgttttgatacggagtctcattgtgttgcccaggctatagtggtgtgatctcagctcactgcaacctccgccccctgggttcaagtgattctcttgcctcagcctcctgagtagctgggattacaggtgcccaccaccacacccagctaatttttgtatttttagtagagacaggtttcaccatcttggccaggctgtccttgaactcctgacctcgtgatccacccgcctcccagtcccgttttgatggacacttgcgttgcttccagtggctgctgctgtacaccttgctgccgtgattagaccatgtgcatccggagccctttcctttcttttggtggccacctctccttgaggggccttgtgaccgtgccgagagcaagaactctgcaactgggctgactgggttcagattccaaatctgtaatttacgggctgagcaactgagcaagttgcttaaggacgctgttttttcatccagaaaaatggagataatagcagtacttcctttagaggttgttgtgaagattaacctattagtgtctgtgaagcgcttagtactatgaggtgtttaacataattattatgcagctaaaacttgaacatggggatgtgcttacttatttgtgggagctacaaattaaaacaattgaatttatggagacagtagaaggatggttaccagcgactaggaagggtagatggcggggtggagttaggggagaaagaggggatagttaatgggtacaaaaaaatagttagaatgaataagatctagtatttggtagcacaacagggtggctatagtcaacaataatttaattgtacatttaaaaataactaaaataatataattggattgtttgaaacacaaaggataattgcttgaggggatggatacccaatttaccccgatatgattattatgcattgcatgcctctatcaaaatagctcatatgccccataaatgtatacacctaccatgtatccacaaaaaattaaaaatggaaaaacattgagcatgggaggtgtgagtggagctgtcccagcctcgtctcccaggctgtgcaactttgaacaggtcactgcactgctccgggtctcaccttctacatccatgaaatggcggtgtcgtaaggatgacatgagatgatgtgtagcctgtaacgacactcgactaggattcatttttcttgtcccacttcttttcctcacccttgtgaggtcattcaggcacatgtcattcagtcaccttcttcgacagataagtatactgtggctcggagaggtggagagactttctgtaggtcacccagcgtgtcagaggtgaatagactctgcaggcaatgtccatggggtgggtaacagtggttgtggttgccacaccttggagccagctcagctcctcctgtagaccccattaaacagcccctgtccctgacctccaatcctaccctcctcacttagcctccaagcttggccacccactgtgttcttgtgatgaggtggaacagacacagtcatccacgtggcctcttagaaacagccaccaaatgctcccgtatcgtagcaaccacagaatcaaaacaagctcttaatgaaagatcaaaaaagacagggagctggaaagcccactccctgaaccagccagccctctgaagattcctactgctggggtttcagttcagggagtttatttgatttgcgtcttcaacctccccgctccacattgttaacttctagcagactgtggctgggagccaagaagtgggttttaaatacacaaaaggaaacagagcatggcgaggtctggaggacagaagccatcagagagtgggtgttccggggggtggcgatcatagaggcactgcaccacgcctggagccagggaatgacttttgcttggcccttgaagtttctagaggctgaacttaagcgctgcagccccttgtacccactgctcagcctttagttggcttcttgcagtgaaatcccaaaagggaaagccgggaaggcccttaaagaccacttgatccagtggtttccaaactttttttcttttttttttttttgagatggagtttagctctcgttgcccaggctggagtgcaatggtgtaatcttggttcaccacaacctctgcctctcaggttcaagtgattctcctgtctcagcctcccaagtagctaggattacaggcatgtgccaccacgccctgctaattttgtatttttagtagagacggatggggtttcaccatgttggtcaagctggtctcgaactc

SEQ ID NO: 28135 - DNA, 2300 bp, Homo sapien
acctgcctcagcctcccaaagtgctgggattacaggtgtgagccccacgcccgacaaggtgcatttttatgtgctttttctcctctgtcttctcaacaaccctggggtaaaaggcctcatttccacttttcctatgagaacaataaagtagaaagaggtaaaagactgcctctaagatcacccagcacagagcagggatttgatttcaggtgtgtcttgttccaaacttaatatactgtgctgctgggggaaaacaaagagcaaaaggttcttaactgaagtcaaagacgaccaagaaaatgtaggcagatgtcaggtctgatcatgtggatgctcaaatgataaacagacacattgagagaaattgtattaattaaatcataaaaatatgttccgctttttggggaatttactcctcctcctggggtgacccttgacaagacattctgtcttcctgtttttaagcaaaaaaaaaaaaaaaaagtgggtagaagatgaaagtttgatatttcgctcatgcatagctttgtctccttaatatattttgtgcttgcctgtcatttcagctttctgctggcagacgaagctccttcaactgccattcctacttctgacactcctcttgtccttttcaggacaactttatgcctattgtgccttgggtcttgagaagcatgtggtaaaactggccagtggtgatggcaggcatagcagggaatcagattgaggggggctgtggcgtgggagagaaaacaaaagagggaaacaggctatttgatgacagaatcaggctgcttctgcaatgacattacatgaaatatctgaaatttgaccttaactgtatctggtgggtcccgttaaccctgtaagttatggacagaacgttcactcaaattctagcaacgtctaggctcatggaaatacgtgaccaattcaggtgaatgaaagggattttaaaacattaatttccagcttaggtcttcctaagactgcctgcgtgtcccttaccaccactccagcctgagtgtcacatggatcctgaatgcggacttgtgtgcacactgtagaaaaataagcaactgaaaaccccaggcatcggggtggagtgatgatgaaagacaccgagaccgaagatcaggaagctggaaattccccccagcttcggtgtttgggctgtatctcgcttttccacttccctaaatcaccctcgtggtgcgagtgtgctcgcagcagatgctccctaattgtctcttgtattgaccgtaaaaccctaacgacaggaatactctctctccttctatttctcaacaccatttcaacacccaaactaaaacctctcacctgagtgtaagggagtggtgaccttcttaagcggagagctcttccatcagagggctccctaagggcatctctgttcctagccggggagccgtcaccccactttgttctgcttagcctaagacacgcaactttttccagcttttactcttcgctgaattctcacggtggggttggggggatgttcaggctcaggagcgaggttgggggcccggcccgctgggcgctgttcaccggtagcccggaccagagcaggagtttcatcattacctgctgggataggtgggacacatgtatttccggggccaccccagacctcccggaggatgctgattgacactgtccagtttgagaactactgtgtccagggagcagaggcctccccataaccccttgggttgtggacgtctggcccagggcttctctgggtgagcggggcgggcatcagagcgcgtggaacctggggcgggaggtcggggcagtgaaggaggaggagaaggaggaggcggagaccgagggggagggaggggaggaggaagaggaggaggagtccctcgtggccaccccgaggggagggcgaccgtagagacttggtcgggaggcgccggcccagcgaggccgctgggactgtgcactgaggggcgctgaccgttggacgcgcgctccccgcagaccctcgctgaaggagcagggggcggcgcgcgtgcgcggggcgccgggcggcgcgcgagggggcggagcggggaggcgtgctgcgaccccggccggctacagcctgcggcgcgcgcagagcgctagtggggcgcgcggcgcgcgcgcggggcgggggcgcgcggaggggggggctgccccggggcggcccccccaggtcggggcgcggcgggcggcggcggcgggcgcgcgtcccgtccaggtccggagtaaccgccgccgccgccgccaaagctcgccaacatggcgga

SEQ ID NO: 28136 - DNA, 2300 bp, Homo sapien
cagtctgttccggggccccctcagccaggtgggaatgacggacacgtactatccaagtgtatgggattaactaatcattgaaggcattcatccgtccatcattggaaagatttacagtgattctgaaggacaggccgtggagttttaggtttcaggggcaagagcagttttcaaaagtctttgagtccagtgtgcacgagtcgacaagcagtacctggcatgcaggagcactcatgggtgagtccgtctcaggtctcgacaattagcagttgtgtgacagtcattctggttccttctgcctgaccctgggagacatatcagtaatggatgtacaaaagcaggtctgttttatgtcttagtataatttcagatgaattgtattgaaaaaatgctgaggaatgaatgtgtcaaaatgggttaactgtgtatattgactttcatgtcgtcatgcatctgtcatgaatgaatgatactttgcactgggctgtacgacagtgaggaccttagggcatgaagcctttttcctggtcccagcagcatctgccctgtgaagtttgttttctcccactgcctccaggccccactgatacccccaaatagatgctgggttatgagaaccagcgaaatcccccatgtcatcagtcttaaaaaaaaaattttacaaatccacgtatttgtcccattcttggagtagttttagtgtatgtctttacattaactactaacagtataaataacttgacatcgtaattgtctgcatcctgtccttgatatttttagcagttccaaatctttgtttttgtatttgtttgctgtgttcatgggcaaagtaagtactttttaatgcagttattttgagagtttggaagataattaccaaaagggtccattatttcataagagttactttgcaaaaaaaaaaatgtgggtttttttttttgtctatctcaactactagttggggtttaaattaacatacattttctactatctgttatttccagtgtgggaggagggatgtactacttacatgcattctccttatttaaaaaggaagaatagtattcaaattctgttgaaacacacacacacacacacacacacacacacacacactccagaagcagaaaagccattgttcttaaagagtgaatgtcttcccagccctggttaattatagctgtgactgatgccgttcccgtctgcatctcaagctcataggttctcagcatgtgcagttgaggatgcgctgggcctcatgcctgttctagatctccaggataaagggcctgctgttgactccaccagggtctgggcttagcgtctaatatctcgtacctagggcgtgagctgcacaaacgtgttcagaaagattattcaactttcccatacttgttctaaaattgagctgatccgcatctctttcaaaaactagaatttctgctctaagaatagaacataaggctccactcccttttagaaaagatatatgaattggaaaatgctctgaaagtccttttgcttcaaacaaaagtgtaaacttttacacttccccaactcacatttgatttgtaatgatatggttgagaagtacatctagatgtcatttattaaaagtgctttgtaagactagattgagctgtttctgagggcggtcaccagttgtgttggggtctggtttgagtgccttctgccaaaatgttgtgatggaggtgtttctgcgaccagacacaggataccgctgtgtctgcacccggttgcctgcatggccagaggaaaagtcagttggattaaacatcatggtatacttggctgttgtttttttttaattttttaattttttgggatagggcctcgctctgtcacccaggctggagaacagtgggatgatcatggctcactgcagccttgaattcctaggttcaagcaatcctcccacgtcagcctcctgagtagctaggactacaggtgcatgccacctttcctggctaatttattttttgggtagagatggggtcttgaactcttaggctcaagtgatcctccttccttggcctcccaaaatgctggaattagagatgtaagccaccatgcccagccatagtacttggatgttttagaaggttttccaagtattacataattcctagatgttcacccttattacactccaactattaaaaaggtcaaaattcagcctattttttttcattattttagattcctgtggttgggatattttaacattgatgagaaaaataattgaggttgatatttttacaaaatcatgcggtaataag

SEQ ID NO: 28137 - DNA, 2300 bp, Homo sapien
acatgccatgttgactccttggggaacggaggtcccttcaagtcaacggaaccatcactgcaggtcatggcctatagagagtcccagccctgggcccagagaatcatttctgcatgtcaactctaccacttcagaccaacagcgtcggaaagacagcaaggacagaaaagcccaggagccaatggttcaggacttgtgatgcaaggggcgggagaagggaggttcttgtttcaatgtcaaatgatctagcacaacctggagaaaacagctcaccgggacctgtctccaaactcttcccctggtgtggcctaaatgtcccatgccactctccactgggggccgcagggacccctcctcaacctcatgtatattatgtatattgtattttctttttctttcttttcttttcttttttttttcaaaatgtagttttgctcttgtcgcccaggctggagtgcaatggcgccatctctgctcactgcaacctctgactcctgggttccagctattctcctgcctcagcctcccgagttgctgggattacaggtgcccgccaccacgcccagctaattttcgtatttttagtagaggtggggtttcaccatgttggctaggctggtctcaaactcctgacctcaaatgatccacccgccttagcctcccaaagtgctgggattacaggtgtgagccaccatacccggcctagactgccattttctaagcagccttcccttagtgtttcaatgaacttctgattgaatgctaattttcaagacctcggcagaagtgagtactttgggaaaatattgctcgatgagctctggggaaagaggagcagcaccacatagcaattattgaaacaattctcacaggagcagtatcatgctgggctgattgcggtctttggaaccagaaagacttggatttgagtcatgactctaccctttgctagctgcatggacctgcatggtttatccaatttattgaagtctgtactttgctccttttaggcagtggacaaagcactttttttgttgttgtttttttgagatagagtctcttatcgcctaggctagagtgcagtggcgtgaccttagctcattgcaacctccgcctcctgggttcaagcaattctcctgcctcagcctcccaagtagctgggatcacagacaaccactaccccacccagctgatttttttttttttttttgagatggagtctctctctgtcacccaggctggagtgcagtggcgcgatctcggcttactgcaagctccgcctgtagctgggactacaggcgcccaccaccacgcccggctaattttgtttttgtatttttagtagagacggggtttcactgtgttagccaggatggtctcaatctcctgacctcgtgatatgcccacctcggcttcccaaagtgccgggattacagacgtgagccaccgtgccaggcccaaagcacttttttatagcccctagtttgctgttgtgtctgtttcctctacggcccgcacagcctgggtttgaattctggctctccatggccttgggcaagttggttaactttttgtgtctcaatttccccacttgtaaagtggggctggggaaaaaccctacctcatagggaacattaagtgagttcatgaaagccctcggtgtgtggcatgcgataaccactacctaagcataaggtatgtttacatgcactggttgtttaccacgacgcaccagcattcattcaagttattttcttccagagtctgcctggaatgtagaaccggccagctctcctcctcaaacagttcctgcaacctctggttatctgtgtgggcagaggcgggagtgtgggtgtgtggccctgccctgggacagggatgacgagagagcatgtgcttgtgtccagagctgtccccttccctgctcaggggccaccaaatatgtccatggtctctgctgcctggtcaacggccaccccgggctgccgtctcctggccagacctggagctcacaagctaattttagaaatgactggtcgactcagctgctgctatcacattggcccagaaggagggtggggggaggacgggtcggggaggggcagtaaggggaagggatgtgtgtcggtgtgtgtggagagggtgctccttcgctcctgctttcccggctcggtggggtcccttcgcggccacccggggagacgtcttagacagtcgtggttcctgtgatctgtgtcctctttgcagaaggtactattgggctgggttttagacgggcaccttgcgagcggatcggcgag

SEQ ID NO: 28138 - DNA, 2300 bp, Homo sapien
caccattgtcaaaatcctttcacataagccactccacttgaggtttgatacagtcctgtgaggcaggtaggataagccttatctgatgagaagatgaccccggagaggtcaagtgacttgctgaagataaagccaggcagtgcgtgggataaggtagatggacacctgaccttcacttcctcctggttacaggttccaatttctctgcagccagctggcttcaccacagtaagacagtgcgtctagacagttgggaggctgcattcctcattctgaaacatttccccttgatctccctaggggcatctggtctccaataaggctgctatggatgaagaacagagagaaattcttctttgctttgaccctcagtggttcccagaaattgctcaagggatccctcaaggtctgactgtctctgcagatcaccatgaaactttgatctactatattttaaataattaaatatgtaaagttgggctatatcacatgccattttaaaacttgtgtctagcgtagtgaaatgacagcagaggagaaaagaaaatgaatgtgggaaaacttcaaatggaaaaattctatctccaaattcaattttgccctctgccactatgatttgaatttagtagaatcctgggtctttgaggtgtagagatggggtacctcaaagacacagtttgagaactccttccactcttcctgctgttcttggaattgtggctgaacttcatttgagaggtgaactgaataggaaagcatttcttttaggttattatttggtgtctgatctgcaggctgttatccccactgcctgtggctgcagaaaaagggctcaaagtccttagcaggggcttgaaatattcatgtgggtcccgtcttatgtcaacactagagtatttgcccatcaggatcgattggttcccggcttgttggccaactaatgaattctgcagaacagtctttgggtttgttttgtgtggcactcgtgatggccaaagcacttttctctctattgtttcattgtgtcctcaaggattccccatcccccctgccaccaggaaaggaaaaatgtcataaaatagtagggctgaggctcatgagaaattatctgaacaccctcattttataaatcaggaaacaaaaacacatgtgggggaaaggtttttgacttcagcagagttctctcttcattgcaccagcccctcgagataaataggagctgctaaaaaaaaaaaagaattaataatcccccatcccttatctggcacatcctatgtgccaggcacccaagccttctgcataccaagaaattagattctgacagcgtccctgggacacaggtactatcatcatccctgtctctcagagggcctccataacgtgcccaaggtcacatagccagggagaggtagaggtgggatttgaacccagagggtcttgggggcaagggttctcataaatacgctacactgcctctcagaatagcagttattttatttatttatttattttttcgagacagggtctctctctgtcacccaggctggagtgcagtggcgtgatcttggctcactacaacctccacctcccaggttcaggcaattctcatgcctcagcctcccaagtagcagggattacaggcatgcgccaccacgcccggctaatttttgtatttcttagagaagggatttcgccatgttggccaggctggtctctaattcctgacctcaggtaatccacatgcctcggcctcccaaagtgctgggattacaggcttgagcactgcgcccgaccatcattttttgcatgttgttaattcttcatttttgtagcagacatcagtattcttatcctgattatgaaaacacaggaaactcggcaaaggatttatcttcctgaggctcccttgtttcatacccctggcctccaactccaaggtgggcatgtgtctctgcccctcccaggtcctggtgatccggcttcgggacagcctgatcaagatgggggaggagctttcacaggcggccacctccgagtcccagcagcgggagagcagccagtactaccagcggcgcctggaagagctgaaggccgacatggaagagctggtgcagcgggaggcagaggccagccggcggtgcatggagctggtgagtcctgtccccatcatgggctcttagcgactgagggtttgcaatgtggtagacccccctttcttaagacttctgaatgggagactcataggtttgggtcctgggcctcaggggtgtgcggaaagccaggagaaacaagaaggggag

SEQ ID NO: 28139 - DNA, 2300 bp, Homo sapien
ggactgggagccaccaagcccagggttcagatcccagctctgcgcctttcctgagtgacctcgctgactgaccttgctggctttagtttcctcatctgcaaaataaagaaaaatgaggccgggtgcagtggctcacgcctgtaattccagcactttgggaggccaaggtgggtgaatcacttgaggtcaggaattcgagaccagcctggcgaacgtggtgaaatcccatctctgctaaaaaatacataaattagccaagtgtggtcgtgggtgcctgtaatcccatctacttgggaggctgaggcaggagaattgcttggacccgggaggtggaggttgcagtgagctgagatcatgccactgcactccaggctgtgcaacagagcaagactttgtctcaaaaaaaaaaaaaaaaaaaaaaaaaaaaaaaaaagaaaaagaaaaaaaaaaagactccaggctaagagaggggctgtgagccattcattttcacttagctactcagttccatggggagctgggaattgcgctttgaccccacatcctcaaatttctcccctcccactgtcctcaggtggtatgtatgttcctttacacagcagtccaaaaataaactttacataattagagccggttacaagaaaaatcccatctataaccccgctttgccccatccataaatattctcaattctccatgagtgttatttgcatagacttgagcatgatactgctcggatctattccgtttgcttcatgttatttcaaagaagcactccacgctgccacaattcttatttctaatgttgatgtctgcctaagagcatcaaagtgacacactgtgatttccctaaccattcccaattgctgggtgatgaggcagatcccagcctctccttgtcatcagtagcactgctgcaaacatcctcgggcatagagctgtgttctgtgtcttgatttatcccccgtaagatgaattaattaccaggaggttagatgctgggtctcacccagggtttcagactcagcaccgtggacattcaggccggataattctttgtgggattgtcctgtgccttgtaggatgttgaacagcatctctggcctctacccaccagatgccagcagcatttccccaagttgcgactgccaaaaatgtctccagacatgaccaaatgtcccctggggggcaaaatcactcttaggtaacaatcattatgtgttaaagggtagcaatgtgtaggttgcaaattaaagtcagagattttcccaagagtccagataaaatccaattagaaaagtaccagaaagtattgatcacgaagatgagcactgagaggggcgtcagaggcaccgagcttgagttccagctccgccatgaagtctttgcttcttaaggcctcagttcctcatctgtgaaatgggagaagagtaaagactcacctgctgggcctgtgaggcatgagtgagatcctggctgcaaaatactcaacacagctctggccacagaaagagctccgtaaatgcccatcgcgcttgcctgttctggagggagcccagctgggtttttcatctttgcttttgctgctgtgaggacagcaaggtgggggtgtttaggggacagacttgaaactatctttgttatgttctccccatgacctcctgcaccagatttatccttgaggctcagcttcctaaaccagactccatgacccttcttggtttttacgtttactcctccatccaagatgggctgagtatccactgtgcgtggtggtgcagattcagagcatggccctggggtcagatgcattgggagcagcaccccctgcacaggtgagcaagctctgtgtgccatgccctggagtatctattccctcctctatgaaacttggaacacctggttgaggatcccataaatctgtccgcagagagagcctctcacggagaacttaccacttcataggtgctcagtgaacactaggctcagcctggggcgtgtctcttccccagtgcatgcatgggtggtgcatttcttgcccaaggccaacgtgtgtttgcatcttctgtccccaggagaagtacgtggaggaacttgcagcagtgaggcaaaccctccagacagacctggagacatccattcggcggattgccgacctgcaggctgccttggaagaagtggcatccagtgacagtgatactgagaggtaacttgctaggggctcggcggggctgggcgcagcaggtgggcggcatcctggggagctctatgccctttagccgggctggggccacattcac

SEQ ID NO: 28140 - DNA, 2300 bp, Homo sapien
atggaatcaacctaaatgctcatcaatgaatgagcatatatacggtacatatacaccatggaatactatgcagtcataaaaaagaatgagatcatgttctttgcaaaaacatgaatggagctggagaccattatccttagcacactaatgcaggaacagaaaaccaaatatcacaagttctcacttataggtgggagctaaatgatgagagcacacagacacatagaggggaacaacacacacagaggcctaccagagggtggaaggcaggaggagggagaggatcagaaaaaaattactattgagtaccaggcttaatacctggttggtgaaatcatctgtacaacaaactcccatgacacaagtttgcacacataacaaacctgcacaagtacccctgaacctaggaattaaaaatagtttccttgcctccaagtatggagctaaactacctcttcgtttttctctcgctcgctttcttccctttcccctcctcctccatcttccttgcttctttaggtttccattgaacaagtctcactgagcacccgctgcatgcctgcattatactatacagagcctgagcgtatagccacaaacaggcaaggtcattccacagagagctggcagcctcatacagtaaagcatggagtgcttcatcttctccaaaggagaaatcagcactcctgcatccctgcctcagccaccttctttataaaagccagttgggtttactgccaggaatggaaacctcttgcagctgaagataggattttatgggggggctctctgtcccccaaagcctgaggcaggtctgggcctatagtcagtggcctgtaaaagagcattgtttgagtgagtaaatggggaagctctgggtgtggagcgtcttctgaaaccctgggccagagtgcttctccttccctcctccatccagtgttcacctcccccacccattctttctagggactcccggctccaccacgctgctaaagacatattcctccccctgttgctgcctgcaaccttctctccatctgctccctctgcctgttcaggctgcagtgtgtagatagtatggcaaggtagggtagggggaggaggacagcttctaaattgggtgagaggcctgtaaagcctgaccggtctgccaaggctacgcagggagagacagtcagtctccaggactgtgcataagcttgtccccacctagctctctgccaatgtctgtccccaagtatctgtttatctccctcattgattgtccctcactacctctatttgtggagaaaagactttgcttgagaatcaggcctgggcaagaatgctgcagaggtgggccttgtagtcctgctcagatagggaagcgggtacaggaagaggcaagcggctgacctgagaggaagcctcgcagcgctagtgccctgccggcagtggggttatgggagacagggctcagattaaaaagtggaggtggatcttaatttagagttcgtgattgggcttcagaggggtccagaccccctcgtgttagatgcacgattttgtggctatgtgtagtgttctagtagattcacagctgtcaccagatccacagagttacagactttctaggttatggggactcactttggaagcagtgaggccctggcggggaagcaggctggctggatcccagagggctctggaaagaactggaactgggatgtatctggaaggctgggcaggcaatggaaagctccgggctgctcataagctcggtttccagggctccatctcaccgtctggaaaatggtccgggtgctctccagcctggcctggccaggcagagctgctgggagcgtcagcagggagagaaaacgctcggctcccaggacgcaaggggaattggcgttaaactttgcagggccgacgggccggcggccagaggaggcggctggcacccccggcgccgccgcggcccctccagctcactgcccgctcgcccgccccctccctccctgcactcgctcggcacagactcggccccagccccctccctcctcccgctcgctccacgctcgttcgctcgctcgccggctcctcctcactcgcccgcccgcgcccggcgcagctcggccagagcgaccgcggggctgagcgcgcgtccgcccagggggctccggaagctgccccggcccgcggcctcctccctcgctcccgcttcccctttctcgctcaccgccgccctccttccccagctccctcgccgtccgcccgccccacagccagcggctccgcgccccctgcagccacgatgc

SEQ ID NO: 28141 - DNA, 2300 bp, Homo sapien
atcacagtagaggcagattcttaggtcagggaccaggtggattttgggacagagatgagaggtgggttctgggacatggtggaggtgggctctgggacagggaggaggtacattctggaacagggtgaaggtggcttctggaacagggaggaggtgggtactgggacagggtggaggtgggtcttggaacagggaggaggtgagttctggaacagggtggaagtgagttctggaacagagagggggtgggtcctggaacagggaggaggtgggttctggcacagggtggaggtgggtcctgggacagggaggaggtgggtcctgggacagggaggaggtgagttctggaacagggtggaggtgagttctggaacagagagggggtgggtcctggaacagggaggaggtgggttctggcacagggtggaggtgggtcctgggacagggaggaggtgggtcctgggacagggaggaggtgagttctggaacagggtggaggtgagttctggaacagagagggggtgggtcctggaacagggaggaggtgggttctggcacagggtggaggtgggtcctgggacagggaggaggtgggtcctgggacagggaggaagtgcgttctggaagagggaggaggtgcgttctggaagagggaggaggtgggttctggaagagggaggaggtgggttctagaagagagaggaggtgggttctgtagcaggaaggaggtaggttctggcacagggtgaaggtgggtcctgggacagggagtaggtgggttctggaacaggaaggaggtatgttctggaacagggtgaaggtggcttctggaatagggaggaggtgggctctgggacagggtggaggtgggtcctgggacagggaggaggtgggtcctgggacagggtggaagtgggtcctgggacagaaagaaggtaggttctggaagagggaggaggtgggctctggaagagggaggaggtgggttctggaagagggaggaggtgggttctgtaacaggaaggaggtgagttctggcacagggtggaggtgggtcctgggacagggagggaggtgggttctggaacaggaaggaggtacgttctggaacagggtgaaggtggcttctggaatagggatgagaaatggattctgggacagacatgaggtggcttctgggccatgttagagataaattctgggacacaagagaggtgggtctgggacagagacagatggattgtgggcgggccatcctactctatgctcccagaacccacccatgcagtttccctggcgcccctaacacatcccgtagccactgttagtctcccccaggtcttagctcaaacgtcacctcctccaagcagcctccttggggcctccattcgcagctcatcagtcccctggtcagacaaccgtcctgcctgtacttcccctcctaaaccctacccgggggtgagggtcccctcccgctagacggtggctcactgagggcagggcgggcctgagcgctcaccgcgcacgctcagcgcagctggcagggacggggacccaggctggcccatcattactgtactgagcgaatgagttttccatgagactaagaatctggtttgatttgcggttccattccaagtgcctgagggcctcagaagtccgtgttgagtccatcaataaaggaaagaaggcgttagggcgagaggaagtgaggtgggggggaagtgaaagagaatgaaaaggaggaaatggagacgagggcgactcagagaggaacagagagacagagggagggagaactgagaaagacacagagcgaaaaacgaaagagcgaaggaagcgacgcgagcctttcttaatgaatgactgcacgcccgtcgccgcctgcgcgcaacctcgggctgggcgggcgctgcgtctcggggcgcactgccaggaccctccggagcggcggcgggcgcggcctcgggtcgcctcccgcactgcgagcgcaggtgccgggtgcaggggggtccccggccccgccccgcaggccccgcccccccgtaccccctcccccggcggcccagcgcgcgcggcattgtgggagttgtggtcttcgcggccccgcggagcgcagcgcggcgtcggcaccggcaggggcaccggcgcggcttaggctcgggctcgggctccggctcgggctcccgcggcgtgggctgggcagcagccaggcggcggctccgcggcgccgggcaggggccgtccgcgggtccgcgccctcgggcggcggcgtctcctgggtcccggcagccgtccgc

SEQ ID NO: 28142 - DNA, 2300 bp, Homo sapien
gatgccacccatcctagccgtcgcctgcatatattgggtgctcattatgacgtggtcgtaagtgctgtccatccgccatcattcatcttcatccagtgagatgaacacgaaccccatttcatggataaagaaactgaggcagccaggcgcagtggctcacgcctgtaatcccaacactttgggaggctgaggtggacggatcacctgagattgggatttcaagaccagcctgaccaacatggaaaaaccccatctctactaaaaatacaaaattagctgggtgtgatggcgcatgcctgtaatcccagctactcaggaggctgagataggagaatcacttgaacctggaaggtggaggttgtggtgagccaagattgcaccattgcaccccagcctgggcgataagagtgaaactccgtctcaaaagaaaagaaacaggcttaggaaaagcgatctgcccaaggttgggatgaatcctcaactgggcccatctctaatctggcttctctctgctacgatgctgcaagaattttcaggccaaatttcagtccctgggtaaagggagggtacaacttttccattttttaagctgtgagagggtagagtacaaaagggatatttgaaattgtgctccctgagtatcagacttgtagaagcagagacctggctgttctcattgtattagaagaagcaggatgaacaaaaggttttggagaatgctgggaaacacggctggggtttgagagacttaggcagcatgacattcaggcccttttaggttattaggacaatgagagttccgggctctgtccctaacccccagctaggtaagtggcaaagcacttctggctgttttggagatgctgtcagctgtgggaaactgaggcagaggcctggaagggcttttattttcattctacctccctcattttcctttcatgaccctatgggtgagaccataggtagtctccaggtgggtagacagaaaatgccctttgccgcaggcatgacctcaagagtgcctacttcctcttccaacttggtattagcccaacctctgtcagaagggcaacagaatgaaataaggatgatgaaatgcttgcaaagagaaagtgaaatggagaatatgcagtttttaagtccctttgccatttttaagatgcttttgaatccaggattcttttgaattaaaggtacagcgatcacaggagtataagcattgattaaatacctatgatgaaatagcacagcaaaatgggtagacatgggccttgaagtcagatggggtttgagtctctgccctggctgtataactctcgtgagttatgtaacttctctgagcctcagttttctcatctgtaaaatggggataatagcacctcctatggagggcacaaagcagatgggaccactgtaattataagcagtacctgatgcagatgaaatactactggccttttgggaaatgggagtggcagtagaatggggagggaatacacaagattgcaaagtgtgacccccaccaactaggatcctacagaacgatctaacactttacatttcagttgaggacttttccaggtgtaaaatttatgctgattttttttttccatcccaggtttggttttcctaaacaaatcctttcacagggaccgacggcacttgataatgtgacaaaaaccagcctcttccaccccactgcagtgacttttgccggaaagtggagcagtgggcacggccaaccttgtcgttcatcaatgccgcccctggcagtatctgaggatcggtggcagccatgcctccccctgccccagccgctccttcccccccacgctaatctgcatggtgtgggcgcccttgggacccccgaggactgattgtctgaccttgcttcacacgcccagtaaggactcccccaagatgtcgctcgagtggctggtggcctggagctggtcgctggatggcctgagggactgcatcgccaccggcatccagtccgtgcgggactgcgacaccaccgctgtcatcactgtggcctgcctcctggtcctcttcgtgtggtactgttatcacgtgggcagggagcagccccggccctacgtctccgtcaactccctcatgcaggctgccgatgccaacgggctgcagaatggctacgtgtactgccagtcccctgagtgcgtgcgctgcacccacaacgagggcctcaaccagaagctgtaccacaacctgcaggagtacgccaagcgctactcctggtccggcatgggccgcatccacaagggcatccgcgagcaggg

SEQ ID NO: 28143 - DNA, 2300 bp, Homo sapien
agaagcattctgtttgcatctctgtactttttatatgcacttatttttcttacatagctgttgaaaaatagtccacaaattatctgtgatctctaaagagacaccatttcttttatatgattattttcatttccttgactttataaaaagactctgcctcaggatagcactttagagtttacaaaggacttttggatgtgtcatttcatttaagtcactcaatagtcccgtactgttcccattttgcagttgactagaaaaatgaggcacagaaaacttggtaacttgctcctggtcatttgactaaaaagaggctgaacttgggatgttttttacctgggaactgcaaatgtttggggacagtgaccttctttcttgtggctgaagcaggcccaggaaaccccatttcagaccaagcctattatgacaggcctggcctactgagtcaagccctcagtggagcttgaggaacactgcacagccattaaagaattatatgatagaatatttaaagacgagaaaagcagttcatgctgtgttgttaggttaaaaaactatcagtcattatttatgatttgatctcatttttattttacagaaaaagagttacacaaaacagtttagtccagtcttttcaattgtacttaaactttatctccttggaggtttgtaaaaatacaggtacttgaacccatctccttgacagtcgtcctcaactgtattcctcttctgaaccatcaagtgcagaaagctgtttgactgacactcagtccttccaagaaagccaggaccgtgctaggtgtagcagagagaagttaccgtgttacatccagtgagggacttctgtacccagggccagtgagaaacaatgcgggatggtcccaggctgtttgtattgtgaaatcatgcagcctgggtaggaaagccatggttaaaataagatacaccacagtggtgacagtggctattactggatggtgaaatgatgggttgttttcttgttatttttttgctcatctcttttctaaatctcctacaatataatcattatttttaaaaacattagaacataagggtgaaagaaaaatgttggtgagagtccattttgctggatcaagtaggcagtaagatactccatgaatgatttttttttttttttttcgagacagagtctcactctatcacccaggctggagtgtggtggtgcggtctcggctcactgcagccttaaactcctggcttaagtgatcctcctgcctcggtctcacaaagcactgggattacaggtgtgagccaccgtgcctggctggaggattttttttttaactaagtctgtggttaactagccctcagaaggcttgctgaggtcagccctacaagcccatgaccctctccccctttgcagtaccacagcagcctggcttcactgaatgggctggaagtccacctgaaagagacgctgcccagggatgaggcagcctccacgagcagcacctacaacttcacacattacgaccgcattcagagcttgctgatgggtaagaaccagccaaggggcctggggcgacggggatgccagattctagatgggtggagatgagaacttgagccccagcatcatgatgacacggctgtgcacagagttgtctgacctgcgttcagggctctcttctcaccgggagcccagtcccactgagtgtggcgttcactgggcagacgcttctctgctcatgtgtctgtttttggcgtttcccagtgttttgagagaagttcatgttcacatatctgtgatagggtttgtctcagaatgttgagatccacacgcagaaaccgggtgctgcatcgcacagcggcggcagccgaagcccaatgccccgggcctttgtctctgccccgggcagccaactcatggccttgagccgtgctcagtccccgtgttcagtactgggcttcatggggtgggagggcagaaggtaactgtctgctcttcacaactctgtgtcctcttctggaagcaaacctgccgcaggtggccaccccgcaggatcgccgcttcctccaggccgtcagcctgatgcatagcgaatttgcccagctgcccgcgctttatgaaatgactgtcaggtgagcctccctgagtcgctccccaacctactctccacggtcctgctcatgggaaccacctgtggggcccaggcagcgccttattcctaagtagatgaaaaacattctagttactctccttaaggccttcctttgtcggttcctattgccgccatcatccactgttgtgcagtcac

SEQ ID NO: 28144 - DNA, 2300 bp, Homo sapien
aaaatcaccaaaaaaggaagaacaccatatcattctaagattgaaagtcattttggctagaagagcagttcttgtttggtttggttttgttttggtgggttcttttggaaccctcagattgaaacgagagatgttttcatttttgagaaaatcatcaggttttaggccctgattgtgaaccagaacaaacgagagattgggtatagcattttgtttaagtcaaatcctttatcgtgagagtcacagtattttgacatttttattataatggaatttatgtgaattctacatcagggctgtggcagatgtgactgtattctagaatatgagttccccaaaggtgtaaaagagaacaggaatcctcaattttattcccagaagggagagagactgagaaaatcagaacgtagagtgtgatgtgagtttgggtggagctgctgccttgcagcctgtgtgggcccaggttcttgcttcatcccagccatagtgggagccagcagcttgggggagcttctgttccatctgcttggctcttagcatgtggttgggacaagctttctgggcctggctaagttttatgaacagatggcacagcaaattcctgatggttaggtcaagaggagaatgtggtgcccagcgccaacttctgtgtgtgtttgttttcagagactccctacgggagaggatgccccgcaggaacatggtaagtagtgaggcgcatggttgcctcttgagaacggcggtcttttatgctacctacccctgtacaagttatgcgaaggaaaccaagccatctgcatgtttatttcctctgctcataataggaaaatggatgttatggagcttcaagaatcgagttacccaccagaaccctaatggtaaagctatgattttaggcatgctgtcaaatccctgctttcagaccctccttaacttcatattgtgagactgctcggtcaagtgccaggagattgtgattgggagagggtaaggcaaacagcgactgccagaaagaccttttgcaggatgtggaggcgtcctcaggagagttatttcgatttattctgaagcctgagttggagcagatccctttcttagcttatatcttcttcttgtaaaagtgcttttcaacctttctctcccgaacatcttccttctccaaagctgggagtcatgttgcctgcagggactctttccttactgggcccaggagttcgaggtgcagtttggcaacctgtgtcctggctgaggaatgcactcacagcacccctttccgagcccacgtgtgggttggatgcatcacgccagtgcagctattgccccgctgccctctctggctcaggggaaagtcctgttcatattgctttgcaattccaggagcggcattgcccccgaatgtccagattatccctgtttttgtgaccaaagaggaagccattagtctccacgagttcccggtggaacagatgacaaggtaatggagtgcacagagagttaaccttgcaccacacctgagggaccccatcgcgtgattggttaaaaaacaaacctctgatacatcccatcgttccttaattccatcttccccatgccctgtcttgtaaaggagcatctgaatcttgagtttgttaagaaacagagtggcatagagagatgacattggctttcatatcccagctctcttacttataccagctatgggaccttgggcaagtccattccctgcctgagcctcagttttttcatctgaaaagtagacaaaatagtatccctttcatgagttcattgtgacacttgaaaatagtataggtacagcacctagtatagggcctgatgcgtaggagaccttccagatgtgggtcagtcttattcagtgggctctgccattttcagtaggtgagtctggtgtcactacgtaaagccccaagggccagatgttggtgtatttttactcttgtgatttaactctggtggcctcttaggctctgtggcctcaggcacccccttgtccttgatgcctgtgctttagtcttcactgtggaagggcacttgccctgcagtctgtcaacgtgccccttccttacatctctcttgtttgccaggtctctagcatctccagcaggactccaggatggttcagcccagcaccatccaaagggtgggagcacatctgccctgaaagaaaacgccactggccatgtggaatccatggcctggaccaccccagatcccacatcccctgacgaagcttgtccagatggcaggaaggagaacggatgcttgtctggccatgatctgga

SEQ ID NO: 28145 - DNA, 2300 bp, Homo sapien
tgtaatccactttgggttaatatttgtgaatggtgtgaatagaggtcaaggatctttttttttttttccacctggataaccagttcttccagcatcattgttgaaaacattttcctttccctattggatttccctttggttcctttgccaaagatcagatgaccatttaagcgtgggtctatttctggactcttttcggcttttccacagatctgtttgaagattctgtgtgagtaccacactgtcttgatttctatagctttatagtaagtcttgaaaccagatagtataagttctccaaccttattctttctcaagatagctttggatatttcaggttctttgtgttttcattgtacaatcagtttgtggtttctgaagaaaagctggtgggattatgattgcaattgcattcagtctgttcatcaattggaagaattgaacacttcttacatgccagactgttgtaagctcttggattacatctgggaacaaagcaaagatccttgtgctactgtagcttacattcagagggaatttttgtttatttgttttctgtcagggtttattagtttaaatatctgatgattcccttaggacagattcctagaggtagaattactacatcaagtaataggaactttttcaggctctttaaacatatgaccagataactttctaactcagcaagtacttttttttttttgagacggtgtctcgctctgttgccaggctggagtgcagtagcgcaatctcggctcgctgcaacctctgcctcccaggttcaagcgattcccctgcctcagcctcctgagtagctgggactacaggcacacaccaccacgcccagtatttttagtagagacggggtttcaccatgttggtcaggatggtctcgatctcttgacctcgtgatccactcaaagtgctgggattacaggcatgagccaccgtgcccggccaagtatttatcttctgtggaactaaccactacgctcagcattttggagatctaggactgggaagattgcggtcagttcttgctcttaaagcactctatccagctggagaaacatgatggccattcatgaaggagtttgagtcctgtccattgtttgtaatggaatccagattaaacatctactgtccaaataacagtcctaacaatgcaagggtcagaaaaaaggtcagcattattggctcgaggtaatagaacagacctcatggagatactgaaattggtggtgggcactgaaggttgtaagttctggggaaatgaacaataaggaaaaggacatttgagattggaaaacatgaattgaggtacagaacttacttgtccatggagattaacttggccagaatgaagggtgtggactcagggacaatagaagatcaatttcgatgggccagtgaagtcaggtaattgagagccctggatgccaggattctgggcttggactcaaagagaaggaagatgcttgtcttcctggtttctctctttacaggtgctgggctgtgctgtggagctccctgatgtcagctgcaagcggtttctggatcagctagttggattctttaatttttacaatggacctgtttccctagcttatgaggtacaagtatggggttgaggagtcttacattgggcctctttataaaaaccggtattgccagaatgcagcacttactctggggtcttgtatacttcatataaacacattgtgtctggggacaaggtcaggagctcttggaggcccctcatatgcctttgggcctagtggcataggtcacatttattccaaatgtttatccccatctcctccctgggatgtttagaaagcgcaggccctgcttgccacccccacgcggcaggcgccgtggatctgtgatgggataggtttaaaacaggtcctcccttccggtcagtttcctgtgtgaggaacaatttttgaggtagttgggactctggccaaagaatctgtccctcaaaatctcagatattgacctgaggctctttctgttttagaactgttctcaggaagaactgagcacggagtgggacaccttcatcgagcaaattctgaaaaacaccagtgatctgcataagattttcaattccctctggaacttggaccaaactaaagtaacattttcatcctccttattcattttatatgtaagactagggcttctggatacttttttaatattcctgaagtgaactatatctggaaaagtgagtagaatgtcacttctcaggcagggccatgacacggcaggtcacctctcagcctcat

SEQ ID NO: 28146 - DNA, 2300 bp, Homo sapien
gggctgttggttagagttttggggttaattgaaaatccccagccagattgtgttaattttattaacataacaataaaaatgccattttcctcagagcagctgaatcaagcacgtgagccatcgctctccaaagctaacatgttttaaccttgcaagcctctcccaatgtttgaatgagtctggcattgctgggagattgtagaaaagatagccacagcctgatcatgcagcgagctttgatgataatgtgaatattgtagtcttcaatttgcagagatgaggtatggttgcatttgagaattacagcatgaggagaggtctggccagactgggtatcaaggggtattactcaatgtctgtctgaaacccagttcccttctcaaccctaaatgcgttaatcctttcccataattaggtttagcaaacatcagtcatagaggagatgaaggtgaaaagcaggtttagctagaattagcaggatttagtgactgattatttatgtggaagtcaaaaagatggagcagttcaaaatgacacccaagttttctttcgtgtgcccgcacaagcagggatgctttcatcaagagaacgtggggacaggggaggatggggtgcacatggagtttctgagttggctttgaaacttttttgaggctttttgatctgagcttaccctgcagccagttgtacatccagccttaggtattgggaaagaggacagtgccaagagaccaagttggtgctttatttatttgtttgtttgtttttgagacagggtcttgctctatcctccaggccagagtgcagtggcatgatctcaggtcactgtagcctcaatcccccaggctcaagtgatcctcctacctcagcatcccaagtaactggaaccagaggcacaccccaccatgcctggctaattttgtctgttttttgtggagatggggtttcacggtgttgcccaggctaatctcgaactcctaagctcaagcagtcctcctacctaggcctctcaaagtgctgggattataggtgtgagccactgtgcccagccaagttggtgctttttcatcaggaaggcagggtgggagccatggagggaggcttcagagagggcatagatccagggaagagagcagatgacacattggtcccattgcttgtttatgctatagcctcataaatgtgttctcagagacttagaagtaaaacaggtccagccaggctcagtagctcacacctgtaattccagcactttgggaggccagggcaggattatttgagtccaggaatttgagaccagcctgggcaatatagtgagactcgtttctataaaaaatttaaaaaaaaatagccgagcatgatggcacactcctgtagtcccatctacttgggaggctgaggcgggaggatggcttgagcctgggagattgagtttgcactgaaccgcaatcgcaccactgcactccagcctacagggctacaaagtgagaccctgtaaaaacaaaacaaaattgaggcctggcctttgaggtgtttgttttatggtcttaaagaggtaatcagataataacattacgtaatatagttatactgcagtgtagtctgtaagagtctttgaggaagaacagagggtcatggaaattcagaacaaagagatatctctgggccgagggaatcaggagacggttaatgaggaagtgtgcttgaatgatacttggtgaggtttggcatggtagagaggagttcagagtttctctgtaaattctcataggcccctgttttttccctgttacgaacttttggactcactatcctgcattgaaactgcgtgtttgctcagcaaccgcggagcacactgtgggccctcagtaaatgtttaagtgaatgcatgaattcctggtagaagggctgtttctggaaatctttgtgctcagcacttatgaggagtgcatctaatacatccctaacttattttgttatcagagccttaaaagacagcgtatcagaccatgtggttgtatagttaaggttcagtgtttcaaataagagcagtcattgtgggcgcctcgtttttttttctagctactcgtgtcttctccggcagatggtctaacggctggatagaggcatatttttagtttgaatttcctgcgcttacagaatggttttatctaatttgtagctactggggttctttattctctggggccacctgaaggctttcaaacacagtaataagccctcctcgggctgggaaacaggaagctgtgttttaaatgccgtgatcactggattaaagg

SEQ ID NO: 28147 - DNA, 2300 bp, Homo sapien
tcattctcttcatttaggttttcttttccggtatcacttctttctccctagctgtgaccgttcctctatcccccaatccagtgaatctggacgtggtaggtttcagtgttttcagtcacaactgccacttggttagttttcactcagcatggaaagttccacttcccttccttgcaggttcttcagtttcatgtatatttccatgcctcttacaactcagggagaaactataacagagaatcctagcagaaaagtcaaatccattcctctggtttcctaagtatcactgtggctgtctgcagaaccacctcttcaagctcctctccaggaaagccaaaagtgggagatgcatgctagagctggtgttctaaagaaatttctagcttgtctagttcaaacccatcctgaagactcttattaaacgttttgaagtttccagttcaaacatcagtgccttggctctgaaataaacacaaggaatagatatttcagcaactcgtgagagagcatgtgacccagcaggattaaacgaatggtatatttcaaaagagctttctgtgagggtgacaatcatgcttcaaaatcaaagagggaggcttgcagagacttcagagtaagggctttagtttctcgaacagttaagggaaacacaccacaagcttcacggaagataaaatcaaatgacagggtgaaaatgctctaggtgtggacagctatacaaataaaccagttgctgtggtaataatggaacccaaattaaggaactgtcatcttgacagtccaaaagtaacctgaacatgcagaattccagagcagggcaaatttctaaaaaatgaagagaactttatcaaatggctttcaaacttccacaagagaaagacagctcagtgtatcacggaatttcagagtcggaaggaaccctggcatcgtttactctactctcctgcactcttttccaaaaattaccttggctgtctctgctttacaccctccagagatgcgtggttcactatgttacatttctccttccaacaaactaaaatctgcgttccagattttacatctgcctcccactcgctagtctggataacgctctgcaggaaaacacaaaacaaggtctaattcttccatgtgacaacctcttggtcacttcaaaactattgtctaattcttactgtcactttctccaagcttaatgctttagcaacatggtctcaaatgtttgctcaccattctgcaatctgtgggtacacaatacagtttgttaaaagtctctagagacgacccccattgaatatttgacggcctgtaaaatctctatctcttctcagctctagatattttggattgggcctccacaggaccacactcattgtattctatggagcatatttgggtgcctgtggagggggtatctctgttactggaaccaaggacagcagcctaaaactccccatcccttgttcccagaggactgggccctacactaccgaggtcctctcttatctctgaaaggtccagaagagaccaataatggccctggagtaggaagagacgtcggaacatgagcagaaaaggatctggtagcctgggaagtaatagtaacaacgcggggctggggctggtgatactgctgtgggaaggggcctcagtggggcagcagggctggaaaacggacgctaatggctggaaaagggccaggaagctgctgggcgcagcccccggggcgcaggcagcgactggtaacagcactagggctgtgcggtgtctggccccagctctacgggactgggaaatggtgggcgaacgcctaaggattaggcggggtcgggtcacgctctaagctgggggcccgcccctcggtatccccgcgctccgagcgccgcccacccaccggagtagccaggcatcccagtgctcggggttcgggactctggaccagaaatgtgggcagcagctgggtacctgcgacttctgccccgtacctgcgcgcgcggcagagaggccttaggtcacgcgccgccccgcctacctccccctccagctcctggcaagccggcgcgcggcgatgacgtgccgagtgcgccgcacgccgctgacgtcagagaccaatggctgcggccgcagctgcggcgctggaatcctggcaggcggcggctccgcggaagaggcgctccgcggctcgacggccgcggcggagggaggcggcgccccgggggagagaggcggcgccccgggggagagaggcggcgccccggggccccgaggcggagttcgagtctgacagcggagtcgtgctt

SEQ ID NO: 28148 - DNA, 2300 bp, Homo sapien
atccacatctttaatgagctcgttacctacgttaactcttcacaataactccttaaagggtgtgcattatatctccactctacagatggggagactgtggctcagaattgcccatgggcgcaaagattccatcagggccgagcctgcactcactcagcctcccagatgcgacgaagcacgactccgctgtcagactcgaactccgcctcggggccccggggcgccgcctctctcccccggggcgccgcctctctcccccggggcgccgcctccctccgccgcggccgtcgagccgcggagcgcctcttccgcggagccgccgcctgccaggattccagcgccgcagctgcggccgcagccattggtctctgacgtcagcggcgtgcggcgcactcggcacgtcatcgccgcgcgccggcttgccaggagctggagggggaggtaggcggggcggcgcgtgacctaaggcctctctgccgcgcgcgcaggtacggggcagaagtcgcaggtacccagctgctgcccacatttctggtccagagtcccgaaccccgagcactgggatgcctggctactccggtgggtgggcggcgctcggagcgcggggataccgaggggcgggcccccagcttagagcgtgacccgaccccgcctaatccttaggcgttcgcccaccatttcccagtcccgtagagctggggccagacaccgcacagccctagtgctgttaccagtcgctgcctgcgccccgggggctgcgcccagcagcttcctggcccttttccagccattagcgtccgttttccagccctgctgccccactgaggccccttcccacagcagtatcaccagccccagccccgcgttgttactattacttcccaggctaccagatccttttctgctcatgttccgacgtctcttcctactccagggccattattggtctcttctggacctttcagagataagagaggacctcggtagtgtagggcccagtcctctgggaacaagggatggggagttttaggctgctgtccttggttccagtaacagagataccccctccacaggcacccaaatatgctccatagaatacaatgagtgtggtcctgtggaggcccaatccaaaatatctagagctgagaagagatagagattttacaggccgtcaaatattcaatgggggtcgtctctagagacttttaacaaactgtattgtgtacccacagattgcagaatggtgagcaaacatttgagaccatgttgctaaagcattaagcttggagaaagtgacagtaagaattagacaatagttttgaagtgaccaagaggttgtcacatggaagaattagaccttgttttgtgttttcctgcagagcgttatccagactagcgagtgggaggcagatgtaaaatctggaacgcagattttagtttgttggaaggagaaatgtaacatagtgaaccacgcatctctggagggtgtaaagcagagacagccaaggtaatttttggaaaagagtgcaggagagtagagtaaacgatgccagggttccttccgactctgaaattccgtgatacactgagctgtctttctcttgtggaagtttgaaagccatttgataaagttctcttcattttttagaaatttgccctgctctggaattctgcatgttcaggttacttttggactgtcaagatgacagttccttaatttgggttccattattaccacagcaactggtttatttgtatagctgtccacacctagagcattttcaccctgtcatttgattttatcttccgtgaagcttgtggtgtgtttcccttaactgttcgagaaactaaagcccttactctgaagtctctgcaagcctccctctttgattttgaagcatgattgtcaccctcacagaaagctcttttgaaatataccattcgtttaatcctgctgggtcacatgctctctcacgagttgctgaaatatctattccttgtgtttatttcagagccaaggcactgatgtttgaactggaaacttcaaaacgtttaataagagtcttcaggatgggtttgaactagacaagctagaaatttctttagaacaccagctctagcatgcatctcccacttttggctttcctggagaggagcttgaagaggtggttctgcagacagccacagtgatacttaggaaaccagaggaatggatttgacttttctgctaggattctctgttatagtttctccctgagttgtaagaggcatggaaatatacatgaaactgaagaacctgc

SEQ ID NO: 28149 - DNA, 2300 bp, Homo sapien
gatcatgacctgaatgcttacagaatgaggtgccctgcaatgcagggcccacccttaccaagtgataggagggggatatatgttgaatatgtccagagccagagcacatactgctggggctcagagactgcaggagagagtatgctggaggaggtccttgattcccagagagagatctgggtctattctcagtctacaacagagcctagcatagaattgcagctcaataaatggttgttaagtgctcagaattagcctttctgagctttagtttcctcatctctaaaatggggataaaaatcattcccaacacggaggagtttagaggcataaaatgggttaacattcttagcccagtgtctggcacatagcaggtactcaacaaatggtatttgttattataaatagttttaaggggaaagtaaagagacaaaaccaagtgtctgggctttctttattcaagtcaactggttttacagacccagagcaaaagaaagtcaacagtgaattaaaatgaactggatttaaactgacaagccacagccagagacagtgattatggggttcagaaaggagtacagagaattgaaagtcggcccagaggctgctgcacgtttctcacagagggtagagagttctgatgtacacaggaatgctttatgaactggtaaatgcgtacacagatatgcgtgtaaaatgctggctcaatctctactcagagcgatggtgattgcaccacacttgggtgttgggagaagcaaggagctcctggggaatactgaagcagttgaggagatcgtgacagtgtcaagggatatgaaaaatgccttgagttttccaaacccctaggcacattcactctcactggcatcctctgagagcttaaaaataatcgcaggtgctttttattcaggctgagccaaatggtcagcaactttctcttcagaggtaaactctgggacattactgcctcttgaccctaattctaggggagaggagcacacaaaattaatctaatttctccccttgtgacggcccttcggatgctgatcttaagtgctaactaaagctgttatttattgagcctaaacaaaactgcgaataaagataataatactaaataacaataataagtaacatttattgagtgtttcctctgtattaggcactctctatgtactttctaaggtacagagcaaggtatgtgagaatctgggctgggataagcaacaagcataatggaaagctggaagcactggtttttgtcacaaagacctgggtttgaaatctggttccacacattttctttgtctctttgagaatcagtgagctaccagggtcctagtatgcctgcaatgtttaacataaagtgtgtagaatgattaagctaatgtcaggcacatagcagctgcctgatgatagcagtcacgtgttcatgttgcttccctcgtgtcaccaccaccaataatatcaacatcggcataatattaatagcaaacactggcacagtgcttaccacgtgccagaaaatggtttccgtttactaattcattgaatcctcaaaacaaacctacgtatgtactattttcatccccatctcacagatgagaaaactgaggcacagagattataaattgtccaaggtcacgcagctgtaaccgtaataaaaggaaagacgacctttaactgagcgcttactataatccacatctttaatgagctcgttacctacgttaactcttcacaataactccttaaagggtgtgcattatatctccactctacagatggggagactgtggctcagaattgcccatgggcgcaaagattccatcagggccgagcctgcactcactcagcctcccagatgcgacgaagcacgactccgctgtcagactcgaactccgcctcggggccccggggcgccgcctctctcccccggggcgccgcctctctcccccggggcgccgcctccctccgccgcggccgtcgagccgcggagcgcctcttccgcggagccgccgcctgccaggattccagcgccgcagctgcggccgcagccattggtctctgacgtcagcggcgtgcggcgcactcggcacgtcatcgccgcgcgccggcttgccaggagctggagggggaggtaggcggggcggcgcgtgacctaaggcctctctgccgcgcgcgcaggtacggggcagaagtcgcaggtacccagctgctgcccacatttctggtccagagtcccgaaccccgagcactgggatgcctggctactccggtgggtgggcggcgctcgg

SEQ ID NO: 28150 - DNA, 2300 bp, Homo sapien
atccttacctctccctcaccttgctgtaaagaataggttgtgggcatgtttacacctgtgaatatcgtatccccaggaagggaaacggagtattcgcggggagcctaccatcttttacatgctccattgtgggacggccttgtacaacaatcttttatggagtaactggtcagtagatgccctttctaagatggtcatcattgggaacagtttcaaaggacttgaggagaggtaagtctgagaatgctgagattctgtcaggccctgaggtgaagcccatacctcagattgacccacatgcagaaaacatttccttgacgattccatactggggaaatgcttttccacagggaactggatgaaggcttaaagacagatgtcaaatcctgattcgaactatgaagcaagttaaggagtctttttgccacgaattcctcccttccattatgatacacagaaatggttttgaaaacagggaaaagctatttgattcctctgcctacagctccacgtcctcattctgtttcacgtgcttaggagtctgctcagtcatttctcttgatgaaatgggcacaattactggaatatttgcttttttttttttttttttttttgagatggagtctcactctgtccccccggctggagtgcagtggtatgatctcagctcactgcaacctctgtctcctgggttcaagcgatactcctacctcagcctaatgagtagctgggattacagatgcacaccaggacgcccggctgatttttttatttttagtagagatggggttttaccatgttggccatgctggtcttgaactcctgacctcaaatgatccgcccgcctcagtctcctgaagtgctgggattacctgcgcctggcccacattttcaactatttaactggtttactccacatcttgagttttttcctgaattcttactatgcttcaatcatcttgcccttctatgtgtcttaaaagttgaatgaaactatcctcatacctcctaatcatggtgttttttttttgtttttttggttttttttaatttctaggttgttggcaaggattctgcagaaaaattatccctacattgcaaaggtatctatctgaataaaggggctgggatggaaaagggtgtgaaactgtgaagaattctatctttctttacaggcgtaggaggaaactcatgggctaagtggcgctagtgtactgtcagctctctccatgggtctgtgttccagaaagctatgactctttaatgcatctcttagttttttccttatttcctttattcttagtatcacagtccatgatatccactgtccttggggcgcccaattcattgtgcaaaagcatttaaatcaaaataccctatttgttatttttttaaaaagtaaagtggggatgacaagtaaagtggaaatttatcccagaagagtggggattactgtgactatctgaagtttttatacttgaatttttctgctcagattttaaaaggactggaggagcttgagtttcctcagacttcacaatacatggacatatttaatgatacctctgtccactggttccctgtgcaaaagctagaacagctctccatagatatttgggagtttcgggaagaaccagattatcaggactgtgaggaccttgaaatcatcaggaacaagagagaagatccttctgctactgactgaactcgttgtgaggtactcagtgttggctgaggtagaagctgccaccagagactaaagggaaggctgctatggaggaactacagagaactcctttgccaggaaagaacatcaacttggctgtcctgttttgaggacgataccccacatgaggacttggtataaagattcctgccctacgtggcattgtcccattttacatccttccctcatgacctggcctgatgtggagtagctcctgagtaaagaagttacccttttgaaggtgatctaaaaatactgtttatttacagtacatccctcttaggggcaagtctctgactggttctggacctgccacagttcacttggccatgtcgatcaggctctgcagtgaggtgggcacccacgtcttctcgccctggacaaagaccactccccggtcgatgtagatcacaatgcggccaaaggtgtagagctgcttcccttcgtgtcgcttcccaatgacgggcatgaagacaatgttgtgctcctcagccttggtctcaatgaggtccttaaagttcatgggcacagagctagcggccacgccaatgcccctctgagccatgttctcagc

SEQ ID NO: 28151 - DNA, 2300 bp, Homo sapien
ggtgtgccaggttgggggttttttcctccatggcctcacctgtggcctctaggctctatcctattgagagtgtgcctttttctttttcttttttttttttttgagatgaagtcttgctctgtcgccaggctggagtacagtggtgcaatcttggctcactgcaacctctgcctcctggattcaagtgattctcctgcctcagcctcccgagtagctgggactacaggcatgtgccatcacacccagctaatttttgtatttttagtagagacggggtttcaccatgttggccaggatctcttgaccttgtcatccgcctgcctcggcctccgaaagtgctgggattacaggcgtgagccaccacacccagctgagaatgtgcctttttcaaaggaggctgggggagaaagagtatagagattagtccaaacttctcatccacaaggaagtctgaaagtggatgacaaatagatcagggaacaagaattgcataatcataagataataataatagctaacatctcttggctgcttacttgtcctggctatttcataaacctggattaattttccttatgagaaaggtaccattattgtccccattttacagattaagagactgaggctaatggtcatacaactaggcagaggctaagctagaattggaacctggacctatctgactctagagtttgggatctaaatcactaagttatattacaattttaggaaaaaactccctaaattctgttgttgccctgagggtgttgaattactaggttggtcattttacaaggcatccctttatttgctgtattcccaggttttctttttttctttgaaacacagtctctattacccaagctggagtgtgcagtggcgtgaccttagctcactgcaccctctgtctcctgggttcaagcgtttctcatgcgtcagcctcctgagtggcgtgggattacaggcgtgtgccaccacactcagctagttttttgtatttttattagagataggattttgctatgttggcccagctggtcttgaactcctggcctcaagcctcccaaagtgctgagattatgggcatgagccgctgtacctggctccagggttttttattgtaattttttcttttttaaaccacacagtacaaatatatcaattttattttatacaaaaaagacctgaggttaatggcttaatgtaagtacttgaagcagtcagagtttaaatcaatatatttcattttatagagttaatttcttatttcttaggggactttagtgtaattttcttttcttttttttttttttttggagataaggtctcactcttttgcccaggctggggtgcagtgacatgattatagttcaccgcagcttcaacttcctgggctcaagcaatcctcccatctcagcttcccatgtagttaggaccacaggcttgcacaaccatgcctggctaatttttatttattttttttttatagagacgaagtctcaccatgttgccctggctggaaattttcacattcaaataaatttaatggctaggagctttttctaagtttgattaatataattgttacatgctttacattcatataatctttcaatgggttttatttatgattttccatcaaaatttctgctcctgttggatttttgtacttgaaatagttttcaaaacaattgctttttatgataaattaattttttaaaatgtaggaaaattgtattatcacatcatattttgaatttgtaatcaaccctacattgatgtgataactcttcagccgtagagggatatgtcaggtaaaatgttaaatgtgactacaggaagccaaatctggggtcctttggattttttgacacattaaaaaatgtgttacttttttaaaaaacctcccatgagattcactctaaggagtcttcaagcacgtagtttctgcaaaaggatcgctgcagagaaaagagttctttaccgacctggtggggctttgtttctgtgcctacagggcccgtgactactctgcgccagtcaacttcatcagcgcagggctcaagaaaggggcagcggaggaggcagagttggaagattctgatgacgaagagaaacctgttaagcaggacgactttcctaaggattttggaccaaggaagctaaaaacggtagtctctattgcaggattgtgaccctaggaatatccttcaaaggtcattgtggcccaagcattttctagccagggagaaactcatctggaatgaatttcgtgagtgtctccttttggtggcaggttt

SEQ ID NO: 28152 - DNA, 2300 bp, Homo sapien
agtagcaaagtcgagatttggatccttgaagtttttactccagagctttcattttaagaaattgcaaaaaagttattaagtacagagagaaacattttccctgtaataatttgaaattaaggtgaccatttgatgccttatcccctgccaaatacattgatttactttccagcaaacaagaacatcctctgatgtaacttaacaggcaaccatgaaaatcaggaaattaacacggacacatcattaccacggcattgtaggccccatttaaacttttccaactgtccctgtaacttcctttcaagcaaaaagatccagttcagaatcatgtgttgtgtttagttgtcatgcctctttggtcccctccagtttggaacagttccagggtctatctttgattttcatgaccttggcactttctaagattacagttttgtatacagcatgtctctttacgtgggtttgtctgatatatcctcatgattacatccaggttatggatcttcagcaggaatatcacaggggtgatgttgcaatcttctcagggcatcctatcaagtgccacataacttcactttgtcccattcctgacaatgcagactctgatcactaaatcagagcctgcactcttaactactccatgacagtccacaaaggtcccttcttcagaagccacaaagtgagttccatttggtgaagtaaatccactagcatcagtccctcatgatcaaagtaattgcagctccataaaatctgctgtaaagccataaacatagctacagaaaagccaagcgtatgtatgcttttggcttttgggctacaaacagatgtaaatacattcaggcacagactaaaaacacttttctcctctgtttcccttactctgctcctggcagggcttgtagtctgttagaccctctctcccggccttcaatgctaaaaccacattttccatttctttcctgagtacatactatgtgtcaggcacaatgattctacatgtcactaagaatacagagatcattaagacacagtcatcattcctaagcagcccacatttaactgggtacacaaaaattgttgtttaattcttaacaactacttgatggtagacttaagtatttgactccaagtcccgtgctctttttacattccaacaattgcctcttgaatcttttcatcacatagagcagagagagaaaaattaagcaaaaattaatagctaacacttcttcagcacctactgttaccaggtacggttttcattgcctacagttttatcttattgaatccttaaccattttgcagaagagaaaacaggcttagatgtaatgacttgcccaaggtccacagctgctaaattgcactcaaggttggaactccagagcctgtggacacttaaatgtctacaaggagtccttgggctagtgagggcttcccagggagggcccatgactgttctgctcattgtatcacattggcctagcacaggtgaggggcacttagtatattttaattagatcaatgaataaattaatgaatttaccaacctgctggaaacgaaaagaatggaaacagctcctggagagaatacttgggaactccagagtttgcccattcattccttcattccctcttaaactcctgcataaaggccactgccctgtgcccacgacggtgcttataccgagagcgtcaaagatacaggaatcacagtcttgaccttcattattcccatttgaatgctgtgtcccaggccccttattgtctcacagtatttaccacaactaccgtatgggctaatcctacatctctattttacagatttacaatctcagagtggtaaagtctccttaggccaaggtggctcagcggattccacaccagtcatcacaggctgagcgtcacagtacaaagcaggagcggcagggaggccgattccgcggggaaaccactccccagctattctaggccttgcaaatccacccctcctatctaagatcccagccggccgctctgcagccatatccgccgtagcgtcccacgctgccctggcagccagcaggacatccgctgtcgactaacgtcatttccggcgcgccggccacggtgcttccgggttctggtgtaggagcggcgtcttctcgcgcggatggtgaagctgaatttggtacgctggaccctcggacaggtgagcacggctggccacaaggggactcagcgccagtgagagtagggacgaaggctcagggaaggcgagcttcggtccaagccgttggggtgtggggaggggaatccat

SEQ ID NO: 28153 - DNA, 2300 bp, Homo sapien
gtgtatagatggaactgtgactgatattagcatcttttgctgggatgaggaagccctgaattaaaatgggcaaaactggccttgcatggctttcaacctaagtcatccctgtttctcaggtctgtataccaacttccaggctaggccttgaaaataaacagtgagcaaggccatttcctacccttggaggggactgcaccagtggtgagcgcagggggctgtgggatcccagcagaaacactaactgggctaaggcattgtggaaagcttcctggaagaggtgagtctcagggtggagtaagcctcttctgttcaggtacaggcttgggcacctttgtgcatcaggcactggacaggtacctgggagatggaaagaatcggcttagtctcaccccctcttaccccgcaatagaccagtgttcttgatggggatgactgcacccccagggggcagtcagcaatgcctggggacatttttggttgtcaggactcagggaggggatgctactggcatctccttggtagaggccggggatgcggctaaacatcctacaatgcatgggacagccccaccccatactaccacaaagaatgatctggtccaaatgtctatagtgcagagactgagaaactccaagatggacaattacaatacgatatgagcgggggaagagaggagagcagagggattgggagtgttgtcctggccttaaggagtttgtttgtttgtttgtttgtttatttactgactttgagacagagtcttactctgtcatctaggccggagtgcagtggctcaatctcggctcactgcaaactccgcctcctgggttcaagtgattcttctgcctcagcctcctgagcagctgggattacaggcgcctgctaccatgcccagctgatttttgtatttttttttctttttctttttctttgtctttttctttttttttgagacagagtcttgctctgtcaccaagttggagttcagtggcgcgatctcagcttactgcaacctctgcctcccaggttcaagtgattctcctgcctcagcctcccgggagtagctgggactacaggtgcgtgtcactacgcctggctgatttttgtatttttaatagagacggggtttcactatgttggccaggatggtctcgatctcttgaccttgtgatccgccttcctcggccccccaaagtgctgggattacaggcgtgagccaccgcacccagcctaatttttgtatttttaatagagacagggtttcaccacgttgtccaggctggtctctaactcctgacctcaggtaatctgcctgcctcagcctcccgacgtgctgggattacaggcatgagccaccgtgcctggccaggagtttattaaccttcatgcccaccacgtcaaccacaaaccacgtgtggctgcagagccctcgaaatgtggctgctgtggctgaggaactgaatttcaagtctttatctattttaatttcagaacagatactcattcccattcttggaaaacttttaagtgtgtgtacaacagtttgggtgtgtggatatactttgttcaactatcaattttatgaaatctctgtacagattagccatttctactgagaatttagcatccaaattgagatgtgctgaaagtagttttaccctgggtttcaaggactaagtaattaaaaaaaaaagactataaactatctcagtaatgtttatattgattgatgataatattttatatatattgagttaaataaaatgttattaaatttacttctgtaacatagctactggaaaactgagaatttgaagtgtgtctcacactgcatttctattgggtggcgctgttacaaactacaggaaggagctagaattctgtggaaggttttaggcaggggctgacatcctctggccaaaatgacaagagggaattccagagaccagggcaagtctggccacagggagactgcatggcctaggagacctgagccacagccgccaagagaagccctgattccccagagaggaggtgcccgctgccagtccacaggtgagcaacaagactggatccagaagagggaggagcctttaggagaggcaggcccatcgcaaggctgactgatccttcaaaggagcctcccagctaaaagccagcaggagagagaccttggccaccaagggtctgccagctcctggtggtccccactccagccacctgccagctcgagcctgaccctcgcctccaccctggctgctgcctgtaccgctctcaggtttgaaacctcatctctt

SEQ ID NO: 28154 - DNA, 2300 bp, Homo sapien
ttttttcatccacaaaaggacattataaaacaccctgctggtgtttaatctatgtgtctatcaaatcagtcatatgaagtctctaacatgcacgcaataaacactatgtaatgttgttgtattgtttccagaccagtaatggctggctccatggaggcagctttatcagtcccagcattttccataaggcaagcactaactatttattggacacatgaatgaattaatgaatgaccaatgaatgaacatgtggctggccatgggcaaattacttaatatctgtgtgccctagtttctgtgtgtgtgtgtgtgtgtgtgtgtgtgtgtgtgtgtgtactcacccaggatggagtgcagtggtgcgatctacactcactgtaacctctgcctcctgggttcaagcaattctcgtgcctcagcctcccaagtagggggaattacaggtgagcagcaccatgccctgctcattttttttttttttttttgagacggagtctcactctgtcgcccaggtgggagtgcagtggtgcgatcttggctcactgcaacctccacctcctgggttcaagcgattcttctgcctcagcctcctgagtagctgggactacaggcatgcaccaccatgcccagctaatttttgtatttttagtagaaacagggtttcaccatattggtcaggctggtcttggattcctgacctggtgatccacccgcatcggcctcccaaagtgctgggattgcatttttttttttttttttgagacagagtctcacttgttgcccaggctggagtgcagtgcaatctcagctcactgcaacccttgcctcccaggttcaagcgattctcctgtctcagcctcctgagtagctgggactacaggcatgtaccaccacacccggctaatttttgtatttttagtagagacagggtttcgccatgttggcctggctggtctcgaactcctgacctcatgtgatccacccaccttggcctcccaaagtcattttcgtatttttattagaaacgaggtttcaccattttggccaggctggtcttgaactcctagcctcaagtgatccgcccgcctcgcctcccaaagtgctagaatcacaggtgtgagccatgcacctgacccagaaatttattttaaacagataatatatacatatggcaaatagaaagttaaaagagaacaaagaaccaaagttcacaatgaaaagtaagcctgcatgcctaccctaccttttcttcaggtattcaatgcacaagcatacgatgcatagatagctctattatttttccaattttacacatgaagaagcagaagcactgaaaggttatagaacttagactgtgctaagatttatcagtcaggagttttgtttcatttgtgtatatcagggcttcacaacctttacgctattcggcattttttgcagggttttttttgggggggtagtggcagggctgggggtggaaagggtgtcctatgcaccgcagaatgtttagcagcattccaggcctctactcactagatgccagtatcgcctctccacttccccagttatgacaaccaaaaatgtcttcagagattgccaaatgtcgtggtggtggagggatgtcagggcaaaatccctgataaatggagagaatgtggtatatccacaaaaactccctccaaaaccactggtgtgtatgactatacatcagaccacccctttcttttttctgtgttttacacaaacagtagcacgaatacaccccgctgcgggtctacttttcttttcttacaccactttttggtgatcattccacttcattgcttacaggcagaaaggaacttctcttaaacagaactgaccgggagaagtggtgagctgcccgtcctaggggtaagccagcgagcagacaggggcttccagggcggcggggcggggttcccggggcgagcctccgggaaacttcccgaccagcctctgctcacctcgcggtcccgaggcgcagtggaggggatggggcggggcggggcggggccgcgtatcgggcccgcccccgtacgtcacgtcgccgcggccccgcccccgcgcgggcacctcccccttccccggctggggcggctggagagccgggagtcgctgggtgcgtggggctgcctcgccgcgtctcgccacggtaggtggccctggggcggcagggggtggcctcgggttgcaaccgggggcgcgggctgggggccgtgcgggtcggcctcgggcgcctggcagccctccgtcctggcggctgcctccgggcccggcgc

SEQ ID NO: 28155 - DNA, 2300 bp, Homo sapien
gtaaagaagatgtgagttccaattttatcttacatttccatttttatgagaaagtggctgagagagaggaaggaaagggagttgcttcagtttccttatccgtaattggggttaatcccagagacttcatccttatactgaggagtacaggacaatgcaaaaaaaaaaaaagaaaagaaaaaaagaaaagaaaataaattggctccataagacagggcaaaaaagaaaaagatataatgaaggatacaataataataataaatgctcagagtggagccaccaacatggtgggccatcccccttctctgcccccaccctctggcagacagcccattcctggggctttagggggggcacggaactgccccagatgacctggctttgaagcctagactggtgggtgggccctcaccacaggcgtcttggccccagttccagtggctaccccatcttgcagttcctgcccacaccccacccaccaagtcttggcccaggatgaaaggccaaggagaggctaggaagcgagggggtgctgggtggtggagggacagaggcaaagctggctccaggccagggagagttcaagacagagctgggctccacggggagcctagaaccccgaaaaagaagagacaggagcctatccagatgcccccgcaatataccctgcctgggactggggagccgactgcaggtgacctagctgagcagctccccaggctccttctgaccccagctgtactgtgagttcccgccatgtgactatgttgaagtcatttgttccacctgggcctcggtttctccatttgtgaaatgggaggattgggccctgtgatttctggcgtctgttcctccgtcctgaggcttgatcaccccaacttgacctctgtctctccgtctctcgctccttcactgtccatgtcccctgtgcctctctgtgtctctgtctccacctctctctttgtctgttacttctatctgcctccttacttctctctccttgccttggtttccctatctcctccgtaccctaccttctgttccgatccattggaaccaccattgagtcaccagttattgactgagaacccatgatgtgccaagctctacctagccaggcccagctaggtgctggggccagtggtgaacaagatgtggtgggcatctggggcttgccagggcaggaggctctgggacaggcagtcatatttctggccaccagcactgtcctccaggtcagataacgtggcctgggtagaggcggggaactggggtggcgagagggatcactgtcgataggtcaggaaaggatggggcccaatgtggggaaaagaaaaagacccaggtctccgatatccaacccagctgagcacagtgcgactctcccattcccaccccaacctacaaagaggaagtcaggccagggggcctcaggccaaggtcaaggctggacagcaggagaagaaagcacacaggcccagagctggctggcctgggctggctctgacctctctgtgccttcactttcctcttctgtgaaatgggcataatgaaagtaccaaataaggcagattgtcccggggactgaccgagataacacgggttcggcacacagtaagcactccgtaaaaaaggctgtccatatcaaacccacatctgcctttacaaaacgcttctgtgctcattgtcaccttcttttctatatggcatccaacagggacacgtgcccaccttataattgcagacacagaggcccccctaggggtagagacctaccaaaagccacacagcgcgcagtggctgagtcaggattcaaactctggtctcctgcctcccagggtctccccttttccctgccccatgttggcagccagcagggacccttttgggggcccatccctggctggggttgttgagaaaggagtcagggtagggttggaaggtgaagctgctgtggccagggtttctgctgtgtgtgctggtctcacaaaggaaagtgctgctgtctgcagtgatccaggcgaggtcagggccccagtcccccactccctgcccaggcctgctgagccagcttcccctttgtgccacagactatagggcctgatgtctgccagactataaaatggggggtcggactctagtcacccatagcacctgcccgcctgcctgtcctccagcaggaagtagcaagtccccaggtaagagggaacccacagcccagctgagagctgaaggggaggggaagagaaaagggagacagagagagggaggcagagatagcagtgccatgagagtcagag

SEQ ID NO: 28156 - DNA, 2300 bp, Homo sapien
gggcagagaagggggatggcccaccatgttggtggctccactctgagcatttattattattattgtatccttcattatatctttttcttttttgccctgtcttatggagccaatttattttcttttctttttttcttttctttttttttttttgcattgtcctgtactcctcagtataaggatgaagtctctgggattaaccccaattacggataaggaaactgaagcaactccctttccttcctctctctcagccactttctcataaaaatggaaatgtaagataaaattggaactcacatcttctttactcatgaacccaggctcttaaaaactatgcacccctgctttttgatcaacaattaataataatcatctttcttattagcaatggtgatgatgaagatgatggaaataccacaatattttttatgttgcaggagcaattccagctgctgttcatgtgctattcacatttatcctcacaatccccctgtttcttagactaatcccaacttaccttgttacacccattttacacacaagtaaactgaggctcagagtgcgtaagtaacatgcttaaaagttacccagccagcaccagtgggatgcaaacccaggcagtctggctgtagagggtgcattgttaacctttcattttcatgccaacccttcatcaaagtcatgcattccttttttttttttttttttttttttttgagacggggtcttgctctgtcacccagggtcaagagaaatggcatgatcttggctcactgaaacccctgcctccaggttcaagcaattctcctgcctcagcctccctagtagctgggattacaggcgcccgcgctactcccggctaatttttgtgtttttagtagagacggggtttcaccatgttggccagcctggtcttgaactcctgacctcaggtgatccacccacctcggcctcccaaagtgctgagattacaggcgtgagccattgcgcccagcctaaagtcatgcgtttgatagagctgcatttcaccctcttaaaaggaaactggtgtggccactttacaggtcatgagcaggactcaggtgtcctccaggtcacacggatggtaagaaagaagcagggctggatttcatctcagatgatctggtttccagtcatgctgttttcctatgcttgttacacccattttacacacaagtatgtatgtatgagggacctcttaggtccctcatacgccaattcagagggcagggtttcgggacaagaggcacacagcaaattgtacaagtcctggatatttggcaagtgtgccacagtttgcaaagcatgtttgcaactaacagctcctctatgctgcccacagtgccatccggattcatcttcaggctttgtggacccagcaggccctggcctagccctcttctcctgcctcacttcccttcaggtcccctgagctccaggccaattgggctaccagctctttcttgtacatgtgccccaagttcccacctctgaactttttcttagaatgcctctccttccatctcactctgtacatatcttcctcatccttcagagtctagttcaaatgcctcctctaacggcaagcctatctggattgcttcaactggaagagaaaggggaaagagagaaggaaaggaataggcatttcctgaatgtttactctgtaccaggcatgttatgtaacctcacaacaactctgtgatatggtttgtttctgccccattttataggcagaaattgaggggaaatgactcgctggagctcacatagctaggaaggatgcttctggactcctcatctagtgctcattctcctgctctagtcaggaaccttgtggggctgatgagggccaatattccacctctctccttcttcgtggctgatccctgggggtggtgatctggtcctttccctccctgctaaagccagagctgctgacggcttgccattggctcttcagccagggctggcttttgtttctgtggcccagttgctgagtcggggctttgtctcccaggggcccctcttccctccctgcctataagagcccgacctcggctggtctcagatctgacatgttccctgggcctatctcggtaagtcccaggtttggaggaggggtgggatcagagttctgagtgagcattctgggaggcgaggaacccaggtccccagtcctagggatgtcactgtgtcatcctgaatgccatcctcatcctaaccaaggatgagccccaaccatcaagaccagcacctgcttccctcatttaaaa

SEQ ID NO: 28157 - DNA, 2300 bp, Homo sapien
atataaatatgtcgtgagcccttactaggtgccagcaactgtgctaatcacacttccttcatttagcctgatgatgtggattccattattatctctactttatggacaagtaactgaggaagggtgtggagcttgcctaaggtcacatttggtcagaggcatgggcagaactgaaatgtaaacccggaatagtctggttctgaaggtcgctggaatgttctagcacagtggttctccagcttgagtgtgcatcagaattccttggtgggcttactgaaacatagatgtctgggccttcctttctttccccagggctcactgcagctgggactacaggcacacaccgccaggcctggctaatttttttgtattttttgtggaaataaggtttcgctttgttgcccaggctggtctggaactcctgggctcaagcaagcttgtcccccaggcttcccaaagttctggggttacaggcaggcgtgagccaccacacccagcctgaattgtatttttcttttcttttcttttctttttttttttcagatggagtttcgctcttgttgcccaggctggagtgcaatggtatgatctcgactcaccgcaacctctgcctacccggttcaagcgattctcctgcatcaccctccagagtagctggtattacaggcatgtgccaccacgcttggctaattttgtagttttagtagagacggggtttctccatgttggtcaggctggtctcgaactcctgacttcaggtgatctgtctgcctcggcctcccaaagtgctgggattacaggtgtgagccagccaccgtgcccggcctcttttctttttcttttttttttttttgagatggggtctggctcttgtcacccgggctagagtacagtggcgcgacctcggctcactgcaacctccgcctcccgggttcgagtgattctagtgcctcagcctcacgagtagctgggattacaggcacccgccaccacacccggctaattttttagtagagatggggtttcaccatgttggccaggctggtcttgaactcttgacctcaggtgatccacccgccttggcctcccaaagtgctgggattacaggggtgagccgccgcgcctggcctcgaattggatttctaacacgttctcaagcaatgtggatgctgcaactctagaaccactacttcaggaccacttcctagcatccctactctagaaaatagtaggtactaagaagagggcagttaaataaaagactaatccgggcgcggtggctcgcgcctgtagtcccagctactccgaaggctgaggcgggggcaggaggactgcttgaacccaggagttcgggggggtgcggtgagctatgattgtgccgctgcacttcagccggggtgacagagtgaggtcccatctctaaaacaataagaataaataataataaaaaattcaagattaaacctataaatgttgttaggccaaatgctgtacacgcatgaagttaacagttatgggttcaaatctggactccaccataaccatgtgcataaagaggcatacacccgaggtcttcctggttaagcccttggcgctatgccagaacaagcgtcttctgtcctcttactccggggttcaggcttctgcgcccctggtccgcggtcgcgcgcagcccccgcgcctctccagccctgagctctctgcggcctaatgtggacgggcaagcgttgccatgacagcgccgcgggtggggatgcgggaggctgagcgcaccggccagctagcccctttgtgcggcgggggctgcggagtgctccctccaagaccggttgcaccccgctttcctggccaggactctgggcgcgggtaaggaggggttgggtgtgaggttgtaggggcgcaaggaggcgggaggagggtggaggtgagggccgggggtggggcgcctccgcccgccagccgctcccgcattaaaatttcatgggcgctgcagcagctacaaagacgacgccggctgcgctcgcgggaccagagggagggaggctgcggacgagtgcggggaggagtttgagatgggaggcgcttgcaggggctcccccagttctgcgctgtgagccggggcacaaagagccctctgcactagcgccgcaggaccgcggacccgaggtaagacgtcgccccatcctagaagccttccttcccaagtgtccttgtcccctaacggggaacagcctaattccccaaggctggggtcgagggtaggtcccagagtcccagggctgggttcagggatgcaacgc

SEQ ID NO: 28158 - DNA, 2300 bp, Homo sapien
gttagccgggcgtggtggcacacatctgtaatctcagctacttaggaggcttaggcaggggaatcacttgaacccaggaggcagaggttgcagtgagccgagatcatgccactgcactccagcctgggtgacagagtgagatcctgtctccagaaaaaaagaaagaaagaaagaaagaaagaaagaaagaaagaaagaaaaacaattaactttgagtcacacattgagtacgtaggagtgagagagccacagtttcctccaggtttctctagccccaaagcccataccttcctttgtaccctctaagacggtgtcagctaaaggtcccttgaaacctccatcaccttattaatatcatgactctaggtccacagaacgaggggaaagggtcactgtggatcaagccaggctcctctgagcagtccagggtctatttacagagagcagcaagttcctgggacagaggagacagaagggaatttccaggttcttcaggacgttcacaaccacactgagaagcatctttgcagataagtatttaaacttaccagcccatagcctaccagcctgccctcttctggtctgtgcaggaaagtgtagtatcctagaatgccaaagtgggaggggaaatgggtgatgtagctcattctcttttctacctctatggaagaaagaaagagcctgtccccattttgtggggtcccagaaagggtgattttcacacttcacatttggcgttagggctagtatttcacaaacattaccgtctggaacttttgaaggctgagttaaatgacttcatcttgtgtacttgtagaactgctattagaaggaggctggggactccctgatgatgtgaaccagcccttctcttctcagtttcagcactttgtgatcatatttataaaccttggacagggctccttggccttagagttaagtgaagagttaacactgtgactttagatgcatttttctcagtgtaagtgtctgagctcatctccagttctggactcgtgcccccactcccgggtgctgacagcaagctctgaagatatgctgagagagctccctgactctcctgactcaggtctgccagttgatgaagacagcacagttgttaccaaaaacaaaacctggcagatggtcctaggtcaggattagtggtcattctctggtcttctccagactggtgacacagggtggtcttaaaagagtcctagtccagcctctggctccccgaatttcctctggtgcatggggcatcaggaaagggcaggggagaaggagggggagcagaaaaataactgaggctgggcagaagggtcccttccatttcccatccattgcttcaaacaatgggtgattaccgtgcaccttgagtgaatgtcaaggcaggaagggttccagggccacccagtgtggcaggagcagagctgggatcagaattctggattcctgactctccgttcagctgctattcagctatcaccaagctgctgagtttgtcctactttctcctgggtcacattctgctgttgttgggaaacagggagtgagtgaagggaacctgggaacccttctcccctcaccttttaaggatgttctggggtggaataaagagaggtggagggtggggtgcctggcccagcctccctggctcctggtccttctttcttcagcagggagttctggcaaggcctgggcctggggagggggcctgggtgcagttttctcctgcggtgtggttggctcttttgtcttccaggatgggcctgtggggtctgtgtggggaaggaaggagctgggagcctgggctgcctgtgtgtcggctggatgctgccaggtaagcctgagagggatgtggggagggagggagggaggtcacatggagcttggtttcatgggggtaggttgtcctcccacctgtgccccctcctcaggcccagaacgctcctgctcatgagaagatggccagggagccaggtggctggaatgcttgctctgtgtggtcttggtgggggtgggtgggatggaatcaagaccattgtgggtgagctcgagcagagaatttagcaagtcccttcattcagcaccggcatggaccaagcaacttctctgagccagatgctggggacgcagaggtgaacccagagacatgatcccatctgctcagatcttcatgtcagaacacgctttattacagtctcggcaagggggtgagctcctcgtcctgggagcagtgtgtgtgtgtgtgtgtgtgcgtgtgcacatgtgtgtgcatgcctgtgtgtgtgtgc

SEQ ID NO: 28159 - DNA, 2300 bp, Homo sapien
tccgctgcactactgaagtagtgcaggacttatcagaacctttaaaatgctaatggcaatttcaaatactcagggacagggcataggatgaagtgttccttgacttttatggccgtagaatctttttctcatggaacatcgtttagaactgtgggagatgctaggctggggtttctatgggaaaagtacagcagtgatagaagatggcataattagggtacacttaggtgctttgtagcattggctgaaaaggaagcagaccgggtgggcgtgggggagtctcaacttggttccaggagccaggccagcttgatgcgttttttttttttctaatggtgggagggcaggccaatagttggagaaactagaggcctgacagtcggtgatggaagagatgtctactaagcacggttgtcagatcttttgcggagagatgcgggtgtgcgtgtgtctgtcagagtgtaacaggatccagccctctgggaaggggctgaccagaaccaggcagggggtttctgtctaggacaagtagggtccattttcaggggagctgaaatatttgcagggggtgctctgagacccacagccaataaatagggaagcaacatgcttttgggcagggtccatgtggttagggttgattttgatggggctggggggcttagagttagaccccctgccctggtcaggccccactccctggctggtgggggcgggaggcctctgaagctgcagctggaggggccggggcagtgttgcatggtgtgattaacctactaacccagggctcagccgggacgctgtggcgtgtgacgaggtgcctggccttctgccaaccaactaacccactaaccaggcccgagcatgccctactaaccacccccccgcagccagatcctactaactgtgcagctcatgggcctttcaaggggctgggatatgggggcagccaaggctccagaaggctctgcctatgggctgggatctttgtgcagacccacgttccaggacagagaatgcaaataagactcaccaactctgccacttcctgttgagtgagtttgagtaagtcacctcacttctctcaacctcagtttcctcagtggtagaatgcgagttctgataccttacaggttgcagtgaggattcccgtcaatataagggtctcagcacatggcagacacctaaaaaaaaaaaaagtatgaggatggaggaaggcccctcaaacctggttgaacacgtctgctgcctaggccctggcctctctgggtgttctgcacacagatccttctgcctggggcaagacacttggctttgaatccatgtcacttccccacattcttcctccgtctcagctttcttttctgtaggcagctcttttgttcgattactaacccgtctaacccctggggtgcctcaactgcaccccgatcatcccttaacaaactaacggacctgcgtgcgttcttccttttctcttagcgactcctgtgtgtgtctgctgaggtgccctgtccgctggtgctgtgctctgacttactaacccagcccctactaaccctgttttctcttcttactaaccccagccctgccgagctctgggctccccccgggggctggtccccctccttttggcaagcagatgacctggggctactggccctgtagacagatgtcccactttgctgccccatattggctgtaagatcagagtccactgggccaggtctaaggcaggggatggccctattaacaagactcagaggaggaagaggtggtcctgtggatgtgggaggctggactctgagtatgacatctctcctatgtgcagaagtctggttgccactgggagtaggtgggaccagggaaatctctgggacgtgagtgtggaggcctgttggtctagactctagactgtggagctctgagcttttgtgtcctctggaaggaagctggggaagaatcctctccattgttaagtgacggggatagaagctgtcctgcacaggaagtcacgaggggggcgtatcccacgaggaaggcaggagggggcgtgcccctcaccggaaattagcagaggggcgtgtcccacaccggaagtcagaaagcggagcctttcttacaccggaagtcaatgaagcgggtctttcctacgctaaaaaccactgagtggagtatttagtacacaggaagtcggccagagaaacatttctcatatttgaaggccggaaagagggacatttctgacaccggaagtcagtgagaggactctttcccacacaggaagtcagctagagagc

SEQ ID NO: 28160 - DNA, 2300 bp, Homo sapien
aaggcagccactagaggatggcaggcaggcacttccgggtgtagactaccccatccaaggtccctgccagcagccaaggcatgttctcaaagctctttctaagacatcttttctctcttgtgccctctgcagctcaggcctctggatcacccttcacccccactgccaactacaattggttagctctgagtccacagttgccagagaaaagggctctcagcaccagactagcattcaacgacccaagcaacctgcctctaaggtctgtaagccagcctttgacctgtccctaaactgatccaatcctccaggccctgccttgaactgtcttctcctgcagactctgactaccagactgagtcagcaaaaccttgaactagtgccaccttttacctgcacctggaatcccttgcgtatgctccctgcccctctactcccaaaggacgttccctcagtctaaagagatcaaaagtcccttccagaaaaactcccgtttcctcggtgcagctaaattgcacagaagagtttatgctagaagagctaaaagttagaacaggaagctcagataatttatactactaacatgtaaatgactgacggagttataacccttctgaatactctgatctaaagctttatgtcctagaacttccaaaacacaaagtccccaaaatgaagactctaggccctggcctggggaagggtgactctatacaaaatggcatatgctctgtagacaccagacaggtattttaaggtttataagagctgcatctacttgtgcaaactactgtagctataaggctatatttttttaagaactgaaaccaaatgcagactatgaggagtgaagatatgcccaatggccaaaaccttgcaagactggctatacttctgaccccaccttggtgggtaccactgctccatcaggcctggtccacaccagagccctggcacctcctttagaaaactaccatctttaccgacttctgattgttctgactcagagcagccaccacgcccaaaattgttagctatgcttttccctgtgttagtcaagttcaaacctgtgttagccaagttcaaacctgtgttagccaagttcaaagctgtgttagccccttcccagccatgccgacatccaagctgttaacagtaacgaggaatgttagacctgttgttagtcagaaaaaaatccacaaaccattagtttctgctgaaaggaacagaccaggaaggcaggagttagtcaaggtgaaggaaaggttaattaagaaccggtcagggccaggccaggagcctggaacccccagacagggccaggttggttgttagtggtcagcccctggggcagtcagggtgaggcagggattagctgggtgagagcaagagttagcgcaagggagccagagattagcccaaagaaaccaaggtgcctactggaggtgaggcatgaaatcacccccaggtgtggccccggcttagcggctggcgggctctgggggaggctggctgaggcagtgacgtccgtgggaacagagagccagagatgcattcctggccggcctgagcatctgcgggaaccctgtgagcccctgaggttcacttcttgctccccacttctctctcctgcaaactccgagcccggggtaaagctgcttcccctccccacaccccttttcaacccgacaactaacgccctctagcttccgggaatgggacggatctttcccaaggacttccggtcacggccccacgtctacttacggtgggggaaaccggcctctctcggctccagagaggggagacggctctctagctgacttcctgtgtgggaaagagtcctctcactgacttccggtgtcagaaatgtccctctttccggccttcaaatatgagaaatgtttctctggccgacttcctgtgtactaaatactccactcagtggtttttagcgtaggaaagacccgcttcattgacttccggtgtaagaaaggctccgctttctgacttccggtgtgggacacgcccctctgctaatttccggtgaggggcacgccccctcctgccttcctcgtgggatacgcccccctcgtgacttcctgtgcaggacagcttctatccccgtcacttaacaatggagaggattcttccccagcttccttccagaggacacaaaagctcagagctccacagtctagagtctagaccaacaggcctccacactcacgtcccagagatttccctggtcccacctactcccagtggcaaccagacttctgcacataggagagatgtca

SEQ ID NO: 28161 - DNA, 2300 bp, Homo sapien
atgtacatcattttacctaagatttacttatctacctatatccatccatccatccatccatacatccatccatccatccatccatccatccaacatcaggaaccttctgaaggctaactgcaccatatggtggatatgatggatagattttagtcctctttcgttgttggcactccaaatttgggatgggaattgtcattgagcagctattctgtgctatctagacgctttagacacattatcccacttaatcctaatgacggcactaagagctatagataacaatgtttataaggtaataatagctacgatttattgagtgttactatgtactggccactgtgcttagccttttatatgagatatcacatttaatgtccccaacagttttgagaagaactcttatttctttgatttaccattattgcccagcttcagaaaggttaagtgactagcccaaggtcacacggcacattagaggtcaaagcaagcctctttccctggtctttgtaattccaggttggtcactgtctgcttcactgtgcctctagctaactgattttctcttggagggaggcatgcgggctcccaacctcactagacaatcatgggaggaggaaagacaagggctttctcacagagttaactctccactccttgccccctggggaagggcaccccctcctgagcatcctgacaggtcagcctgcactcaaagtagcctttcggggggcccttgatggctcccagatgggaacgcacacagctgtcaggtgcttccgagagtctctggatcctaagagcactggcggtgtgcctgtaggattaattgcttctctggcttccagcagggaagcggggtgtggtaacatcttggcttggttaaggatgaaggggcaggcacacaggtggcagagagcatgcctctgtagcacaggatcagaggaaactatgtggctgagaacagctcctggtaggtagggaagcccatgaggacctcacttcccctagaaggaagatgtcagaagctgatgtcctttccccctgtgcagttctaaaattatgtaactggaagaggtgccacaggaaaacctgtttctatcatccttattcgttctgtgtggtcttcctccttgtctttcttacaattcttcttccacagttaatttttttcaggcaccttctatatctcatgctctggaaataccaagatgaaccatgcagaccctgaccccatggagttgagagtctggtggtggaagacagacatcatcaaacgctggcacaaataaaggcacatttatttacttgaggggttacatgttaagtcacggaggcacagattctagaggagccagtagcagggcctgagcttggtccagggttggccaggaagctctttcctgcagaagtaatgcttgcactcaggaccaaaagatgaccaggtgaagagtcacctcactccttgaaacctcagtttccttctttgtaaagtgggatgatagtaacacctacattccaggatatttgtgaggataaactgagatgacacaggtgaaaatgagtagtacggagtctggtacatagtcagtgcccatcgtatcatggctttggccatagtccctcgatgtgaagtgaagttcccatagattggaaggcctatcgttgacttagaaactgctgcccaagggacaaagaagaatgcaagcccactatgtgaaatggaagcacacagaaaaggaagggcctcactctgctctctctcttctgtgtgtgtgtgtgtgtgtgtgtgtgtgtgtgtgtgtgtgtgtatgatgagaagtttgcacagagaagctggtgtttaggccaggtcctgaatggtagatagcagtttacaagagaaaagggggaggaagggtgtcagagataaaaggaacatcaatgcaaagtgatacaaggatgagaatgagtgtcatccgccttgtcagatgcctggggaaattccaatgggcacatggaacagatccccaaacaaaacaacctttaataacacaatactattactcctaatggcaataacggcaaaagcaataatcacaatgaccacaatagcaacagccgttaccatgcattgacaggttactctctttcaggcactgtacatgggtaacttcacctgaaatgctgaaaataaatcttgctcattctttcctgggatatagtgaatgacttcatgccctacattgtatgggctacccacataggtgaggaattgaggatacagccatggaggatttttctgttaaacctcagaaggg

SEQ ID NO: 28162 - DNA, 2300 bp, Homo sapien
catggtgataagtactgcaatgacaatggcaaacaaaatacataaggcccctccgctcatgggacttacagacagcagatcaaacaagcaacaagccgggaaatttccaaaaagcttgatgaataaacttgtctcttcctttgaacgagtcactgtccatttgacaagacagaaaagtcagtaaactattaccatgtaaactattaagcactagaatgagatgcctataggcagctcagataaaataccttatccaacctggggttggagacaggaagaagataagagagggaaaccttttcagggcacaaaatatctgagctgagcactgaaggtcaaatagtttgcagagggagagaagaaaagcagggatggactatgaggcagaaggtacaataaccagagtagggaggcaggaaacagtatggtgtcacactgacagtaaaatgtacttctacatattattggaaaatagagtggaagagggagaggcagatgaagggcttaaagtaaccaggtcatgaaggagttcaactgccaagctgagatggtcggacttgactgaaagcagataaatagtgagctatggaaagtttcagcagcagagcacagaatcaggttggcttttgggaattttagaatggtggattggctgggttgagaccagaggcaaggagcccaggaggagactgggtaacagcccaggagaggagggatagtacccacactggggcaatgtggggagggggataaattatcccaatcttggaattatggaatcagagaattttacagctgaaagtaacctgggacctttaagttgcctccaccccttttcacaaaagctggaccttagagaatgggggtgacgccatcctgtccagtcttacagcaggtgagtttaggactagggactgaaatcaagatctttatattcttaatccttaatctcacttcataacctcactctgtttcctaatccccacaacttgactaataataattattattattattactataatatctaataactgagtcttttccatttgctgggctctgtgctgagcacattaagtgtaaaatctcattaaatcctcccaacattctgaaggatgagaactccccattttacaaataagaaacctgaggctcaagaggtgaagcaatttgaatttgaacctcaggatcctcgtggggatcatagcagcagctctcgtgtagaaccgcagtaaaggctaaatgaataaggcatacatgtgcctagcactgtgcctagcatgttgaaaggtcttagcaaatgacagtgacaatggtgatgatgatgacaatgaccaaggacaaaaatggtggagagaggtagatccgtacctgggccttgactccactgtgtgacttttggcaaagcacctaattctctggggttcaatttcccccgtctgtcaaatgaaaacagtactctagggccatggttctcaacgtgtgttgcctgggctggcagcattagccgtcaccagggagcttgttggagatgcaaattctcgagccctccctgaatggactaattctgggactctgggagtgggatccagtaatctgtgtttcacaagccctcctggtaagtctgatgcatgttcaagtttgagaacctctggtctagattgctaattttgcattttttgaaatgacatcaatacttccttctatcaaattcatgaaaaggcaggcacaggaagcagatcagagctgcagcattaagggtgaggcagccaccaggacccacggttctgttcactctccccatccttgtccccctgcttggaggctccgcagggccaggtgtgaaggccaaggtgatgctgtagcctctctgctctgcattaatgcctcctgctagccagagcccatgctccacaacagcctccctccctcccactcagcctcccttcctgtttacacattctgtaaagtatgaatttgttgtggcctcatgaaacctggtctatttctttccttattttttttttaaagaggcttgagactgtaattcggttaactatttcccagagccccggttttgtggctacagcacagcacgaggcagaggaacggagacaggtcctcggaagcctctttccagaaaatctaatttcatcattgagaaatcttctgtcttaaacagcctccaccaccgccataaatttacatattctatatgccgccggaacggagtgggccctatttgcataatgctgctggaggggctcacgctcctcttgaacctgaatgtagcaggagcg

SEQ ID NO: 28163 - DNA, 2300 bp, Homo sapien
agcttctacaaatcttttttaaatgacaactagcacatactacttttctctctgcctttcttcattttgctgccctgtggacttggacatgttacctcaggtcttcatgcctcagttactttatacgtaaaccaggagcacaacctacttcaaagagttttggtaaagattaaaagattattgataataaatacaaggtgtatttaatgagataataaatttaaaatgcatactttggtgtctggtgtatagtagatattaaacaaatacttttgttactgtccatgtgaacttaaaaaagtcacatgaatcctctgagcctcagaggttttctccattataaaatgagaatggtcttcttataccagatttaaatctaaattatccaaagatctaaatgtaaaaatgtaaaaataacaacaaaaccatataaacattagaagaaagcatgaatagattcctgtatgactaaagtatgggaaaaacctttctacttatgattcaaaacataatgtaataaaaaagactgataaatctgaatgcataaccattttgtaacaaacatcgaaagtgaagtcaaaagagaagctggaagaaaacatttttaatctatgtcacagataagtagttgatgtccttaatacataaagagttcttaaaaatcaagaataaagaccaaaaactcagtttttaaaaataaggaaaaaacgtgattagatggttcacagaaagagatgtataaatggacctcaaaatgtgaaaaggtgttcaactccatgcacaagagaaatgcaaattaaagctacccaaacatagtatttcttacctcttagactgacaaaaggtgaaagcttgaccacatactctgttggaacatggcgacaatgtagggaaacagattatctcatacattgctggtggaaatgcaaatggggtatttgaaaatatctaacaatatcacatatgtgtttaccttttagcccttcaatcctacattttggaatttacctaaaaatatacttctgcaagcccagaacaacaaatgcatgtggttattcattatatcatttgtagtagcaaaatattagaaacaacctaaatgcctactcataggagaccagttgaacaaactgtgaatcttctggataatgaagtactaagcagctacaaaaaaattgaggataactgttacgaatgaaaatgatttctaaatctttttttgctttaaatgaaaaagcaaagtgcaagcgagtacctatggtatgttctcttttatctaaaaaatatggaaagctaaaaatacatgaatatagagtcatagaagtaaaaactggcaggattcacttatgggtaaaagtgactatagagagtaattgggggcagggtgtggtggctcacgcctgtaatgccagcactttgggaggccgagacgggtggatcacaaggtcaggagatcaagaccatcctggctaacacaatgaaactccatatctactaaaaatacaaaaaattagccgggcatggtggcgggcgcctgtagtcccagctactcaggaggctgaggcaggagaaggatggcatgaactggggaggcggaacttgcagtgagccgagatcacgccactgcactccagcctgggtgacagagcgagactccgtctcaaaaaaataagtaaataaataaattaaaattaaaatttaaaaatttaaaaaagaaggtaattgggaatggggtgacagcatggagataagaatgagactgctcttgggacttctttgtctataatttatactcttgaatcatataaatattttacagattcaaagatgaaatttaatcaaagatgttgaaaaagacaccaaaccctaaaattgaaggcaaatagaaacaaacaagcctaactacacatcacgttgataactctgctaggcaggcttctaaagtggcccccattgatgctcacttccggatactccagcattttgtttaatccttttcccttgaacgttggctggacctggtgactcacttctaatgaatgaaatatggaaaaagtaatgagatgttactcctgacaattaggttccaaaggggtgtgacttctatcttgttggtattctgtctccctggtgcttctcatgtgctgagcttgatagagaaggtgacctggcaaggaactgaaggacatctggcaatgtactgagtgaggaactggggcccacagtccagcagtctccaaggaatcaaatcccacaacagccatgtgagtgagcatggaagtagatcttccccggtcaag

SEQ ID NO: 28164 - DNA, 2300 bp, Homo sapien
tcagccttattaattcagtgtgctcagctgttggtatctttgagtcttagggattgttctagagatccacagggtaggctggaagtgccaagggattttcctgccccaacccaaagcagctctcagctagtgactcttgggagatggtgtatcaataccccagctccctcactcctcaggtgggatgaattctgaagcttggattttagggctttctagaatttgtctgctggagtgagctccagtcacccacactgataactggctttaagacataccctttattggctggattatttctcccactcccatcttggggcttcctggaatcccctccccaaaaatatttcttgtccctagttccttatctcaaagtctgcttctggggaaattcaaactaagatagtatgtgaggaggagagcaatgtggtcaggtttgggtttctgaggaagggccactctttttgtccctgtggttggaaagagtctctgaaatgaacaattattagttatattttcatgtcttagagtggacaagagagagagaagacagccagttacgatattcccagatggctaggacacagaccattcttccagatctggaaatgctaacaatgtttcattaccacagccctgaccagcttgaagcaaccttcctcatacccaaatcaaatacctgtgtggagagactaaatctgtctaaaggcgacacaacccaccccgactcatgtgttcatgcatgcactcaataggaaaacagggccaggtgtggtggctcacgcctgtaatcctagcattttgggaggcctaggtgggcatatcacctgaggtcaggagttcgagaccagcctggccaacatggtgaaaccccatctctactaaaaacacacacacacaaaattagctgagcatggggtgggcacccataatcccagctacttgggaggctgaggcaggaggatcacttgaacctgggaggcggaggctgcagtgagccaagattgcaccaccgcactccagcctgggtgacagagtgagactctgtctcaaaaaaaaccaaaaccaaaacaaaacaaaatatatatatatatgaaaacagaagaaaagggcactgcaagctggaaggtgtcctaagagaggatggcacagaggggatctcctaaattagcctgagctttcttccagacccttccttccaggaatgctaacattgttagcatttctcctaatgcatcctgcagagctcaaatattttcagagtgcctactttgtgtaaccacgattgcacctctggctattttttaaagtccaagaatagcctagatcagccagatgcttatagatcctgccaataaccaggcccagctttgcaagagctttgcaagaggtcaagctttgctttgcaaaggcccagctttgcaagaggtcaagatgctcctggccctgctggctcccagagagccttcctctcctcccctaagcctcacaactcccaggagaagattctgcagatggaagccccgaggtccagggaggttccaggattcacccagggttgctctgcttgataggtgcaggattcagggccaggaggacccagatccaaggcacctggtctggcatattttcaggcccagagatggggaatgatctgtccaaaggggacttctgatgaaggaaaaatgagacagtattcattgaatacctattgcatgccatggggtgacggtgggcagggccacatggtccccagctgctatgctctccagagggatgatcagatttgtcccaagtgtcctttacatggccaattgccatgcgtgtctcattattcaaaaggagaaattaacatttaatagaaaagaaaaaagaaagagatggaggaagatgggaggatgggaaggaaggaaggagggaaggaaggaaggaaggaagaagggagagagagaagagaaggagggaggaaagaaggaaggaagggtacagggaaaaaggaaaaaaggaagagaggaaggaaggaaggaagggagggagggaaggaggggggagggagggaaggaggggggagggagggaaggaggggggagggagggagggcaggagacaaacctcggaagggctgcccctcagagacatcaagtggaatatgaatactgatttctaaccccacttccaactcctgagtgctttacgctgggctacaaggttctcaatgtctcagtgcctcagcgttctgatttatcttatggaagcctgcctcatctattcatatattgcattcttaaacacagaataac

SEQ ID NO: 28165 - DNA, 2300 bp, Homo sapien
tggaccccatttttgatgggggtaattttcatttttaatttcaaaaaagaaaaaatatatatgtctgtaaacttccacaacaggaaggccccgggaaaggtcttggatctgagcttgctctggctgagttttaaagttgttgttttttcttgtttgtttatttttaattaaaattttttttgggcggggggcaatttcttaggaattctgccgctaccccaaagttgagcccatttccccccacccccggcatgtcggttctggcatacttagcactgccttcctagccgcaactcaggggagcaatgaatctgcgcgtacgacatggtaactttttaactcctgcccgcgacggtggagtgcttaatctaaggtttttaaataaaaagggctcaggggttggttttattataacgtttatttcatttcagatttcatgcgtaatttagcaaacgctagacagactcgggcgataaacactttcttttgtggggggggaaaggcattttcatacaccacgcttaattttatttagatttaatagcgatatcaggggcacttcaaagaaagttcttttttcgcccttctcctaagaatgcgaatctgctagcaaaatcgcctcgtgctattttatggcaaggaaaattaaaggccttctcccccctccttccctacacacactttagggaggaacacacacacacacacacacgcatgcacaaacacacgcacgcaggcgcgagcacacgcacacaggcgcacagaataaacacctctatcctccatcacctctaacttccaacttctaattgcaagatagatttcagcctctgtggggatcaggacgatctaaacattttaactaagattattgggataaatatttcataaagagcagggcagatattaaattactcctattgattttagtatcacagcccaattccattcctcggcctcttcagtttaattgatctcttaaggaggccaacttcgcacccgcagagggtctgggtcttggaccgggtggcccagggcaaggtgtgcggcccggcgggtgcgccctcttcgtgcgtgtcttctcggggttcccagccgcctcgcaagtcgctccggttactgggctcaaccgatgtgctcccccataaagtggctgagtgactgtgactccttggagcccacgccggccggtgagaaccgggaaccccaggcagtggggaaggggaacaattgtgaacgccctagtgacggaggagtgagcaagcgcccaggtctctcgaggagaaccctaacttcgaggttccccgtctgctttaccctccaagaaaatcccagggccggctaacttgggcgccgctagcggagaacggagtgttcaccccggagccgaagtgcagtagacacttagcgactttccgtggcgagtctagggtctttgcctggcgacctcattgtctgagcgccccgtaccgctcaccgcccacctccccgccccctgcccacccggtgggtctcgctccagttgggggtggggagttgggaacagtgtgaatgggaagggggtgaacaaagccaagctcccgccattctcctccgcctgcaccctctccagctcgatgcgcccggaggccggggcgcgcccccagcgcactgacgccggaccccgaggagaggcgggcgcaggggaccccagagctggggtagtgcgggttcgtggcgggggcttcggcagccaggaccccggaccaccttaagagcgagccccgccccgagcccggaacttgggcggcgctgattggtgcaaatgtaatggctgaaattgattgctgaaatgcaaaacttgttgctgcttctcccggcgctgggcgagaggcagacacagagaggggagccgagaccctcggaacgccccacgcagagcccccccgctagtcgggagaggggtgcgcagaccccccagagctgcccccgcgcccccctccccccattccgggctctgagagcgcagcgggaacgccttagcctgctcgcccggcgtggccccccgacccgcgtacgcccccctccctcaggtccgagagggactcgcgaagcacctcagcgcggaggcagggaaccggagccttggagcgacccaacccctcgtctcgctgccctcccgcgcctgcaacggtgcgcggagactccggcgaactcagacacccaacggcggagaacagaagcggcaggcggcggacgtggccgcgaagctgcgcgccgaacgcagcgcacccgctgccgagcagaggagccgcgccttt

SEQ ID NO: 28166 - DNA, 2300 bp, Homo sapien
ccattctctgttggcagttaacaggtacttcctggggtttgagttacctgttctttgcttgcttctttctttatcccaactagactgattctttaggagccagaactgtgttagttctcttttactttatctgtttccttgaattacctcttactaataacgtctggtgtgctaccttctatatggtggctgttcaataactagattttgattgagggaaatgatgctgaaagtgattatttgatacaatgttaaatactttcaatgtttgaaaaagaaaatgagcttgcttttaggttttaattccaagcctctgaccagaagaaaatgttttatggtgttacaggtttatttatgttaatagagtagcttatttctcattgtgaatccaggtcttgaaaccacctgtacacacagttgattcttttgtcaatcagaagtggagttattcatttttaggatgcagttcaaaattgtagtttaagaattcacacttgctgacagtaactgatctttctgctgctttgcccagacataggaagtaagtccagttgtccagctccttgcagactgtccatcccagtttgtcgttcctgggtaatgctgatgcctgtggctatgccacattgcatattgtaaagcattaagacccagtatagccagacctatttgctgtttaatactttgagcttattgttggtcctttttgtagacaacctttagagaggcttcaagttctgggtcacatatttacagacttatctttctttaaagttttgttttctctctgaactgaacatttttccttcctcacataatttgtaactttctctttaggaattactaacatggcatatgcacttactgagtaactgttgagttttgagtggctgcttctcaacgtgttttgttgttgttgttgttgtttgatttgtggaaagttcgtattatactgtggagcatgttcagttcttgcttttgctcatactgcccttatctctagaacagtgatttttagttaaggtttcatatctgactcatctgggcatttttcactaagtatggggtctcttcacgaattctgtgaaggaccccagagtcagaaagtctgctcaagaaggaaaggactctccctgctgtctctttctttgcagtgttttaaactgaccaaccgaccacggtcaagttattgttgcaagtctctcttattgttattaatctgggctctagctcttcaaaagtaattttatctttttttctggagagagagagagtgtgtgtttgtgtaatgacaagagaacttttgtaaagcagatagattttaaaagattttcttttttcatttcctccgttctgtcaggaaaaagatatactaagggaaacagaatttacacacactagaaccctgaataaaaccttcattttagagcctttcccctgtggtatataactgaggcagtcccgtgacacccctccttcgcctcctttgacagtgaggggatgacgtgagtgcagtccttctatgaggaagacaagccatgtgtatcccagggctctcgaacaagggtttggagaagccagtcaagaaactgagatgtccaccacagacccagctgtaggaagaggttgggggtgctgcagaatcgatagttctgattttgttcccagccacagtagttgctctggccagcattaacagtccagtgtcatcatctacctgtagtgtcaaaactgggatgggtatgttttattctttgaatgtgattatccatatatcaaaatgcttaaattatttaaaaaactgttgaaagatttgttattggagacagctgtccagtaaccagtcagaatggattgctagtccaggacttttattatttcttattatgtagttatttagcccaaggtaaaagtttaaagcaaaggaaaccaaactgaaaacagtgtcttaaagaagcatttttctacttttacgcaaaagcacagtgagtctaattgatttctgtcctgtgttttggtagctgcgaagagctattctggcacggttaaagaatattctctggttttcttctctgcctctgactttgttttgctttgcaggactacaaagctgatgaagacccagcattattccagtcagtcaagaccaagagaggccctttgggacccaactggaaggtactggatgctgacctttctgacaggcagagtcttggcaacagaacacttgacaggtcctgagtcttgaagagctggtgacgtttaagtgaaaaatagaaatggcacaaaaatagttttat

SEQ ID NO: 28167 - DNA, 2300 bp, Homo sapien
tcctttgcaatatgttgattaagagcattcttaatttatttgaaggaaacaggcagcagctgttcttccatccctcttccctagtcccctgaaaccccagtttttatcagtagtagtcttggtcagctcctcccacaactgctgaactctgatgtattttgaagttcgcatatgtgcaatagagtaaaaggattggacacccaaagatgtgttttggtgtgggtacttacagggaacaccactcatacattttctcatttgttcatttaataaacatttattggaacttactgtttgttttgtgttactgtggataaatctttctccagttaaaggaacaattgtatctgtctaaagagagtgagtttcttaatcgcggacatgctgaagtgtgtataagtgacttacaagttccaactgttggttgtgtagtatgtgagtgctccttcaccagagggttatttttccttacagctgatacagaccagtgctgggcaccaggctgcagccatagtcaaagttcaaagactaatcggagccacgagttttggagttttgcagtttactaaatgaacagacattttaattgcttgtcaaaggactataatgggattgttgggcttatctaaactgtttctgagcagctttgtagaagtctcaggttaatctttttaaggattgtgatgtcaaagaaactgaattggtctttaaagtttgtactttttgcttgttctttatttggtgagtatgtcttggtagtaagaacagtgtcctgttttagttgagggcaggaatatactaagccagtacctgttttttgaaatttcagttgcctttgggaatgaacataaatgatttgcttttccatacatttagttcttttcatttcgaacataccattccattttttgagtttttttagtgagcaatctgacacttcttaattgttttaaaccatgggtgtatattgtttaaaaaaaaggtattttgctctttttaaacatattattttctaaaagttggcaaactgatgaaacttggtttaatttatttggattgaatcttaggggcatgtaagttttggtcacaccttaagcagtgcttgtctcttgtgctctcagaaggatttggtgtatcttttcttttgatcatacattctctgagacaatgcccagatgttacatacttgtgtagatagtcttggtaacacatgctttactaaacttcgtcattgcactctctaaataatctttataatattaaaacttttttcttttcaaaatgaaaaagaatgatggaacatgaccagaaaaagttaaatattggttgaagccatgtgaagttgttagtatttgtaagcttttgagctacagaaatgacgttttcttatgggtcaacctaatatatcctccaaattaatttttggtagatgataccctaaatggtcagcagtccttttggttctctctcacagctttcaagaagctcctgtgttttagatgttacatttgttccaactgctgctgcttatttcctaagaagggctttctgcttcttggagctgtgcagtggctacccggctctttagacctgaaaagagcttttgtttattagaagtctgtggctgagatccagccagtcctagccgggcctatggttgccaaatgctgctttggttgttttcttcagcatgagcagagacacacttgatctcagtagagtaccatgtctttttgctgttaaaatgaacctagacgttcatttctgtcttaaaaatgtgttacttatcactagggtgtgtgatccaaaaactctttattatgtgtgcataataaaaacatgagaattgtgacccagctcctaactcaagatgaatgcatgtgatagtagctttcctgaacttagggagaaagcacctcaaatacacgttttgtggtagcagtgattttgcttatgcttaagaaatttctgtttgccaaacgcctgtctcatcttgcctttactgtgaaacagactgttgtcaaggtcttttgtagtaagttagagatttttcccccatcttcaaagaagatataaataaatgtaggcatgttttctattaaaaagaaatgtgaaaatgtttcctacattattccactgccttacatggtcacacactttcagatcatttccagtagtagatttagagaatgtccactatattcgaaggcatggttggatagtgccctcttgtgggaaaacaacatattgcttatgtcgtgcttgcttaaacattagcaaggattttaaaattttattaa

SEQ ID NO: 28168 - DNA, 2300 bp, Homo sapien
tgtgtgtctgtaacacttttggagggaggaaatactccaatgaaagaaaaatgactggatctatttaaaatcagttctgcaactcacttgctgtgtaacttggtccaagtcaatttccttcttattttctccatttgttttagtgtctgccacccatctacccacatcatctagaagtcagagtaatgaacacttgtttgatacactgtataaacgacttggaagaaaagttttatataaacccaatattcagtactataaataagctttaattgagaattttcactctaccaaaaaaaggcaaaatgtctcttctcaaaatccctgtcactgaccaaagttatcatttttcatcaattcattaacaaatatttactgagcacctattacatgcgagggactattctaaaaactggggatatgagagtgagcaaaacaaactcatggcccttacatgtaaaaagagaacacaactagtaggagaaaaataataataataaattgtattggcatgttggatggtgataagtactatggagaccgataaagcagggaagacaaataccaccccaaatagtgggaactacaattaggtcttcagaaagggattccctgagaaggtgacgtctgagcaaagacctggaagaaggtgagttagtgtgccaagggaagaacacttcaagcaaagggaacaaaagcaggtggaaaggtcttgaactgaacttattctagagtagcagaggaacagcaaggaagcttgcgaagatggaatgggcaaggaaaaggtagtaaatgagatcagggcaggaaaaaaaagtgtaaagccttgtagctgttgcagaggctttgacttttattctgggtgagacagggagtctttgggaggtattaagtctcagagaagtgcatcagtgactttttaaaggaggtttaagaacactaaaaataaggtgtctgaaaaaagctaaattaagccaaaaatatttctaagaatttaaaatgaagaatttgaaaaccaacgaatgggccatactcgacctccctagctgcccaaaggatgctgacgacacgaaccagctgtgacagacgaacattcagaggcaagcagatttccgtaatgtttacagtccttgccagtaggaaaagccgtgacttttcaacaaaatcacttggccagtcggatgcacctcgaaatccctccatttgacagagcacgtgttaacttctaagaaagtaggtggggcccgggatgtcacctcatcttaaaacatgcggaaaccaaaaagagaaaaggctctcccgtcaagtcagcggagctgcccaggagagcggaggctttccggaatcccggctccaccacgaacttcaaggcgccagcgtcccaccgcgagtcctgacacgagggctgccttcaaccggcaagcccatctcccgctggttaccaggggactccaccccggacgacaaatcacagtcagaaccaacgtgtctctcccaccctcggactgcggctccttcccaccggcgggcctgggggtgggcccagacccagcctgggggtggggggttggggagaaggcgggtcccagcggaaactcccggccgcgccttcccgagccatgcgctcgggccgggacccagccgccttcgccccggggaagggagagggcgtgttaccacggcaatgcctggagggccgaggggcgcactcgctgaggggcttcgaaggggccgggggagggagggggcgcccgcagggaggggctgacacagggctgactccgatttaggaatatcctaccacttctccatcaacaaatctcccatcactgccgtcccacggcctcgctcgcgcccacagacccactcacaattccttgatcagcaccatcttcccggaaccccctcacagctgccgccgataccaccgccgccgccgccgctaccgcctctcacagcgcctgcgcggccccgcctccctgcccccccgagccaccatcgcgcctgcgtgcttacacccttccgccgcgaccagtcgcgtcagcgcgcgagggggcctagctccgcccagtttcgtgccccaccccgggcacacgaggcctccactgcggttgcgcagcctgccgaagagcgtgcggcttctactgcggctgcgcaagctcgacgcgcgcactcttgtctgcttacgagggctcctcccttcagctttggtccctcggggcgtctgggcagcctacgctttccggtgagttttccagttggttctttggaagccgttttgcggtgactggttttctgct

SEQ ID NO: 28169 - DNA, 2300 bp, Homo sapien
caaacatctgagtactatctatgagaagaattgtgttatgcagacaaaagaactagtgaacacttgtgggagacttcaaaaattagagaaattacgtaaaatgtcctcatgtttcttaatgataaagcatgtcaaccataaatttatctgcaacgtttaaaaagttatatttttcaacaagcataacatgtggggagagattataacatacaatgactccataccacataaatttggcaattaattttaatattgcctccttagactttaaagaacactccctaagcatacagatttatagtactcaatctcttaatttttctaaatatcttctagaatttgactttagtctcctttccataattgagaataattatttgtcataaagatggtctgcacgccccaacttcactttcatctaggaaattagtgaaataaatggaccagaccttgaagtttttaaaatctggacttgaaacctggctctgcaaacaagctagtacaagtcacttaacatagctccctgaatctcattttattccccctcctaaaacatgctaaaatacatctcataatgttctaagggtgaaatgagataaaatatctccattacttagcacagtacttggcataaaatccaatgtccaatcaacaaagcggattctaagcttctcaactcttgcaagaaagagcgtgtatttccttaaatctctgccctcacaataactagcactagtcacacataagagaaactcggtgactccagggactgccttaggagaaagtttctggaagttctgacattccagaaactttctcctaaggcagtccctgggagtcactgagtcagtccatttccgttatttttttggaggcagccctaactccacagatgtattccactatcagatacaccagatgtttatacaaaaatgttttcgtgatattttaatcgtcttaatagcctttcaacaggttctcatggttcttagaagacaaattctttactatggcctagtaatccagttggtcccagctcatttcccaccctcacttaggatgttctggccacatctgccctctagctgatccttgaacaccctaggcttactccatcctcgggtcatatttccctccaactggaatgcccctctcacatcctaacaggctaggctcaaacaccgcctcctaagacagcccttgtcttgagtcctctgcttctcccagtactccactgtattcatagcatagcacttccccaccaccccaaattctccctgctttctttccaagtgagttgtctcctctagactgtgagcttcttgagaacagggactgtgtctgcttctagatgcatccccactgcctagaaccgtgtctgacacagagcaagccagcgacctccgggctgcggctttgaggcccacggcgctttcggtgtaactgcgcgaaccaactcctgaacagcccgctttcctgggtctcgaggccaagggcctcttttctcccagagggcctccgtcgggagtgctggccgctcatcctgccgagtcacaggtgaggtttaggattctccgccgcggtggacctccacgagaccgcgaagcaggtgaacgtcctcccgcggaacctgagctgccaagggctggggaggggaacagaagctggcgtcggctgcctccagaacctgtcaggagtcttttatgtggactatggaggtgaggtgtcggtcaaggaggtgggccctgactcggagcagtgagagagagcagaaaaccagtcaccgcaaaacggcttccaaagaaccaactggaaaactcaccggaaagcgtaggctgcccagacgccccgagggaccaaagctgaagggaggagccctcgtaagcagacaagagtgcgcgcgtcgagcttgcgcagccgcagtagaagccgcacgctcttcggcaggctgcgcaaccgcagtggaggcctcgtgtgcccggggtggggcacgaaactgggcggagctaggccccctcgcgcgctgacgcgactggtcgcggcggaagggtgtaagcacgcaggcgcgatggtggctcgggggggcagggaggcggggccgcgcaggcgctgtgagaggcggtagcggcggcggcggcggtggtatcggcggcagctgtgagggggttccgggaagatggtgctgatcaaggaattgtgagtgggtctgtgggcgcgagcgaggccgtgggacggcagtgatgggagatttgttgatggagaagtggtaggatattcctaaatcggagtcagccctgtgt

SEQ ID NO: 28170 - DNA, 2300 bp, Homo sapien
cgcgcagttacaccgaaagcgccgtgggcctcaaagccgcagcccggaggtcgctggcttgctctgtgtcagacacggttctaggcagtggggatgcatctagaagcagacacagtccctgttctcaagaagctcacagtctagaggagacaactcacttggaaagaaagcagggagaatttggggtggtggggaagtgctatgctatgaatacagtggagtactgggagaagcagaggactcaagacaagggctgtcttaggaggcggtgtttgagcctagcctgttaggatgtgagaggggcattccagttggagggaaatatgacccgaggatggagtaagcctagggtgttcaaggatcagctagagggcagatgtggccagaacatcctaagtgagggtgggaaatgagctgggaccaactggattactaggccatagtaaagaatttgtcttctaagaaccatgagaacctgttgaaaggctattaagacgattaaaatatcacgaaaacatttttgtataaacatctggtgtatctgatagtggaatacatctgtggagttagggctgcctccaaaaaaataacggaaatggactgactcagtgactcccagggactgccttaggagaaagtttctggaatgtcagaacttccagaaactttctcctaaggcagtccctggagtcaccgagtttctcttatgtgtgactagtgctagttattgtgagggcagagatttaaggaaatacacgctctttcttgcaagagttgagaagcttagaatccgctttgttgattggacattggattttatgccaagtactgtgctaagtaatggagatattttatctcatttcacccttagaacattatgagatgtattttagcatgttttaggagggggaataaaatgagattcagggagctatgttaagtgacttgtactagcttgtttgcagagccaggtttcaagtccagattttaaaaacttcaaggtctggtccatttatttcactaatttcctagatgaaagtgaagttggggcgtgcagaccatctttatgacaaataattattctcaattatggaaaggagactaaagtcaaattctagaagatatttagaaaaattaagagattgagtactataaatctgtatgcttagggagtgttctttaaagtctaaggaggcaatattaaaattaattgccaaatttatgtggtatggagtcattgtatgttataatctctccccacatgttatgcttgttgaaaaatataactttttaaacgttgcagataaatttatggttgacatgctttatcattaagaaacatgaggacattttacgtaatttctctaatttttgaagtctcccacaagtgttcactagttcttttgtctgcataacacaattcttctcatagatagtactcagatgtttgcgaaataaacgagacagtatgctggatggagcatacctccaaacccgtatacaatatagacggtgcctcgctttcctattgtttaaaaaaattatttgatgatgatacttgttcaagtatagtaaggcagactttattcaggaccttcgaaataagtatacggaccactgtaatgggattttgtagtgggggaaagagattgggctcaactctgaacatagcatgggcaagtaagaatttatagccaaggagcaagatagttaggggtagggcgatcagtggatggaaaattattaagaggatatacatcagggagattctggcttaagtaacctaacataattcttgctgaagacgtgatcagacatcatctggggaatggtggaggatgaagaacagataccaaggattggggaggttcttgttaaaactagattttttaactgttgcacagataagcctaggcttgactaaagtttggttgggagtgtatctttgtcacaatcaaaagattcatattaaaatactcaattgagaaacaaggatagataaagtaaccggtttagatgtatttattgacggaaagattaggttgctggaaaacatgaaatctatataataaaataatcctacattacatctatttacaggataaaaatggcagaatgaaagaattatgagtggaactagagaataggaaagacatgaaccaacgcccaaaatgagaaagaaggacatataaagaaaaagacaaatacaagtgaaaaaaatagactaatggattaacgtccctgtcgtgtgacattttctggtatgacagctgaagatgttgaaccgtatggtgcagttt

SEQ ID NO: 28171 - DNA, 2300 bp, Homo sapien
catcaaagacagcccgagccagcacagtggccggccatcgcccggctgcgactcacagacttcccagctggaccagcctctctttaaactgaagtaccccagctctccttacagcgctcacatttccaaatcaccaaggaacatgtccccaagctccggccaccagtctcctgctggcagtgcaccctccccagctctctcctactcctcagctggatctgctcgctcaagtccagcagacgctcccgacatagacaaactgaaaatggcagccattgatgaaaaggtgcaggctgtccataacctgaagatgttctggcagagcacaccccagcattccacagggccaatgaagatcttccggggggctcctggcacgatgacttccaaaagggatgtcctcagtctgttgaatttgtcaccacggcacaataagaaggaggagggagtggataagcttgaactgaaggagctgtccctgcagcagcatgacggagctccaccgaaagcccctcccaacggacactggcgcaccgagaccacctcgctgggctcactgccgctgcccgccggccctcccgccacagcccccgcgcgccctttgaggcttccttctggaaatggctacaagttcctgtctccaggaagatttttcccttcttccaaatgctaaagcatcttttatacccactgactctgagcagcctgcagatgggggcctggcgtttgcttcagcccttccctgagtgcagtccccccacagccaccagcaccctcatgatgctgtgctctgcaggcgaggggcaccaccacgtccaaaggctgccacacacactggtggcttttctgggccacattcaccaaaagccaggacttctgtggggctggtacaggaggctcatggaatttcctacacacttcaccaaatgtttgtttacctttgaactccctgcttctcatctttgatatgattcttcaccaggattttgtacaaaaatgatcatggttctggggtggggagaggaaagggagcacatattttgctaagaggtatatatgcagtaccttttatacacagaaatacaaatagagctttttctaaggctttcggttgctggttgggggtgggatatatgaaatttcagttgaattctacaggaaagtgttatattagccaaaaacagaaaaatggtttttaaaatgccaatgatttgtaattaaattgtagcaattttggtctcatgatagtgtaatatctcagcaacaatgcaataattcacattgaaacagcgcttccattctgaactctgctctgcaaatgtcttttgggtcccgctgtcaaccaaacttgaattttcttaaaaaaaaaattatgtaactcttatccaggcattttagaactatgcaattgtgatttaaaatgcaactttgtgcttttaaaacattattgaccttttttgtatatggataaacaacttggttttattatcaatagtactttgcatttatagctattatttttaaaagctcaaaaagttttttaaaatgtcaaattttgaatagtcatcaataagtaattatcaagtttggaaggaaaggttgaaatgactccgtttccttataagcaaaaaaaaaaaaaaaaaaaaaaaaaaaaaaaaaaaaatttccatggctaactagatttaaccagaatcccgccttccaggctcctgttcccttttattagctgctgaattttattcccttttcccaactccaggtccctcagttgtcttatatctaaatcctttgccaggtccccacaatcccagcacctgcctctgtgagctgcccccaggccctcaccttggccctggccagcctcctgtgctcctgctgtctgaaggactggcccctcccccactgctgaagccacacgtacagatcctaagcaacagggccttttgctgggacgtatgcctggattatggccaaccgggaagagagagatgtatcttaaaaagtggaggtggacttctcctacagctctgacggtaacttaaattgttgccagcttgaggcaagacaagggaatcatctagttaggggtaaccattaatttattttataaagaaaggaaatgctgaaagtcgtattagtactgagtttagttggagaatttagataagtaagtatcttttaggtaattctaaaattaaaatcctacccacctcactacagggttcctcatgaaggtgggcggccacctggcctgggccaccagcagcacatggagcagacctgaggggcctggcaggggg

SEQ ID NO: 28172 - DNA, 2300 bp, Homo sapien
ccttgaggtggatggcgaagtggaacccggttacatcttagagcctcacagctcgaggaattacccactcaagtgtccatttcctttcagatttcagggtctgtggcctctcctcaggggtctgtgtgtgggttcacagagtgacactcactgaaagctggttctgcccctgctgtctggtggacctcaggaggtcaaatcaaggacgcaagaagggcggagcaggaagaggggaggcagagcagagaaggggacgggccgccagtccagcagcagtgcgcacccgcgggggcgccgcagcccgtgtggctccgtttgacagcacgtgcaccccgagctcagagcctgcccaggggaactcgggggtgggtgggttgaggggctcacctgacaacagttgctacttaaagtagtactcaccattccaaccatatttttaacagccttcggccagcagattataagaaaaagaaagaaagagagaaagaagagagtttagactcaagcacaggctgttatgcaacatgagctgatcactgtttaggaagcgccacaccaggcccgcggctctgactgggaggggagaggagcaagagtcagcaggggacacacaggagaacggacagccacacccaggccagccgcgtgcggatccaggggctcaggggcagcatcagccaggcctcccttcccagccagtagaggctcgggagggaaagagcacagcgggcgtttgtagccagctcaggaaaccaaagtccctggttcctgagtgagccaggaaaggtccaccagctgccaccactgggggcagcctcgggacatgtccctagggcccaacagcgtatcaggcagaaagtccctgtgctcccatcaaaagcaagaaattaagcaactggctttttggcctctcagcacagccttgcaaatggagtataattttggctttcagattttgtagaacacagacctctagaccgcctgggttcaggatgctttaatatgcagtgttctggaagtgtcttcctgatgctattcaacgagcaggcgttaatacacttattacaaaatgagcagggactcagccaaggggacaggtcactgttggttctaagttccaaatccaggtggaaacagccctaggtagcactcagtgtgtttcagaggctaatagtagatggagcagctttatttctccatagaaatatttccacttcagtgaaatttgctggcaaatatctctaataacaacatatattactttttcaaattgttacactccaaaatggccagaaaagcaactctgtgctcttcaagggctgctccagcctccagaagtgctcccacagctgtccccccaggggcttggtccagaccctcactggccagaacgcagtggtgcagcatgggtactgagaagctcccaggccaagctgcaaaggacctacatgatgctaagaactggaacccgccgaactcctgaactagatctgtattttcctaaaagaaagcacatctgctaagcagtgtcttgcatgagagttgctcctgggttcactgctttgccttggtgactatcttgtttcaggcatggttaagtactttgatcaaagaagcgtgggaacacctgcagccatcctggtgggctggccccacacctggtggcttggggagggtggctgtaacactcgtcaatcagctgaaaaagtgggtggtgaggaggacaaggttcaggagaccaccgagtggagatttcaggaaatgccctgagaccacaggtgacaggggccccataagcatcctctgaaggccctggatgctcagcacatatgagaacactatgcaaacctgcccctctgtgcccctctgagtcaagcacccagcttcaccctggggttggccgcacagcttcatcagggccacagctgcccatgacaatgccaatagcagccagtgtctgctggtacgacctcccatcatgccggtaaggggcagtgccgctggcacggatgccttggcatcgcagatggaaacagcaggtaaacagcacttgccaggcagggctattctcttactcccggccctcaccttctcctttgaatcacaaaggcggtgagactgcattcacttacaggttcctatttagggccaagttgctctgcctttccaaatcagcatgggcctcaggccctggctcagccctccaggctcgacttacccggctgatgagctgctcgcccgtctcggaggcagtgatgagtttgcaaagggcttggagggcaggattgggcagacctaaa

SEQ ID NO: 28173 - DNA, 2300 bp, Homo sapien
tttgaacaagctctccaggtgctgtggagggagacacctctggataaaaccactggtctcacccagcccttcctcttcttgcaaatgaagaaagggagcgtggatcaatttggtgactttcctggaaccagtccctgacaaactataggttctaggagagctggatgggtgagtcaggttcctaagaggcagaagcagagagaagctggggcaggacagataccatgtctatccagggggcttttaactcttcattgttgaacctcagctagagtcctacatgctgaggatatagcaggaacaaagcaaagtccctgttttcatagaacatggcttctaagcaggagttgtctcagtgaattttacttctgactcatagatcttgacctagaagggacatctgtattgaagaattaatgtgtttagcttattgaaggtttaaacaatcggtatccttctggttttctcccaagaaccatcttctttcatatgtttttctattctgtgagatgtttaaaaatgtgaattatttacaaatatttttgctatccaataacatgacttaaaatgtttctaagttttctgagttatcagcattttgaaatgtatatttatgacattgaacctgagtgtcacttttcttaccgtctcaacagactcagttccttttcaaaagcctgaaattgcacaggcccagcatgatcagaggcaggcttccatctaccctgaattagattagaagaaggaagtccttcctttgtgtgtgcagttgtacggtgggagccttcatgctgtctctgcacaagctagcttctatgtacagtgagcaggataatgagggcaaagtgatgctgagaactgcctagtgaccaatacaataaatggttgccttcagatttgactctcacaaagccctcaaggttgctggtgtcctgaaacccagaagcttgctgtgggtaagtgacccaaactgcaggtgcctgcctgaaggctgttagaatgaggatggtttcatttaaggcttttgcctcataatagcacttgttttgcaaccccgctgaggcacatcaaaatcttagactgaaaaggaaaatagattagacatgaaatgtgtcagtaacatcagtaacagaaggcagggtcaggctgtgttcatattctgctttcaggagaacatcgtatgtatcttctattaacactcattggatgctgtgcacgtgagaaaggaagaatattcttttgccttctgtatttaactatcaggaagagctttgccagccaaagaatcaggttagataagtttatcagccaggagttttcctttgcaaagctatggatttcaaatttaggagggtgaccaggttaagtttcacttgttttagtgtttctgcctgcccagcaaacctgtctcctgctgatagccatcacctgggctcttgccgaggcatcctggaacatcctggaaatgttgctaccaacacagaatttgaagacaatgcttattctaccttggctgattcagctcttgtcctcattttatctagctgtgttgttagtattcttttttttttttttttttttttttttttttaacagagatgggtctcactaagttgcccaggctagattcttactcctgggcttaagcagtcctcctgcctcagcctcctgagtggctcttgttaacattcttttatagacacctgaagcaaaattgggtgggagcagtgctatcccagtgctttaggagaccggggtgggtggatcacttgaggtgggtggatcaggagctggagaccagcctgggcaacatggtgaaaccctgtccgtaccaaaaaatacaaaagccagccgggttgtggtggcccgtgcccgtagtcccaggtattccggaggctgactgaggtggatcacctgagcctggggaggtgcaggctgcagtgagctgccactgcactccagtctggggaacagagtgagaccctgtctcaaaacaaacaaaaacacaaaagtaaaatgacccttcaggactccttaggatagtggaattatccatcttctatgtttccttaaatttctctatctggtttcaggtttaaggttagctgagcaactgggccgaagagaagatgaggcaaaaattcgccatggccttggcctctccctttgggctagtggaaacttggaggaggcccaacaccaggtaagcagaacccctgactgaagtggattttttgtttccagaagcatgggagactttaggattactgtcctagtagtgatggcatttacaagaggca

SEQ ID NO: 28174 - DNA, 2300 bp, Homo sapien
gatatgaaattctgggttgaaaattcttttctttaagaatgttgaatattggcccctactctcttctggcttgtagagtttctgtcctgagatcagctgttagtctgatgggcttccctttgtgggtaacccgacctttctctctggctgctcttaacattttttccttcatttcaactttggtgaatctgacaattatgtgtcttggcgttgctcttctcgaggagtatctttgtggtgttctctgtatttcctgaatttgaatgttggcctgccttgctagattggagaagttctcctggataataccctgcagagtgttttccaacttggttccattctccccatgactttcaggtacaccaatgagatgtagatttggtcttttcacatagtcccatatttcttggaggctttgttcatttctttttattcttttttctctaaacttctcttctcacttcatttcattcatttcgtcttccatcactgataccctttcttccagttgatcgcatcagctactgaggcttgtgcattcatcacgtagttctcatgccatggttttcagctccatcaggtcctttaaggacttctctgcattggttattctagttagccatttgtctagttttttttcaaggtttttaacttctttgccatgggttcgaacttcctcctttagctcagagtagtttgatcatctgaagccttcttctctcaactcgtcattgatcattttaagccttcttctctcaacttgtcaaagtcgttctccattcagctttgttccattgttggtgaggaactgtgttcctttggaggagaagaggcactctgatttttagagtttccggtttttctgctttgtattttccccatctttgtggttttatctactttggtgtttgatgatggtgacgtggagatgggtttttgttgtggatgtcctttctgtttgttagttttccttctaacagtcaggaccctcagctgcaggtgtgttggagtttgctggaggtccactccagaccctgtttgcctgggtatcagcagcagtggctgtagaacagtggatattggtgaactgcaaatgctgctgcctgatcgttcctctggaagttttgtctcagaggagtaccctgccatgtgaggtgtcagtccgcccctactggagggtgcctcccagttaggctactcggggttcagagacccacttgaggaggcagtctgcccattctcagatctcaggttgcgtgctgggagaaccactactctcttcaaagctgtcagacagggacatttaagtctgcagaggttactgctgtcttttatttgtctgtgccctgctcccagaggtggagtctacagaagcaggcaggcctctttgaactgtggtgggctccagccagttcgagcttcctggccactttgtttacctactcaagccttggcaatgatgggcgcccctcccccagcctcgcttccgccttgcagtttgatctcagactgttgtgctagcaatgagcaaggctccatgggcataggaccctctgagccaggtgcgggatataatctcctggtgtgccgtttgttaagcccattggaaaagtgcagtattagggtgggagtgacctgattttccaggtgccgtctgtcacccctttctttgactaggaaagggaattccttgaccccttgtgcttcccaggtgaggcaatgcctcgccgtgcttcagctcatgcacggtgcgctgcacccactgtccggcactccccagtgagatgaacccggtacctcagttggaaatgcagaaatcacccgtcttctgcgtcactcacgctgggagctgtagactagagctgttcctattcggccatcttgcaacctgtaaaattttatctgccaaaatataccaaaaccattctgatgtgttttcatttctccactttatccttttctctccaggcagcttcatcagccttgagcagtctgggccacgtgtacacagccattggagactaccccaatgcactggccagtcacaaacagtgtgttcttcttgccaagcaatccaaagatgaactttctgaagcccgagaacttggcaacatgggagctgtgtatattgccatgggtgactttgagaatgctgtgcagtgccatgagcagcatctgaagatagccaaggacctggggaacaagcgagaagaggcccgggcttatagcaacctgggcagtgcctatcactaccggaggaactttgacaaggccatgtcttaccataactatgtcctgga

SEQ ID NO: 28175 - DNA, 2300 bp, Homo sapien
cctattagagtaaaatctaaagtctttaccatggccttcaaaccctatatgatcttccctcccctaaacaacttatttgacttcatcttcttcattcaccccagtcaaaacaaaccgttctctttgttactctgtgagcagagtaagcacatcccctcctgtgggcttttaccccaatggtccctctgcctagattactctttccccagaagccacatggctttttcccttatttccttcaggtctctgcttatacattacttcttaagaaacacctttatgttctatccaagataaaattgcaccccatcctcttcatcactctttttttttaaacatttgtttttttgtttgttagttggttttttgttttggtagagacaaggtctcattatgttgcccaggctgatctcaaactcctggccttgagtgaccctcttgccttggccacccaaaagactgggattacaggcctgagccatggtacctaagcccttcatcactctttatcgctcctctttacttactttattcttcttctgagtacttatcatcatcttccatacagtatgtttaccatctctttgtcccatactagaacataagctccatgaaagcagaaaatttattttattcagcaacaagtccctattgcctaaagcagtatcagttacatagtaagtatgcattcaatacgtggtgatgaaacgaaggtattctcgcagttaactgggtatcttcaatgcttcctctgccttgtgacccacatcccattagtcactaagttctttcaagtctataactaaaatactccattacatctctccatttccactaccactgctaggtcagccccttatcatccgtcttctgcaacggacttatcactgcactttctgtacccaaactttgtctactgcatttcctaagtagaaagatgacagactttaaaaattagacaggtggctgggcgtggtggctcatgcctgtaatcccagcactttgggaggccggggacgggggggatcatctgaggtcaggagtttgagaccaacctggccaacatggtgaaaccccatctctactaaaaataaaaattagctgggcatggtggcatgcgactgtaatcccagctactcgggaggctgaggcagaagaattgcctgaacccaggaggcagaggttgcagtgagccgagattgcgccattgcactccagcctgggcaacaagagtgaaactccgtcaaaaaaaaaaaaaaaaattacacaggtataggctttacttgagctgtcatttccagctatgtgaccctgaacaaattatttgcaattttcttttttcttttttttttctttgagacagagtctcactcctttgcccaggctggagtgcaatggcgcaatcttggctcactgtaacctccacctcctgggttcaagcaattctcctgcctcagcctcccaagtagctaggattacaaggcttcagtttgttcacttgtaaatgtagataataatatctacttttaatagatgttaatttttaatatacttttttacagtttacatttttagttttaggttcacagcaagattcagtagaaggtacagagagttcccatacactctctccacacttataatacctacttttcaggattatcatgaggagtaaataaaataatataaaatatataattttattaatagtagaagtataagtaataggcactcacttattgtgaattttttactttccaaatgcctctgatcaggttatttcatgcctcaaaattttaactggcttacctctatatagggaatgaatcaaattatttagtctgatatttaaaatactacaatttagctccatcctagctttccaactttatctttcactaaatatccccatgcactagcccatatgcaatctttacccacaactctactcactatgtctgatcacattcagcattttcctacttctgttctttgctccacctctgccaaaaacactttttccctccagtaagtctgccaaaatcttccaaactttctaagccccgctcgagtcccattttctataagaaggcttcaccaggccgggcgcggtggctcacgcctgtaatcccagcactttgggaggccgaggcgggcggatcacgaggtcaggagatcgagaccatcccggctaaaacggtgaaaccccgtctctactaaaactacaaaaaatagccgggcgtagtggcgggcgcctgtagtcctagctacttgggaggctgaggcaggagaatggcgtg

SEQ ID NO: 28176 - DNA, 2300 bp, Homo sapien
aacccaggaggtggaggttgcggtgagtcgagatcgtgccattgtactccagcctgggcaacaagtacgaaactccatctcagaaaaaaaacaattgttgttatatagcctcatttcatataatcccttcttcattatttaatttccatcatccaagaaacatttatatcaggtactacattaagtattagtttaataacagctttataacattcatttattcatttatttttagagactgggtttcattctgtggcccaggctacagtgcagtggtgccaacatagctcactgtagcttggaactactgggttcaaggggtcttcctgcctcagcctcctgagtagctgggactacaggtacatgccaccatacccggctaatttgactgattgatagacagatagttttgtttttttttttgagacagagtctcactctgtcacccaggctggagtgcagtggcacgatctcagctcactgcaacctctgcctcccaggttcaagcaattatcctacctcagcttcccaagtagctgggattacaagggcatcaccacacccagctaatttttgtatttttagtggagatggggtctcaccatgttggcaaagctggtctcgaactcctgacctcaggtgatccacctgcctcggcctcccaaagttctgggattacaggcatgagccactgcacctggcctaaaaaatatattttagagactgggtctcacactatgtcacccaggctggtcttgaactcctgacctcaagcaatcctcctacttcagcctcccaaatagctgaaatacagaaaggaacaaccatgcctggctcagttttgtaactttcaatacataaagaaattacactgctcacattgtaattaatttcatcttttcattaaattaatagataataaaatttgataataaacttaatgtcaaatactgcttgatcagtattatagagacaaattccagaatggtgtgccaacataaccttaaacctcacaataaaaactaggttttaacaatatccacagggaaattatgttattttctggcaacaagtctagcgtttagtagcaaaaggtagttataattgatcactatttgcttagtgatcatacaaatcaaagacagtctaaggcaaatggttaagaacagattccagagccaggctgctaaattagaatccaaggcaattcagtttcctagctggatggtattgataaagttacttaacctctctgtactacacttgtctcatatgtaagatggggataatagtgcctacttcataaagttgtgagaattaaattagttaatatatgtaaagtatttaaacagtactgacacagagtacacacaatataaatgctagtctagctataataatctcaaacacctatacttacagaaggaagagtgcttccacacaaatactctataatttatatggttcttccaaataagcctaatgaaaattttatttttcataaaatatatttggaatttgtggccaatttcttgaacaattattattaaatggttttcataaatctttgtgaatattaggaagcaatggattcaacaaaagcattatgtgacagtggagcaatattcaaaactcctgttgctacacaagccaaaaatgacagggatccaagacaactcaaaacaaaaatattacacacagaacagaagcaactgtgcagtatcaggaaatgcaatacactttttctagtgataagaaacttccaccgggcgcggtggctcacacctgtaatcccagtactttgggaggctgaggcaggctgatctcgaggtcaggagatcgagaccatcctggctaacacagtgaaaccccgtctgtactaaaaatacaataaattagccaggcgtggtggcgaacgcctgtagtcccagctactcggaaggctgagataggagaatggcgtgaacccaggaggcagagattgcagtgagccgagatagtgccgctgcactccagcctgggagacagagcgaaactccgtctcaaaaaaaaaaaaaaaagaaagaaagaaagaaaaagagagggaggagccaagatggccgaataggaacagctccggtctacagctcccagcgtgagcgacacagaagacgggtgatttctgcatttccatctgaggtaccgggttcatctcactagggagtgccagacagtgggcgcaggccagtgtgtgtgcgcaccgtgcgcgagccgaagcagggcgaggcattgcctcacctgggaagcgcaaggggtcaggg

SEQ ID NO: 28177 - DNA, 2300 bp, Homo sapien
agtggctcacgcctgtaatctcagcactttgggaggccaaggcgggcggatcacaaggtcaggagatggagaccatcctggtcgacatggtgaaaccccaactctactaaaaatacgaaacttagctgggcatggtggcgcgtgcctgtagtcccagctactcgggaggctgaggcaggcgaatcgcttgaaccagggagtcggaggttgcagtgagccgagatcgcaccactgcactccagcctggtgacaaagcgagactctgtctcaaaaaaaacactgtactaaaccagataaggatataaatatgtacacgcttttgttattagtcctcacaagaaaattctttggtcataagagcaggactttattaggtcaaaatggctgtcctaacagacaccatcttgctgtcactcatgattaacacccagtatccgccatcaaaggctctgcccgcatcaaaaactcttccttacaagacactgacaccccagataaagccaaaacactctctttgtccacattgctctccttggactggtttgataaccactttccctatccccttttctccgaatgttaaatgttactttaatgtaagatttttaatctataacatttacatattaaataaatatactattgtgtacggtttacaatactgactgacttgtggaatggcttgagcctgtgtgcccatggctctgaccaccaagtaaacagggagtactacggaaaattgcttccttgggaactccatatagctcgtggcttttacaattaaaataaaacatcaataagtctgatcttgtggaaagacacaaatgtgcatggacctggttatgtctgaccttgcactgttcacatacaccactggtgggaatgcaaattagtatagccactatagagaagagtattgtgattcctcaaaaaattgaaaataggccgggcgcggtggctcacacctgtaatcccagcactttgggaggccaaggcaggtggatcacctgaggtcaggagttcgggatcagcctggccaacatggtgaaacctcgtctctactaaaaatactagccgggcatggtggcgggtacctataatcccagatacttaggaggctgaggcaggagaatcgcttgaacccaggaggcagaagttgcagtgagcccagatcgcgccactgcactccagcctggcaacagagagagactccgtctcaaaaaaaaaaaaaaaaaaaaaaaaggtacagatggtaatcatatatgtatactttatatcaaaaataaataattttttttaaaaattccagaggtctttcaagtgaaacacaatatttttttcaagcagaaaacctaagtccgaaggaggactgatgccctcctacccacttctggccaccctatcccatacatttacttagggacttatttagggacacgcagaacatcctcctacacagctcagtgcgtttccagtccctgcagcgcccagtagctaagactggcttctctataagtattttatagattgaacctaaagaatggcaacgatttctaacatctatagaatttttacgaagtcacttcgctctgatattgaagaatacaacgctgttcttcttatcctgtatgttcaggcctgtttcagcttgcaagtaatacgggaagtgaacttcacctcgaggatgatctactgaaaaggaagagagtcgcccacacactcccccttcagctcaaaactacagacaaagcgaagctcaggagactccgttcgcacaaaacgcttaagatgggattcgaaccaccaaacacccaacagaagttccccatatgactcaccgcgtgagcccacctggagccgcacactctccgcagcctcagccagcagagtggcgctaaacctgcagatacaaactccaccctcagccaatcaaaaccccctcccctgccgccggaccaatgaggagcagcagatgtggccgtcaggcgccgcctcaatgcctcctgggagttgtagtttagaagggagagcggaacttagaacccgggttcccctcgggtgatcccgccccctcgactccccagccaatcagcaacattagtctggttagacgctctctttgcttttccccacgagtgaccacggctagataggccgccggccagatgtggcgggggagagccggggctttgctccgggtgtgggggttttggccgacaggggttcccagaaggagaccgctaagctgcgatgctgcgtcgcaggcgggaagcaattatccccgctgttggaactgcggc

SEQ ID NO: 28178 - DNA, 2300 bp, Homo sapien
gttgctggtacctgtgctggagcttcgctgtatcaactctgaaggaacggttgctggaaggaaattgggagattaaatttatacaacaaatatttaaaggtttatctaccatgagcctggttcttgctcttatggggaagatgcaataacatataagcagttaatttcaaaaagtggtaagtcctatgaagggacacagaacagagtcagagagtgtagcagatgtagtggacaaagagatgacactcagctgaaacctgaatgatgatgagtaatcaaagatcagaggaaagagacgtccaggtagaattgcaagagcaaggacctcgaggtgggagcaagatggggatgcctgaggaacttaaagatcagcgttactgtagcccctcatacatgttcagtgactggtggggaagatcccatagttaaggaaaagggacattcctaaattacacagacaaagattctttgcctggccaaactttagtcagatttctgaaccttctcctaggcccagatgtatgctttcttgtaaaatacagttttggcaaataatcttgccaagtcagtttagctagaatcctcgatcctcatatttttgatcatcctagatctctgatcagattcttcatcctctactatcccccaggtggtgtctaagcagcctggcctgtcttcagcaagaatcccgttaggtcggcttagccagaatcccgtttactctgctccttggctacaaatttccttctgcccatgccctttttggagttgagaccaatctctctccccaactgcaagaccctattgcagtggcccctctacaagatggtcttgaagaaagtctttctggtgcttgaacaagtgtgactgaatcatgttttctttaataccaccctaacttttccacggcccaggtcccttcatccctgtctctcccggtttattttaattcagcccctttcacattctactcccagagtctgtcctatttccttaccagttcagctctatccacactgccccgtctctccaagaacctcagtctcagggggaaaaaccatttattggaccctctccctccaattctcacttttccctcaggcctcgcccacaatattaagcttttcatgctttactccctaatctcggatcacacttctgcagtcctttcttaaatacatcaacccaactttaaaccttactcaccctattcattcaagtcttccagtctcccaggccctgcccctcaagtaccctttcctcaagttccgcccctcgacttctccttccctttcccgtaggtaccgcccctcaaatctccctcccctctagcctcggcccccctatttcctctaacttcagcgcccgcccctccagtcccgttcgtctcccttctccacacctcaacgttgcttccctcagtccccgcctctcaatttcctcctgagaaatcaagacacttctctcacgcctgctctctagacctccgcccccccatcagtcccgccttctcttccgccagccagatccgtcctcccctctcgcaggccagacctcgacgtgtctctcgcccgggcccgtttcccgaaaccgtcgctcgtaccagtccataaggctgaagtagtctcgagtggggtcaggtgcctgcagcgctcggcactgtgggcagaagaacctgtcctcccgcccggggccccatgggccgccgcagttccaacagcggggataattgcttcccgcctgcgacgcagcatcgcagcttagcggtctccttctgggaacccctgtcggccaaaacccccacacccggagcaaagccccggctctcccccgccacatctggccggcggcctatctagccgtggtcactcgtggggaaaagcaaagagagcgtctaaccagactaatgttgctgattggctggggagtcgagggggcgggatcacccgaggggaacccgggttctaagttccgctctcccttctaaactacaactcccaggaggcattgaggcggcgcctgacggccacatctgctgctcctcattggtccggcggcaggggagggggttttgattggctgagggtggagtttgtatctgcaggtttagcgccactctgctggctgaggctgcggagagtgtgcggctccaggtgggctcacgcggtgagtcatatggggaacttctgttgggtgtttggtggttcgaatcccatcttaagcgttttgtgcgaacggagtctcctgagcttcgctttgtctgtagttttgagctgaagggggagtgtgtgggcgactct

SEQ ID NO: 28179 - DNA, 2300 bp, Homo sapien
gagtgtgcagtggcgcgaactcagctcactgcaacctccacctcccacgttcaagtgatcctcctgccttagcctcccaagaagctgggactacaagcatgtgtcactgcactgggctaatttttatatttttagtagagacagggtttcaccctgttggccaggctggtcttgaactcctgacttcaagtgatctgcctgcctcggcctcccaaagtgttgggattacaggcgtgagtcactgtgccaggcccacaaagttttataatattctaatgggcaggcacctaaggaagtggttaagtagagctggtgtgggatgaggtgtctttatattcagctgataggttttaagttatctgggaagtcagacaaaagctgtgagtgaatggcagctctgggtctgacaggctggggtcagactgccatggggcagacacagctgattttccagctcagtccctgataatcacataaccacaaggctactgccacccagtgtgcacacatatttggggattattggggttggccaataagctacctgagacctctggctgaagaaatctgggtggacaagacgctgcagttgctggtacctgtgctggagcttcgctgtatcaactctgaaggaacggttgctggaaggaaattgggagattaaatttatacaacaaatatttaaaggtttatctaccatgagcctggttcttgctcttatggggaagatgcaataacatataagcagttaatttcaaaaagtggtaagtcctatgaagggacacagaacagagtcagagagtgtagcagatgtagtggacaaagagatgacactcagctgaaacctgaatgatgatgagtaatcaaagatcagaggaaagagacgtccaggtagaattgcaagagcaaggacctcgaggtgggagcaagatggggatgcctgaggaacttaaagatcagcgttactgtagcccctcatacatgttcagtgactggtggggaagatcccatagttaaggaaaagggacattcctaaattacacagacaaagattctttgcctggccaaactttagtcagatttctgaaccttctcctaggcccagatgtatgctttcttgtaaaatacagttttggcaaataatcttgccaagtcagtttagctagaatcctcgatcctcatatttttgatcatcctagatctctgatcagattcttcatcctctactatcccccaggtggtgtctaagcagcctggcctgtcttcagcaagaatcccgttaggtcggcttagccagaatcccgtttactctgctccttggctacaaatttccttctgcccatgccctttttggagttgagaccaatctctctccccaactgcaagaccctattgcagtggcccctctacaagatggtcttgaagaaagtctttctggtgcttgaacaagtgtgactgaatcatgttttctttaataccaccctaacttttccacggcccaggtcccttcatccctgtctctcccggtttattttaattcagcccctttcacattctactcccagagtctgtcctatttccttaccagttcagctctatccacactgccccgtctctccaagaacctcagtctcagggggaaaaaccatttattggaccctctccctccaattctcacttttccctcaggcctcgcccacaatattaagcttttcatgctttactccctaatctcggatcacacttctgcagtcctttcttaaatacatcaacccaactttaaaccttactcaccctattcattcaagtcttccagtctcccaggccctgcccctcaagtaccctttcctcaagttccgcccctcgacttctccttccctttcccgtaggtaccgcccctcaaatctccctcccctctagcctcggcccccctatttcctctaacttcagcgcccgcccctccagtcccgttcgtctcccttctccacacctcaacgttgcttccctcagtccccgcctctcaatttcctcctgagaaatcaagacacttctctcacgcctgctctctagacctccgcccccccatcagtcccgccttctcttccgccagccagatccgtcctcccctctcgcaggccagacctcgacgtgtctctcgcccgggcccgtttcccgaaaccgtcgctcgtaccagtccataaggctgaagtagtctcgagtggggtcaggtgcctgcagcgctcggcactgtgggcagaagaacctgtcctcccgcccggggccccatgggccgccgcagt

SEQ ID NO: 28180 - DNA, 2300 bp, Homo sapien
ttgtgatcccactgcctcggcctcccaaagtgctgggattacaggtgtgagccactgcacctggccgaaaagttctttttttttttttttggagagggagtctcgctgtgtctcccttgctggagtgcggtggcgtgatctccgctcactgcaagctccgcctgccgggttcacgccattctcctgcctcagcctcccaagtagctgggactacaggcacccgccaccacccccggctaattttttgtatttatttatttatttgtttatttatttatttattttgtgagacagagtctcactctgttgcccaggctggagtgcagtgatatgatctcggctcactgcaagctccgcctcccgggttcacgccattctcctgcctcagcatcccgagtagctgggactacaggcgcccaccaccacgcccggctaattttttgtatttttagtagagacggggtttcaccgtgttagccaggatgatctcgctctcctgacctcgtgatccacctgcctcggcctcccaaagtgctgggattacaggcgtgagccacggagcccagccaaaagctgttttttaaaaccttccctcaaaacgtctaacacaaccccaaatcctataaaaagcctttgtaacacctcctaagggagaaatttcctcactggaatgagtagataaacctttctttgttcaattatgtacatgtgtgtgctttggctgaagggcattgacattggcataagcagtttcgattggatggtggtgctgttgtgagatggaaaaaacagggcatagtcagtgattgggggttgaccatctgccaagcccaggcaggagatactgcctctgaatgccccaaagaggctggaaggcttgccagtacctgtcacaagtgctctgaggcttttgtttttgtttaagtcctgagtttacttttttttttttttttttttgagacacggtcttgctctgtcactcagactggagtgcagtggtgtaattatagcccactgtaacctcaaactcatgggctcaagcaatcctctcacctcagcctccccagtagctaggactacagacatgcactaccacggtgggctaattgttatttttttgttgttgagatagggtcaagctagacctaggatggactcctggcctcaagcgattctcccacctcccacctccgacctcccaaagtgatgggatcacaggcgtgagccaccttgccgcgcaactgaggtgtttttttgttttgttttgtttcttgagacgtagtctcgctctgccacccaggctggagtgcagtggcacgatcgcggctcactgcaacctccgcctcccgggttcaagcgattctcctgcctcagcctcccgagtacatgggattacaggcgcgcaccaccacacctggctaattttttatatttttggtagagacgggatttcaccacgtaggccaggctggtcttgaactcctgacctcaagtgattcgcccacctcggcctcccaaagtggtaagattacaggcgtgagccaccgcccccagccagcagctgaggtttttacttaattttctatgctgttctaaggcaccaccaacttcatttgtattaaaattgttacatttttattaatagagtcacatatgaataactgataatgagcgtgtattgtatgtcaggcactgctttaagggctctagattgtttttgttttgagacagggtctcccgggctcaagagatcctcccgcctccaccttccaaattgctgggattacacgagtgagccaccgccctgccctggctctagatgtttaaattcatgtactccgcacatcaactctatgattatatgtactattattatctcattttactactgtggaaactgagatacgaaacttgcggagtgaggatttgaacctaggtcatactcttggccagccagagacaccctaagccccagctaagaggtcgagaagcagccattttgcttgtagtccggaaggactgcaaatcccggcatccctcgcggcagcggccctctacacacaacaaatcccggcatgcccccgagcggcctgaggtggagggttctagaaggcgtgacgtggggtcgagagcgggatccgaggctggcgggttttggcagtagctgtggctgcggctgccgggcctggggacgcgggcggccgaggccgccgtcgcagcctcctcgtctcgccggctatggctgcgctcggccggcccttcagcggcctccctctgagcggcggctcggacttcctgca

SEQ ID NO: 28181 - DNA, 2300 bp, Homo sapien
aaaacagagtagcagctcagactgccagagatcgaaagaaggctcgaatgagtgagctggaacagcaagtggtagatttagaagaagaggtaaaactacttaaggtcaaactcttttatccattgtatacccttccttggtgaatgttctgatatttgcttcccatcccaagttgtttcagcccctattagaatacaattgaatatatgattaaaagttaaactaggctgggcatggtggctcatgcctgtaatcccagcactttgggagcctgagttgggcagatcacttgaagccagcagtttgagaccagcctagccaacatggtaaaatcccgtctctacccaaaaatataccaaaaaaaaaaaaaaaaaaaaggccaagcgtgagtgcctgtagtcccagctactcgggaggttgaggtgggaggattgtttgaacctgggagagggaggttgcagtgagctgagatcgcaccactgcactccagcctgggcaacagagtgagactctgtctcaagaaaaaaaaaaaaagtttgctgggcaccggggctcacacctgtaatcccagcactttgggaggccaaggtgggtagataacttgagatcaggagttcgagaccagcctgaccaacgtggtgaaaccccatctctattaaaaatacaaaaattagccgggtgtcgtggcaggcacctgtaatcccagctgctccggaggctgacgcaggagaatcacttgaacccaggaggcggaggttgcagtgagctgagatcacgagatcatgccactgcactccagtctgggcgacagagcaaaaaccctgtctcaaaaaaaaaaaaaaagttaatctaagttaggacagagagttggtgaagtggtgaagcttgttgagggcagaagtgattgactttgtggcatttggtgctagatgtatctcaaagtagatggatttaacaatgtttattgagtttgtagtaagaaattagcaagggctaataggaaataattgcttaaactttacattcttcctggcatggccagaaattcactaaaggttcctttccccctctagggtccacctgttaatcaatcttaaattgttgccaattacacatcttgaatacatagagattatttatattgtttttttaaccccttggtcaatttgcatatattgagctttttaaagttttaatcattagttggttcttctaagaatcatgagtcaggagcagggattttttttaacttattttggatttatagtcaccactaccacttttattattacctgccagttcaagatagttatttatttttattttatattattattattattattatcatcatcattattttgagatggagtctcactctgttgcccaggctggagtgcagtggtgcaatctcggctcactgcaacctctgcctcccaggttcaagcaattctccctgcttcagcctccagattagctgggattacaggcacccctcaccacatccagctaatttttggattttttagtagagatgggggtttgccatgttggccaggctggttttgaactcttgacctcaggtgatccacctgccttggcctcccaaagtgttaggattacaagtgtgagccaccgagcctggccaagatagtttaaaaaaaaaattatatctacattaaagccacaagtcaccctttgctgaagtcagtattagtagttggaagcagtgtgttattcttgaccccatgaagtggcacttattaagtagcttgcttttccataattatggcctagctttttaaaacctactatgaacaccacaagcatagagttttccaaaagttcaagaaggaaaggaaaccaattatactgaatcaggtagattcttaactgaaataattagatgttttaatagcctcttatgaactttcttccagaaccaaaaacttttgctagaaaatcagcttttacgagagaaaactcatggccttgtagttgagaaccaggagttaagacagcgcttggggatggatgccctggttgctgaagaggaggcggaagccaaggtaaatcatctcctttatttggtgcctcatgtgagtactggttccaagtgacatgacccagcgattatgtttacagtctggacttctgatcaagagcgttcttgaaattttccttcagttttaagacattttcatgcaggcagagtgttcttcccctaaaggcacttgacactcattttttaagtgtgtagtgaacagtactaagatctaataatgaaaacaagttacatg

SEQ ID NO: 28182 - DNA, 2300 bp, Homo sapien
gggcttagatatcaagagatggacttgcttttagttctttttcccatcctgttccctccctaccaaaataaaattgaccagctaatccgacttaataacactaaagaattacttaggaacctgctatcttaacatttcactttttgcatatcctccaaataccaggtagcagtcttactactgtttgcacccctagaacctggaatagtgctgcccgcagaggaggaagcaataattacttgttagagaaggtattgctgtgcatttctggggaatttcacattttgtaatttgctttaaaaaaagtggacaggcatatttacgggggtttctcggacttctccatgttaatattcgtgtgtataaatcgctcccgtgctgctctctgggggcccctctttcacaaacacctggccaccctcacgccacaatggccaggcaggaacctcgacctcccctcggagagggggctcagggtcaaccccggggtctcagtctctacatgtgacgttttcctgtcccctcatttaaaataacaagaggctgggcgcagtggcttacgcctgtaatcccagcactttgggaggccgaggcgggcgatcacgaggtcaggagatggagaccatcctggccaacacggtgaaaccccgcctctactaaactacaaaaaattagccgggtgtggtggcgggcgcctgtagtcccagctactcgggaggctgaggcaggagaattgcttgaacccggaggcgaaggttgcagtgagctgagatctcgccactgcactccagcctggtgacagagcctgactccgtctcaaaaaataagaaaaaaaaataaaataaaaataatagaggccgaagcgggaggttcacttgagctcagaagttcgagatcagcctgggcaacacagtgagacctcgtttctatttaaaaaataaaataaaactaaatttaaaaaaatgcacgctcatagtacaaactttagaaatggaacgaaaaactaaaattgaaggtattcccctccaacccagagataacacctatcgtttattaagccctcactattgttaaacttagttttaaagggcacgatctcatttcttaaagacttctattccgcagaatttctttccaggcttttttctttttctttttttgagacggagtctcgctctgtcgcccaggccggggtgcagtggcgcgatctcggctcactgaaacctctgtccagtcttttcgaacccaaggcccaactgcgctctatctcgactttcggctccactcggatcccgaagtggcgcacgagataaaatgttgtcaggctgaggtaattctctgttagtcccggtaaaaattcgtcagtctggaaagctctcggtttggaattaaattctgtcactccggatggaaataagtccgcttaaggggggaaaatccgtttgtggaggacacgctcccgcacgtaaccccccgcggaaaatgaccccaagtacctttggccagggattgccgctgccacgccggactccatagccacggtcctgaaacgccccgccgggcaggccggaccaatggacgccgagctcggccgtgcgtcacgcgacgctggccaatcgcggagggccacgaccgtagaaaggccgggcgcggcgaggctgggcgctgggcggctgcggcgcgcggtgcgcggtgcgtagtctggagctatggtggtggtggcagccgcgccgaacccggccgacgggacccctaaagttctgcttctgtcggggcagcccgcctccgccgccggagccccggccggccaggccctgccgctcatggtgccagcccagagaggggccagcccggaggcagcgagcggggggctgccccaggcgcgcaagcgacagcgcctcacgcacctgagccccgaggagaaggcgctgaggaggtgggcgaggggccggggtctggggccagatctgaagccgggactagggacaggggcaggggcaggggctgggagcggggacccagcactggccgccccgcagggctccgtcgcctttggcctggcgggtcggtgccagcgtggcgcggggcggggcaggaagcccggactgaccggatccgccacgctgggaacctagggcggcccagggctcttttctgtactttttaactctctcgttagagatgaccagagctggggatgcgggcacctgtcttccaggccctcttgctgtgtggccgcagactggtggttcagcctcttaactcggacatgaggtcgaataatctgttttggtttactg

SEQ ID NO: 28183 - DNA, 2300 bp, Homo sapien
aaaggaaaaaaaaggcatcaaaaaataaaacgtaacaggtggcatgacatgacatgacttttctaacagcctcttacagctttccaaggtcttttaatatgaagctataggtctcggctagaagacacctccagacttctcccaaaacatttcagaggcccggagtaagtctccccacatctgaaggcacatcagaacccaggtggcccaagctgatgagagttaaacaggaagttggtttcttggtccggcagagactccaatcacccccacctcttttccaacccacaggacagcacgtgctcaggaggctctggagttgggacagcccagttaaaaaaaaaaaaatcattgatttccctcccaacgaagagggagaaaacacgttaggagactcgtggcccagtcctggcaaaaaccaaaactatgtccctttagagggcttagatatcaagagatggacttgcttttagttctttttcccatcctgttccctccctaccaaaataaaattgaccagctaatccgacttaataacactaaagaattacttaggaacctgctatcttaacatttcactttttgcatatcctccaaataccaggtagcagtcttactactgtttgcacccctagaacctggaatagtgctgcccgcagaggaggaagcaataattacttgttagagaaggtattgctgtgcatttctggggaatttcacattttgtaatttgctttaaaaaaagtggacaggcatatttacgggggtttctcggacttctccatgttaatattcgtgtgtataaatcgctcccgtgctgctctctgggggcccctctttcacaaacacctggccaccctcacgccacaatggccaggcaggaacctcgacctcccctcggagagggggctcagggtcaaccccggggtctcagtctctacatgtgacgttttcctgtcccctcatttaaaataacaagaggctgggcgcagtggcttacgcctgtaatcccagcactttgggaggccgaggcgggcgatcacgaggtcaggagatggagaccatcctggccaacacggtgaaaccccgcctctactaaactacaaaaaattagccgggtgtggtggcgggcgcctgtagtcccagctactcgggaggctgaggcaggagaattgcttgaacccggaggcgaaggttgcagtgagctgagatctcgccactgcactccagcctggtgacagagcctgactccgtctcaaaaaataagaaaaaaaaataaaataaaaataatagaggccgaagcgggaggttcacttgagctcagaagttcgagatcagcctgggcaacacagtgagacctcgtttctatttaaaaaataaaataaaactaaatttaaaaaaatgcacgctcatagtacaaactttagaaatggaacgaaaaactaaaattgaaggtattcccctccaacccagagataacacctatcgtttattaagccctcactattgttaaacttagttttaaagggcacgatctcatttcttaaagacttctattccgcagaatttctttccaggcttttttctttttctttttttgagacggagtctcgctctgtcgcccaggccggggtgcagtggcgcgatctcggctcactgaaacctctgtccagtcttttcgaacccaaggcccaactgcgctctatctcgactttcggctccactcggatcccgaagtggcgcacgagataaaatgttgtcaggctgaggtaattctctgttagtcccggtaaaaattcgtcagtctggaaagctctcggtttggaattaaattctgtcactccggatggaaataagtccgcttaaggggggaaaatccgtttgtggaggacacgctcccgcacgtaaccccccgcggaaaatgaccccaagtacctttggccagggattgccgctgccacgccggactccatagccacggtcctgaaacgccccgccgggcaggccggaccaatggacgccgagctcggccgtgcgtcacgcgacgctggccaatcgcggagggccacgaccgtagaaaggccgggcgcggcgaggctgggcgctgggcggctgcggcgcgcggtgcgcggtgcgtagtctggagctatggtggtggtggcagccgcgccgaacccggccgacgggacccctaaagttctgcttctgtcggggcagcccgcctccgccgccggagccccggccggccaggccctgccgctcatggtgccagcccagagaggggccagcccggaggcagc

SEQ ID NO: 28184 - DNA, 2300 bp, Homo sapien
tcttgatggataatatctcattgcagggatagaccacatttggttatccatttatcagttggtggtgtgtgcctttgaattttaaatatcgcaaagtgtcatccatgagctatagagatttgccctcccccttaattaagaactggatggaggctgggtgtggcacctgtagtcccagctactcaggaggctaagctgggaggatacttgggcacagaagttcgatacttgggcacagtgagctgtgatcacaccaccgcacgccagcctgtgcgacagagggagacgctatatctaaatgaaaaaaataagaccttgtaggggtcattgtcaggaccaatggtgcccagttgcaggcagcactggttaggcccggttttggagaaactaaaaagccactccctccagagtcctgctttcccaggtgcctccctcctgagcggaagctctgggtggtccaaatgtggtaatagagatctgtggatttttttcaagtgtgttttctgttgcacgttaaattttttttttcagctttaaaatgtaaccttggtaagttgtttactcaagaaaattcttaatgagttttctttctttctttttgtctttttaacattttgggtgtggtagcaagtagaagcagattcatcctaaccaaatatttgcaaatatctgaacaaagctattctggccagggaaggaagactccacggaggaagtgggaattggatctggcttttgaaggaggggttcaattctcagaggactagatgaggaaggaaaaggcatgttccaaaaaggggcagggaattaaaagtttattttctgggtgactgggaacctctgagcccttgagcacgtgccttagatatgttagtttggcagccagcagtctgtgcatagagggtgataatggtgttggactcctctggcctgcacgtggcgagactcaaagtttccagacttcttttgggggcggtgtctgaattacagtctccggggctgcagaaagatgaactccatcagaagatcctcaaggtcttccccactccttcagtgcagacttcatacagagaaactgtctaggcgacacctgtgcaagaactggacacgacccaagctgcaaactgcccctgaccatcccggccttccccgttcgatcctggaggtgggggtgggaatggagcgcccagagcgggcgatcaagcttcctgggaactgtgaattggggcgggggaagcaggaaggacgaggcctttccagaccaaatggccctaactcctgcaccggaccaggacgcgtggcgcctccagagaggacgcccatcgcccggagcaggttgcggtcccggttcccgccgaactctagcaaccgcgaggagaaatgtctgccgtagggggcggagcgcagcgggggcggagcgcggacgaaggggcggagcgaggacgaaggggcggagtagaaacgacgggcggggggcggagcgagaataatggggtggagcaagacggcgggcgggggcggagcgaggacgacggggcggagcgcagaccgcgggcggggggcggagctgggatgatggggaggagcgaggataaaggggcggagcacagatagaaacaggggcggggaggggaggggcgttctcggcctttgggacccgcctctcgccgcaggcgcgcctgccccgccttctcactccccacggcggcggctgcggaggccgagggcggggagggaggggagagcgggtcacgacgctgccggggcggggataacccctcacgtggagcagatgaaagggccgcggcgcgacggccgggggagccgagctgagcctgcgacccacaaagccgccgccgccgccgccgtgatggggctgtgaggcgtccgcccgcgttcggtcctcagccggcccgcgactatgcccggccgcgcccgccctccgcgccctcccgccgcaggaccatgaggccgcgctcgggcgggcgcccaggggccacgggccgccgccgccgccgcctgcgccgccgcccccgcggcctccggtgcagccgcctgccgccgccgccgccgctgccgctgctgctcgggctgctgctggcggccgcggggcccggcgcggcgcgggccaaggagacggcgttcgtggaggtggtgctgttcgagtcgagcccaagcggcgattacaccacctacaccaccggcctcacgggccgcttctcgcgggccggggccacgctcagcgccgagggcgagatcgtgcaggtagctgcccgccgcccgggccccgcgccgcctcc

SEQ ID NO: 28185 - DNA, 2300 bp, Homo sapien
ttccatctgtaactgtctgtgtccaaattttctcttcttataaggacaccactcatattgtattagggcccacctatatgacctgctttaacttggtcacctctttatagaccctctctctaggtagtcacattttgaggtactgggggttaggaccttaacatatcaatttttgagagacagaactctgcccataacacagagccattaagacatgatgaccctccagatttctgaaggtgattttcttgtcacttgtcttttccttgctgagaacccccagttctttccgttctttatatgagatggttttgaagtccctcaccatcttggaatcttctggacttgccttagttttggaaggacaaagtggaatactttggactacccgtgatattatagatagaattcattctaatgtctgcccaagcaaacaattttgatgatttccgaaaaagattaaaaggctaaaaatcagactgtacagtttcagtaacagctttaagatatttgtctttaattttgcctgagtaggtctgaccactgacacacacacgggcaccgcccccatatcccaccccatgcatccagtgctaactttatgtcttcttttgacttaagcatttacgttagagttagtaagtgctcaaggtctaagtttgttcaccacccttcctcccttccttcatacttttttagttttaggaaacctagttgggagggttatttcaaaagaataaatgaatgtagagatttttattttttaaatttaaattacatttaatttttttgagatggggtcttgctctgttgcccaggccagagtacaatggtgccatcacagctcactgcagcctccccctcctgggctcaagcaattcttccaccttagcctcccgagtagctgggactacaggcaggtgccactgtgcccggctaattttgtttatttttttgtagaggcgaggtctcactaggttgcccaggttggtcttgaactcttagactcaagggatcagactcagcctcccaaagtgctgggattataggcatgagccaccatgcctggctgagatttttattttttaaatgtaattgctgtctggagagggtagaaataactcagttactggagtataactcattttaggttcataatgtcatgccaacctgtagtgtagttagatttaaaattattagttattctcttcacttttggaaattgtttactttttattgcccttgtgcaccaaaaattgtgtcaaaaaagctcatatgttttgttctttgcattttcagcacttagcagagtgaaggttaaaaaaaaattgttgagtgactaaaggcatcctcttaatcatcttgtgcttatttaatcaggagcatcctgttgtgtctttggtagaattggcagcttggggtttagggattattctggccgctgtcccttttgcttttgaattgtggagctccccacaaagagaccctcagtgctgttcactcttctgctaaattgtggtttgtaagtcctgactgatagttttgacaggctttttctccttaccgtagtctctttagatggagtgtgacgctcttggagttcctttctttgaagatgctttgactataccgcccaggatttccaaattgtagcctttagatgcctggaaccctggccccacacagctgttaggccccctctattctggaggcccgacaacattaaaaataccaactatttatagcatacttttcagtgtcagtaaattataggatgcccttgccagtggatggggtgaacgctcatctgcctgccactgtgtgattgcctagaagcgtcggccaggtggcaggagctcagccccacctgaatgctcccaggtcctcacctggcactcccacaggaaactaaggactgccaggatgtcttggggttccagtagagtccatgtcctttgcgatggagtggttggggataaaacacacacacacacacacacacacacacacacacacgacactaggtatgtgtgctcttgagagaagcccattctgatctaactgccaactcctcaggaggctgtgttgtcagccatctgtgcacagaagtttgctgcatcactggtgagctggggagtgtcctgtgtggtgtccacttaatcttactaggaaggatcccctcatttcaacaaggtaactgaagaatgttaaatctaaatttgggtaagatatactctctgtaggctgaagaatttgaagagtatataaaagctcttatagctgggtgcctatagtcccag

SEQ ID NO: 28186 - DNA, 2300 bp, Homo sapien
cctcagcccagcccaccttgcacgcccctgccccctccccaacacggtctccatgcagtagcagagggaccgttctcaatcatggatctgacctgcaccacccttctccaatgactgtgctgctcttagggtaagatgtgacctcctcctgcttattgtttctgaacacaacactcaaactcctaagttgaactatattgagccttttttttttttttttttttttgagatggagtctcactctgtcgcccatgctggagtgcagtggcacaatcttagctcactgcagcctccacctcctgggttcaagcgattatcctgccttagcctcccgagtagttgggattacaggtgtgcaccatcatgcccggctaattttttctacttttagtagagacagggtttcgccatgttggccaggctggtcttgaactcctggcctcaggtgatccaccctccttggcctcccaaagtgctgggattacaggcctgagccaccacacccggcctagactgagcttcttttagttctcttcaaaatcccaaactcaatggtggccacatgtggggtaacaggagaccaacaatgaggagcacattacccaccccctgccacagggttcatttactgcttctctctctgttcaggtattattccctcaggctgcggtgcccagtggccttatgctgtgctccaccactgtggcacttatgacatcacactgtcattgtttacttaaaatgcctccttcactaaagggcagccagtgtgtcagacttctttcctgctgaattcccagaacccggcaaaaggcctggcacagggtaaatggccaaaaaatgtttgttgattaacctaaaagatcagcttttgccctaggggttagcatcaaacaccatgggccctgctactgaaagcactgattgcagctcactctaggccacctatctcctccctttgactttttagaaaggtctgttctctaccaaattttcttggaacataatattcttcgcactttaagattctcaggattcggtttcttattactggtgccatcttctgctgttgcatttcctgacagcctttttactggttgtcagttcgaatgcagacatcgtgtctcctccggccaaccttgaccccaggcactaaaagtggcttggccttgttgtggatctgtatcaggccccagcccctgcgtgtgctcatctctggatatcaaagctctctgaaaacaagcccaaccacttgcagtgtttgttccatccattctgcaggaatgggagcctcccttagtacctttaccaaaagaaagctggccagatgactacccttggccatgtccacaagaacaggctgtatgtgaatttttacagcctcctcccattatcactagggggccttgcctttcctccagcctaaaagactgatggagttcatcctgcaacctgcggagaaatatggccacaccatacagcggcccaaccccaggaaagtgcaggtttggctgctttccccacctggtgcgaagctctggcgccttggctctctgggtgaactggtggcaaattctaccacagcttcaaaatccccaactcaatggtgccctaatttggggtaacaagagacttaagcataggcttgaaggcttgagagacacagccatctaaagccggagcctggaacacgtcactgctgaaatgcagggcggcaggaaccagccctgtttctgttgccgccaccaggcctgctcctgtggtcagggaggggaaaagggcggttaacacgatggagagcacccagccggtcctagggactggccacgcctgacgcccacaggtccctcttggcgggtcctaccccaggccagagagcccaggctctttgagtcctgttatccccctccctctggaggccactaagtggattttaaatccttactcctcactttttcctttcctcctcctcgagttcttcacttagtagtgaccacccaggcaccaggctcttgaacattctggtcagctgctgttctctgaagcatgagtcactgcatgacacaggacattctcgctgggcaagggggctcccaaggcctgcctcaccaagggccctgttttccgacagaaacttttcattccataggaaatgaggtcacacaccaagagcacacgggtaaccggtgagaaaatcctggtgccaggaacgggggtggtggtggtggtagaagaggagaggcaaactagaccctaacactcacgaaccagcagggggaatcacctgtggttcttgggta

SEQ ID NO: 28187 - DNA, 2300 bp, Homo sapien
accccatctttatcctgacaaagccaagatagcccatgtgccgcttaccaggctggagagaggctgtgactcactgtgtctgtgttccgttccagcaacccactgaatactttgacatggggattttcctggctttcttcgtcgtggtctccttggtctgcctcatcctccttgtcaaaatcaagctgaagcagcgacgcagtcaggtagtgcctctgtgtgtagcccgtgagcagtaacccctcttgccgtgacactggggaaaaccaggactctcgtcaccttattttttgatggtgcaacatggagcctcacagctgtggactctgagctctgcagcctgttcccagtggcctagaaactgcaaagatggaaaaaaaataagagcaaactaggccaggcaccatgactcacgcttgtaatcccagcactttgggaggccgaggcaggcagatcacttgagctcacgagttcaagaccagcctagtcaacatggcaaaaccccgtctctaccaaaaatacaaaaattagctgggcatggtggcatgtacgtgtagtcccagctactcgggaggctgaggtgggaggatcacttgagcctagagggcagaggttgcaatgagctatgatcacaccactgcattccagcctgggtaacagagtaagaccctgtctcacaaaaaaaaaaaaaaaaaaaagatcaaaacttacagcccagtgccttctctgttctaaaagggctagtcctacaaaggttaagcattgggaatatctccagcaggtgtttcgaaggaagtgtttattttatttttttatttctttgagacaagatctcattctgtcacccaggctggagtgcaatggcatgatctcggctcactgcaacctccacctcccggggtcaactgagtctcatgccttagcctcccaagtagctggaattacaggcacccggctaatttttgtatttttaatagagacggggttttaccatgttggccagcctggtctcaaactcctaacctcatgtgatccgcccgcctcggcctcccaaaatgctgggattacaggcgtgagccaccacgcccgtcccaaaggaagtgtttaagtcaacgttaataagtattataaacactccacaggtctagaatatgtgctgtagcagtctgagttttgagtgctttctctgaagtctattctggcatgattgagaagtgtttgcctgtcccagtacatcaagtggcgccctagagccttggtcctcagatagaatctgtggtccagcagcaacggcagcacctggaagcctgatagaaatgcagggtctcaggctccgctccaggccacctacacagtataccaggctctctgggtgatgcttgattaacagtagctgctgtagcactgcagccacatcactttgtgcttgcaggaaggagaaactcgggtagggggtggtgagaggataagcagagatctggacccccaaatgtatggcagggtcatgtctcaggggagagatggtggatcttggaaggcaatctgtagagaagagaatcaccaaagttctcttgagggttgagcgaccacccccaacaagatgatggcttgtgttttttgagcacagcctatttgccaggtgctaagcacttacacattgtctatttactgtcaccacctccttcaacagaaagaggaggaacgcttggcgtagaacaggttgataactcggggtctggcagagttaggaggcagcaggtccaagtaattggaggagacccctgccttcaaatcagagagacccctgctagtcttgccacttaggaaaagcctaggttgatgtcgtggacaccccacgcgtctggagaatatgtgctatggcagtctgagttctgagcgacttctcagaagtctgttccggcatgatagagaattgtctgcctgtcccagtgaatcgtgtgtcatgtccctggggtgactgccactttcatacgtactggaccctcacacagactacattctgccctgcagaattccatgaacaggctggctgtgcaggctctagagaagatggaaaccagaaagttcaactccaagagcaaggggcgccgggaggggagctgtggggccctggacacactcagcagcagctccacgtccgactgtgccatctgtctggagaagtacattgatggagaggtaatggcagaagcaggcccgtcctgggtggggaaaacataggcaggtcagcagaggtgcccaagacctagaaggacagggccctgtgttccatcacacac

SEQ ID NO: 28188 - DNA, 2300 bp, Homo sapien
agtgcgtgcctataatcccagctacttgggaggctgaggcaggagaatcccttgaacctgggaggtgggggttgcagtgagccaagatcgtgccactgcactccagcctgggtgacaagagtgaaactccgtctcaaaaacaaaaacaaaaacaagggcagtatagactttggttgggttcagcctttgttggttacttgaggcatgatacttgagcaacttgtgcctcagtttctttatctgtaaaacagggaacagtgctcaaactcataggatggttggtagcatttcatgacatgatgctaataaagtggctagaacagtgcctggccttcaggaagcattcaataaatattagttttattgacataggagaaatagcttagaacaaagtaccctgggttagttctaaggaaggctgagggttacctgttgtggcatagtcaattgaagtgagttacaatgaaggcagagaaggcagaatttgatagaacttgaagagtatgtatcaagtgctgcccatgtgaacagctctctgctggaagaaggagattgaggctgagcacaggctcacgcctgtaatcccagcactttgggaggccaaggtgggtggatcacttgaggccaggagtttgagaccagctgggccaacatggtgaaaactcatctctactaaaaatacaaaaattagctgggcttggtggtccgcgcctgtaatcccagcgtcttgggtggctgatgcacgagaattgcttgaaccccaggaagcggaggttgcagtgagccgagatcgcaccactgcactccagcctgggggacagagtgagtaaaagaccaagcagagtcattgagtaaaagacctagcagagtaaatctaacggatgagtgtgtggaaagatgaggtgcaggaaagccaaactcaagatggagaaggagaaaagagaaacagatgacctactcctattatgcctttttttgcttgacatttccctcctgtccctgctttgcagagtaaagacagatggtaatttccaggtagcccaggagcccggtgccatttttccaagactgaccagctttgaaaagactcttgcctgcccagtctccagacattcgcaaactcttcccaaagacaaaccctttccaaagccctgctctaaaatcgacccagctcttaggaggtgaggccagggctcgccactgaaagggagcaattgtcctctcaactgtctgtgggtccagctgccataggcctggaggtggttccaccacagcctgtggtgcggtccgcctgcaggctctgattcactccagggacaacacttaaaaacgcaagcaggcaacacatgcgattccaggagcccctgccagattcatactctgtttttccatcatttcactggcctccccctcaggagggaggctcctgaggcattttacaaataaaagaatcaaacccaccaacaggacgagcacctgataagcagtgaggcattgcccaagagttcccaggaagaggcggctttgttctcctttcaagcccttgacactgctaacagctctaattactgcatttgccatgggatgtaaaagaaacccacattccagaaaccatgtagtcttcccgggagagacatgcagggaaaggtgcccaggtctgcaggaacgtgttctttcattcctggtccctaaccttggcagctgttctgagaacttaacagtgcctcctttatgtacatgaaggagggcacttttgcacatgtagggatgcatctcactacccatatccccaaatctggtctgcatatttgactacatttcctgcaaaacatacttcttaagaacatgaagatcttcaaaattcatccaagccattttgggggaaatgaggacttcagaagtttctgaggctagaagcaaaaccgtatagaacttcttcccacataatttaactataaaatctgatgatgtaacacccacccacacccacatcacaaaccaaagtgacatcacaaatactagagataatggctcaaagctgcctgcattgagcccacatctaaacaaacagcaatttgcccatatgtgactaaggcagagaaagacaggtgactagaaatattaaaacaaaaacaaaaaaaaagagagagagagaaaaaggaaagagaaaatacatatttcttccccttactaagctagcgaaaataaaatttaaggcaactgaaatatggtaaggtgattttatttctatagatgacatttcttagaaagccagatctctttaaatatgtgattctaat

SEQ ID NO: 28189 - DNA, 2300 bp, Homo sapien
tgctttgggctgagagcttcacctgcatcttctcatttcattctcttcaaaggcactgctgtctgggagggcacagaagtcctggaataagggttctcaggtccggtggagaaggtgggaagggcccaaaattgtggaaaaggggaaagctggacaaaagtggggatcaccggtggcaggaggtggggggggcggtccccaggaccgaggctggctgggtgaggggatggtgggtgcccctaagttccaataagaggcccagaggatccttgaactcgggaatgacacatgaaaacaataactgaacaagattcttcttgctacagcgctgagtcgtgtgggtggagagggacagagatcgagaggcctcgtgggaggtagctgcgcccttggggcccggccctgcgagcagccgtgggtggggaaaggagtttgggggtacgcgggctctgggagtggataagggggtggcgcccgggggttgagggggcccaggggcgagtgtacccaaggcgtgccggtcccgcccagccgcgctctgggtgcggcgagtctgcacactggtgcagatgttcccgccgccgcgccgggcgcaggtctgcacttgcaagcccgggaccagggacttgaaagcgcccggcgcgccgcctggacctgccccgccgggcgtcaccgctgcgctttaggcgggaactgtaggaaaatcccctctgcctggcgggagggcgggggaggaggacggcccacgaccgaccccgggtgcggcaggggaagaccttgccggggtcggggcggggggaggcgggcaaagggcctaccacgctggggccgaaagtttaagcaagccgcgcgctctctgatccctaacatcccaggctgtaggataagcagtactgtctcatccatttctggacgttgcgttgggcgttttacttgcttctatctcatcgaatcctctgaaggccttttattattcctattctgcaaacggctgagcctcagacagatcaggaaagttgccctggttgaaactggctatgtgataagatacggaaccaggggtcagtatgtggctgcaaacttggggtggagaaagaaattcaacatttgctgaactcctactctgcgtgcgtaaaagcttccatgctttcgttttggtttttttttgtttttgtttttgtttttgagacagggtcttgctctgtcacccaggctggagtgcagtggtgcgaagaaggctcactgcaagcccgacctccagggctcaagcgatcctcctgcttcagtctcctgagtagctgggaccactgagttatttatttttttcttgtagagatggggtctcgctgtgttgcccaggttggtctcagaatcctgggctcaagcgattcttccgtctcggcctcccaaagtgctgggatcacaggagttgttagccaccgcactcggctgtaggcattcttatttagtgcaagcgctctgaggagtagcagctattatcacctccatttaacagatgaggaaattgaggtaagagctatttttcctttaaacctgtccaaggtgttacatgtgaccaagtgggatgtgaactctccaaagcattctttttttaaccattacgatgagctaagcaagggaaaacagtttgcaaactgctgttgtaattattaccgctgtagctgagctcgcgcgtgggtcacgacctaagtgagggtggagcaggggtcactgggagcccggcctatttcagcccggccaaaccgcttggtgacttggaggccgggccgaggccccgcccctcacctgctgatcctacccttggatgggacaaacagagggccctgctgggccggcccaggtgaggcgagagatgggcggggcctgatgcgtgagtggcaggagcagcgcgcggccggggcggggcgtgcgtgcgcagtgggctccgccccccgggcctctccgcggatccgggcgggccccaggctgcaggggcggtggcggcgctgagctgggcgggccggggcggggcggccgggcggccggggcggggctacactcgggccccgcgtcctgctcccatggccgcccccggctccccgcgctgccccctttaccccgggccgcgccccggggccccgcactgacggcccatggcgccgccagccgcccgcctcgccctgctctccgccgcggcgctcacgctggcggcccggcccgcgcctagccccggcctcggccccggacccggtgagtgtgagcgaccccccgccgcccgccctgagcggagcccactcgag

SEQ ID NO: 28190 - DNA, 2300 bp, Homo sapien
agcctcagtaaggacaggcccctctctgatgtgaaaatgttgataacagcttttaccaggagagtctcttgctggggaaattctgcagcggcctgagtctgccacaagtttgatggcattggttaagaaatgtggatgccattaatcgcaggagcatctcagacatgttgcaaacagacctagtagtgcctcctcattctgtggcacccatctgacaccctagacacctctcagtccctccaaggcattatccagtgcttctccttcctaaacagctgcatgtttgagcttcctaaacagctcaaagcacccctggggtgatgggtttttatctgggccgcttgattggggtttcagacaggcctggcatcctcttgggggcatggctcctcaggagtgacgaattatccagggtgttaagtcactgatctagctgtgtcaaaaacaagggctaaccagagaggtacaaagctgcatttcttggaggtcagagagatggcacaggagatgtgccaaaatttcacgtgaaaaggagggcaacagctccccaagggggcaacattggcaccatggtgatgtcgctggagggagagggagcccttgggggactatgtgaagtaggggagagtgggtgacaggccattaccatgatatctcaatccttcccacactcctgtaacgaatgtacaactgtcctccctgcaaaagaaacactgaggctgcgagaggggcaagacttgcctgagctaactggagcagaagtagcagaggcagggtttgaacccagctctcactacctgtcccttgggacagggcaacagctttctctatgtggacacactggtgatggatcccccgtcctgcctgcctgcctgcctatggtggcctatgctgcctgcccctggtgagtccaggaggggcaatccagtgactggcagatcctttctggggagtgtttctagaagggaccgtgggtctggacaagccataacaggaagtagccaagctgggcaagggcttccccagcccaggcctaactactgcccatcgatccaggcagaaggcggggttagagactgccctgggagattgggggtctgggtcccctctgatgagagctctggtctctccctataaacacacactcctatcacagacacacacataacacacatgcacataaatccacatcaagcatgcacacacatccatcatacacacatacgacacacacatgcacccctgcacacacacactacgcttacatatacctttgtgggatgtagagccattcctccagaagcccatccatgtaccccagatgaaaccacccaacaccaattcttaccttgttacatatggtgaaatcaaggcatagaccgaagtgctgtggttaagagctgttactctccgaagtcaggcgatctgggtacaaatcctggctctgccaaacccctgccacggtgctttaggtaaatgacagctcctttctgtggcttagtttctccacctgtaaaatgagaataagaacagactctgcacttatggggtcagcccagatctcctcctagggagactgcgagtgcctgggcctcagttttctcttctgtaaaatggggatattgtgcccagttcgagcagagtggcttgaagagtcacctgagataggatgtgaagtggccgcggtgaggtgcccaatacacgtggcgcgcactgctcaggaagctttccttggagggctggatcccgcaaaggtgtcgaaaaaggatgagtcccggatatcattcgctcaggtgaggtgggttcgggtcccggctgcgtctgggaccgtggcccgggcctcagtttcccagtctacagcccgtgggaggacacctcggagctggcaccccgcccccaaaagggccccgcggcgcagggcgtggggctcaggtggacacctggcgggcctcctggcgggggcgccctggccgcccgggcccctccgggctccttccgggttggcagcggcggcgcagggggcggggggcagcgcagaggggccgggcgaggccgggagcgcgcgcccccgcccccgcccgcccgcctcctgcccgccctccggccgcggagctggaaaccgggctccgcgcgtccggggcggctggcggcgcgggcaggcaggcggggaggacaggctgggggcggcgaccgcgaggggccgcgcgcggagggcgcctggtgcagcatgggcggcccgcgggcttgggcgctgctctgcctcgggctcctgctcccgggaggcggcgctgcgtggagca

SEQ ID NO: 28191 - DNA, 2300 bp, Homo sapien
gcagccccagcagaccctgcctggaggtcggggggagctgggagtggggattctggatgagcctccctcctccaggcccagcagggacactgacctctgcctaccccccccaccccagggctgccaggagccatagagagtgtgagggtcccgctgcttccccgaaatggtagatgctggttggggggctggggccagggtgggggtcaagagcagatgtggagctgccagtctgatatgctttaccccccagaccaagtcggtgcttgggggcttcccgggcccaccggccccaagggagatgccggcagtcggggcccaatggggatgagaggcccaccaggtgagtgcccgcaatgctgccccacagctcctctggccatcccctccaccaggtgggcccttccctgctcctgacatggccaggatgacctgggccctttcatctacttgcctcttcactcagcaccccaccacggagtgccctgcccacgcctgggctccatgaagtcctctcttatgttcactgacccacattccctgggcacctacacttatcaggctctgagctgggcactgggtggggtcagacatgtccctgcccttctggagcttccatgctgctgggagcagggctgggcagaggagaagcagcaatgcttgccccatgtgaccagggtttctatgaggggttttgggggtttgggagccccaaggaaggaagactcagcctggacgaggtggagaactaggtgctgtgctcatccccctgttagactaccaggcagcctaggcctgtggactccggggccctctctcatgcccactgctccaggctgccttgtcctgtcgctcaaggccaccctgggcctccttgcctcctgtatacccacaaatccgtgtgattccattgcaggtccacagggccccccagggagccctggccgggctggagctgtgggcacccctggagagaggggacctcctgggccaccagggcctcctggcccccctgggcccccagcccctgttgggccaccccatgcccggatctcccagcatggtgagtccccctgggatcccagcaggtggaggtgggggtggagtagccatcagcacagtgcccgctaccatctgccacgtgccttctgtgtgccagccctgctcacgataggccacatgtgacccagtcctccagcaggcgccgttgtcctcctgtggttacaggtgaggaacactgaggaccagagagggaaggtggcttgccagggtcccacagcctgggcgtaggggaacggcttcaaacccaggctgcctccagaacctgtgcttagagccaccgggcatcaggccctcccaagccttggaactggctggaatccagttctcggaacactgggacgcaaaagacccggcggcaggaagtgagtcctgaactcccaaggccacaggcccggcccctcctccaggccctgacgtgcgtccttggcttcttccctttggcagcccagcctgacctgcccatgggctgccaggggtcagagtgtggagcgccaggtttcagcctcttctccactgtgtttttggtgcacaacccagcacaccattcattcattctgccatcccagcattcattccatctcactatccatacgatggggacaatgacagtgccagcctcccagagctgcgtaacatccatgtacagaagcctggcacacagtaggtggtggataaatggtatcttttattgtcattcccatttgacaggtgacagtacaggctctgaaaagtagaaagtgttgctggatgtcaccagctggattgcagtggggttagaacccacatctccctgcctcctggtcttgcgggaccaacactctccacactcctcaccctggagcaggtgcccaggtggtaccagccatgctgcaggctgccccatagggcagtccaagctgtcttggcagaggtggcaggtgaagactaaccaccccactctacccagctctactcactcatcatctttgctcacccaggagacccattgctgtccaacaccttcactgagaccaacaaccactggccccagggacccactgggcctccaggccctccagggcccatgggtaagttgagtccaggccaggggtaaagggtgaagttggtagatggcagagggaatagggtttgtggctatcaggagggagctgatggggcacttcctgagattgtactttgttccggcccttaggacatcctgtctttttccaggtccccctgggcctcctggccccaca

SEQ ID NO: 28192 - DNA, 2300 bp, Homo sapien
cagtgagtacccgggacgcgtggcccgggccagcggggaagggtccccaaggccggtcggctgggtgggaggcctcgaacgccgtgcctggccccgagaccctatccccggtaacggtcgaggtggagcaggccctttaatcatccctcatccgatatccttgtttctacagaaggggaaactgaggcccaaggaaattgagtatctctgcaaagtcaccagctgagttcgaaccagacagatcctgggaccccctactctatccgccaccggaagaatctccgtccttgtctttccattctgccctcccggcttcccagtaaggtaggcagggcctggtggtgcactgccccgtttcatagattgaagaaagtgaggtccagggggctcaagtcccagttccgagtgtccacgggtaagcccttcacccttgctaaggtgcccagagctggggaatggttgtgaggtgtcgatgcaggaggaggtttacggtgggtgccttggccccaaaccctgcctccaggcaaggctgaccctgcccaccttcctggacctctagccccagccccctaggtggatgcccgggtccgcgaagggcagggttcaccttcaaatccctcggcaggaccaggagccaagctagtgtccttttttcagtgaacatatataaagcactggctgtgtgctgtgaataccctggggaatgtggggttggatcagaggagccatgagctcagaccacctgcctagggagacagactggccaagctgtgctcctaaggataagatccatgatgttagggggccagaggaggggaagggatatttgagctgggcttccaagggtgaaataggagtttgcctgctggcaaaatggagggaaggacaatgcaggcagaggagctttccacatttttcctgcaggaaactggtagatgtggagaaggcgcttggcaggggagcaaattaggcagccttcttgtctctctgggatcctgcttcctgccctgaatcagctcagtgggagtcctgggaccgagaggcctgaccaggggtgaagacctacaggccctggaggacaggctggatgcaagagaacagcacgggggagaaggccttgctttggtgggcagggaaaggccatgtttgagggccaaagctgggaccagctaggctggagcagccacctccatattgaggccttctcgatgggccagttggtggctacagacgcctgccatgattagtgcggattgctatggtttatggaggaagagttgtgggccagggcctgccttagcctattcctttttatttcatcatactctgaggaaaagaatttatgaatttccattttacagatgagaaaggagaggctcatctgtaaaatgaggctcatctgtaaaaagatgaggttggaaacttgcctcaggacacagagcagaaagaggtggagcgcatactgtacccttcctgtggaaaggggagccagggccagaggggctgtgccagtaaggaagcaggaggaggcttacagtggatgggttcaccctcaaaggggatgtctcagtcgcaggtctctgagtatggctcaagatgtgggacttctgcccatctgccctaccccttaccctgtcggcttgcccattgtctggccccaccccagggtcaagggcaactgaaaccatctggagcattaaggctgggaacaggggaggggaggaaggagggaggtagtagtctgagggaagggggaggacagaagagggctagagatggccctgaattcgccctggggggtgagggcctgaacccctctttttgggagttcagggcctatcaggactcagaagtctctatgcctgtcccctgccagtccttaaacagaggtgagtggaatggtaagatggcttatgagcgcatgggttagggtctgagctccactaaggccaagctgctgggcctgcgtctccagcctgtttccacctctgtaaaatagggctgttgataaggtgcttgagagggtattggtgagataaaagctccagtaataacttgttattgttttcttttatccccagcacacagccccaggaccacccttgaccgtcctcaaccaagcgatgcatgccaggggcccccatggccaactgtccccagcactgcctctggcctcctcagtcctgatgctgctgatgagcaccctgtggctggtgggggccggccccggcctggtcctggccccggagctgttgctggacccctggcagggtgagggccagccacgtggaccttggagg

SEQ ID NO: 28193 - DNA, 2300 bp, Homo sapien
gagacatcccctttgagggtgaacccatccactgtaagcctcctcctgcttccttactggcacagcccctctggccctggctcccctttccacaggaagggtacagtatgcgctccacctctttctgctctgtgtcctgaggcaagtttccaacctcatctttttacagatgagcctcattttacagatgagcctctcctttctcatctgtaaaatggaaattcataaattcttttcctcagagtatgatgaaataaaaaggaataggctaaggcaggccctggcccacaactcttcctccataaaccatagcaatccgcactaatcatggcaggcgtctgtagccaccaactggcccatcgagaaggcctcaatatggaggtggctgctccagcctagctggtcccagctttggccctcaaacatggcctttccctgcccaccaaagcaaggccttctcccccgtgctgttctcttgcatccagcctgtcctccagggcctgtaggtcttcacccctggtcaggcctctcggtcccaggactcccactgagctgattcagggcaggaagcaggatcccagagagacaagaaggctgcctaatttgctcccctgccaagcgccttctccacatctaccagtttcctgcaggaaaaatgtggaaagctcctctgcctgcattgtccttccctccattttgccagcaggcaaactcctatttcacccttggaagcccagctcaaatatcccttcccctcctctggccccctaacatcatggatcttatccttaggagcacagcttggccagtctgtctccctaggcaggtggtctgagctcatggctcctctgatccaaccccacattccccagggtattcacagcacacagccagtgctttatatatgttcactgaaaaaaggacactagcttggctcctggtcctgccgagggatttgaaggtgaaccctgcccttcgcggacccgggcatccacctagggggctggggctagaggtccaggaaggtgggcagggtcagccttgcctggaggcagggtttggggccaaggcacccaccgtaaacctcctcctgcatcgacacctcacaaccattccccagctctgggcaccttagcaagggtgaagggcttacccgtggacactcggaactgggacttgagccccctggacctcactttcttcaatctatgaaacggggcagtgcaccaccaggccctgcctaccttactgggaagccgggagggcagaatggaaagacaaggacggagattcttccggtggcggatagagtagggggtcccaggatctgtctggttcgaactcagctggtgactttgcagagatactcaatttccttgggcctcagtttccccttctgtagaaacaaggatatcggatgagggatgattaaagggcctgctccacctcgaccgttaccggggatagggtctcggggccaggcacggcgttcgaggcctcccacccagccgaccggccttggggacccttccccgctggcccgggccacgcgtcccgggtactcactgcagagcgcgcccggcaaccccgaaaggccggtcggggaccccggctgggagtcaggactctagctcccgggcgcgacccgagaaccctgaatccattccgcgcacacccggccgcgtgacccctgccgaccggctggcgcgccacccattccccgcggcccgcggattagtcagcagttgttctagtccgggtcccttcccccagccctcccgccgatctccgtctccctgcagggccgactcttcagcgaccgtccctagagccagcggacggaaccattccaaacagcctagtctcgtgctgagagcctctccggtttcacgctgagacccgctcacccccgctctggccccttagatgctattttggcccgagtgtcacgtcgggcgctctttagagaggactgggacaagagttgcggacgcgaagaacgagtaagcggtggttcatccctcctgaccccacccccgtggcctggcccgatggtcgcgcccggggttgcgagatttgcgcctgcgcagtgcggcgcctagagggaaagcgagagggagacggacgttgagagaacgaggaggaaggagagaaaatggcgtccacgggtgagtatggtggaactgcggtcgcgccggcggtagccggaacgcccaaactgggggtcgttcgtctctgggcttggctgggaagactgagtggagttgccgagagggggttgaggcacccgccgcggcccg

SEQ ID NO: 28194 - DNA, 2300 bp, Homo sapien
ggtcagaagggctcaaaagcttaagaggtctagcctaacttctgtattttacaggaaaggaaactaaggaccagattacttatgtgactctctgaaggcccccccagccaggcctaatgtgtttactttgtgtcaacagaaaccacaactgtaattctaatacagtacagcacatggtagttactggtgaacaaggtttgaacaaagttgactgaaaaaaggcacgtccagccacgcaaaaatgtcaacgcacacgttttgccttttcaggcttttgcagagcagaagagggtggatagggcacctaggaaaccacttcccaccgggaggttagctgtggtatttcagtcctctcttctaccggcactctttggtatccactctttggtatcccggcacgaacagccaacacttacctgtttattgaccacagatggggagaattcttaaactgtccttaagttgctggattctggactccaaaaactctggagtgcccagaacttttcctgtcttccttctcatcttctcccactgtctctaaggcctggaaccaggtggcctgagaatacccccggggcaaaaatgctccaccctgccaattttcgcgggttagtgtacccacagattgcgaactgcaggtgatggctaggcgacactcttaaacgctccttccatcaaggaccactctactcccattttggagttcccaaccggggcttgcttgcaagtgcctttaagattgcttctactggccttttttcccctctcctctgtcgacctacgaaatcaacaggcctgccggcctaacgcaggcgaataaacgtgcgaggccactgctgaaacataattcaaatgaaggctcggccttttgttcctcctaggtcagagagaccagaaatatctttctggtagcgtttctcgtctctcgacccaggctggccttattatacaacggatgtccctcggcgtttgcagaaaaagggccctgggaagccacttaattggttttgggggaggggaggacgtggattaataacgataaaaatggagaagcccaagaaagcggcaaactgggggccctggaggagggaagcacattctgtctaaagcccaggcgagcagaagttcggcttggggctggaagccacagagggggcagctcggcagcgccagacgccccagccgactgggtcttaaggatgacggggctcccgctcataggccggcacccctcggcccacaaatccacggtatctttatttgctttttcccctggtttctcaggaaaccctgaaaacggggagggaggcctcacagggacagcagcctgcgggccccccggcggtttcatagtgaccggcttgaggcctggccaaatcctccccttcacgcagggcctcgaaggccgcaggccccgcccacgtggcgggaggcccggagctcagggcgcgaggaccgccacacaatggaggccaaggcgggccccgcgcgcccccgccgcagcaagccccccgcgcgccacgggcgccggaagattccagaaccggcccgcccggttgggggaggggagaggaatgcggatccccgagctcgtcgggccgcggcgggtgcctcaaccccctctcggcaactccactcagtcttcccagccaagcccagagacgaacgacccccagtttgggcgttccggctaccgccggcgcgaccgcagttccaccatactcacccgtggacgccattttctctccttcctcctcgttctctcaacgtccgtctccctctcgctttccctctaggcgccgcactgcgcaggcgcaaatctcgcaaccccgggcgcgaccatcgggccaggccacgggggtggggtcaggagggatgaaccaccgcttactcgttcttcgcgtccgcaactcttgtcccagtcctctctaaagagcgcccgacgtgacactcgggccaaaatagcatctaaggggccagagcgggggtgagcgggtctcagcgtgaaaccggagaggctctcagcacgagactaggctgtttggaatggttccgtccgctggctctagggacggtcgctgaagagtcggccctgcagggagacggagatcggcgggagggctgggggaagggacccggactagaacaactgctgactaatccgcgggccgcggggaatgggtggcgcgccagccggtcggcaggggtcacgcggccgggtgtgcgcggaatggattcagggttctcgggtcgcgcccgggagctagagtcctgactcccagccggggtccccgacc

SEQ ID NO: 28195 - DNA, 2300 bp, Homo sapien
gtaaagtgttagggccaagaggtaatagaaacccctggagttttccttggaactgagattaattttcgtcatttaacagggatacttacttccaggttcatctgagcagggacttgggaggggtctctttgccttactctggtgtttccattacggagactttgagccaagttagattagtttatggcagcccagtttaggaaatgatttttttctggttggttggatggtttggttggttttttttttttttttaagatggagttttgctcttgttgtccaggctagagtgcgatggcacaatctcggctcgctggagcctccgcctccggggttcaagtgattctcctgcctcagcctcctgagtagctgggattacaggtgcccgccactctgcccagctaattttgtgtgtgtgtgtgtgttgtttttttttttttttttttttttttttttttttttttgacagagtcttgctccgtcgcccaggctggagtgcagtggcgccatctcagctcactgcaagctccgcctcccaggttcatgccattctcctacctcagcctcccaagtagctgggactacaggcacccaccatgatgcctggctaattttttgtatttttagtagagacagggtttcactgtgtttgccaggatagtctcgatctcctgacctcgtgatcctcctgtctcagcctcccaaagttctgggattataggtgtgaaccaccgctaccagccaattttttgtatttctagtagagacggggtttctccatgttggccaggctggtgtccaactcctgacatcatgcaatccacctgccttggcctcccaaagtgctgggattataggcatgagccaccgcacctggcagtttgttttttttgagatggagtctctctgttgcccaggatggagtacgcgatctaacagctcactgcagccttcacctcccatgccccagcagtccctcccacctcagtcttccaagtagctgagaccacaggcatgtaccaccatacctggctaatatttttctatttctgtagaggtggggtctccctatattaccaggctggtctgaaactcctgggctcaaaccatcctcctgcctcagcctcccaaagtgctgggattttttttgtttgtttgtttttgagacggagtcttgctctgtcgcccaggctggagtgcagtggcgcgatctcggctcactgccagctccgcctcctgggttcacgccattctcctgcctcagcttcctgagtagctgggactacaggcgcccaccaccatgcctggctaatttttttttttgtatttttagtagagacagggtttcactgtcttagccaggatggtctcaatctgctgacctcgtgatccgccctcctcggcctcccaaagtgctgggattataggcatgagccattctcgcctggccttgacctggtctgtttttaataaatgagaaacataaacccacaaattctctaaatttatgatgccatggacttacgtaaatgttacttcaacctaaaacttaacattattgttagtttctggtcttcagcagtcccctttgagaaaaagcatttattccctaacagatcacttctcccggatcacctaaactggtagcacacaatatcgcaacgcacttttatagcgtttactgtgatgaatggagcatattaatgtctcttctgtggatatgattgattctcccccttccttagtgttgtcttcaagcaaatatagttggaccgacactgagtttgatgtagtttactttaggattgtatttattattgtatttatttccaggcttaatcataacattgcttattgctcgtagctttgtagcattcttacccaggagttttgtggttgaccaaccacacaaaaaaagtcactttttaattttatttattatttctcctcttagaccgcaggatggaaacaagcccactgagactagtcaacctcaatctagcacagggggttacaaccagcccagcctaggatatggacagagtaactacagttatccccaggtacctgggagctaccccatgcagccagtcactgcacctccatcctaccctcctaccaggtcagtctactttttgtggcaaaacaaaaacagtgacaaaacagtttttttcaggttgttgaccagcttgctttgacttcttcagctaaggtatgttatctgactgtcgcagtgataagtcatctgaccatacttggttacattaaagcctgagatctagggtcccatagtgttgcct

SEQ ID NO: 28196 - DNA, 2300 bp, Homo sapien
atttgatcgtggaggcatgagcagaggtgggcggggaggaggacgcggtggaatggggtaagagcaaaccttttctccttttacctaattttgtttcatccataggattttcagtggaaagaagggactgaaagacataagaaattaatttctgcatttccatggacaatctgttgagctcaagccatcttctaaaacatggaaatgtcatctttgtggcatatattaagtggcagtttattttctttccctgccagtatacttcgttgggtcggggagaacaaagaatggttttgaaaccagagctttcagttcccttcatggtttccagaggtgagaagcctctgtgggtagtagatttgggatggaacacacacaacccttctaatgaccctaagttgttaactaactgcctttgaatggttgtcttgaaatacctggtgtatatactgcagaaaaggaatgcagctgttttccacagtgtttgtccccaacttctgtttgtactcagaatcgttgaacatatgaagattttggtcccataatccttaaactatagcctgaggtgcacctgattacatagagtttggatggagcaaagaaaaatccaatagcattttgcagagtaatgtatataattatgggctcacttcctactggagatgttgaaagtctaaatcggtttgaccattttgattgatggcacaatctggtttagaaaactttgtttagatcaatgacataaccctgctgcctctgcctgcccttcccctcccttctcccatccccttttccctatctggtgtctgtactttgatgaaggtgagctataatattggtggttaacataatccagaaggcttagttctgtgtgtgttctgtccctatataaactggtaaagaaaaaaaaaagttatgcagaatgttagatatttacatttgatacggtgtgccactattcaaggaaaaattaaatagcattttttaaaaaacagaatgaacttcaaaattaaagttgatttttaacttccatattagcaaatactcttcactactgaaagacagtactattttgcatattctgcataactttaagaaagtctttagtgaaatctttattggaagaaagtcatttgacaacaggcaaaaatttaatgattcggtatgaagtaaaatcaatcttctgatttggaaaatactctattataaaggtttcacttctttttggatgttttaaaatagacatagacacttgaaagtactatcatcacgtctcaaatcacctagaattcctagtatttttaaattgcaaatacaatttcaagtttatttaaatactccagaagttataatcctactaattgtgctagactttgctagtagagggggcccctctttctggatgagaagtctctcttgcagccatagaagagaccatggctttccccataggtttttcaacagactgtgaagcagtctgtcggatcctgtggggatagacgggcatttccctcgttgcccccctttttattgtggtgtggtgatggttttcagtgtcttgtacaggtaaggcactcaatgttgttaacatgccctttttcattgcctcagtattttgatattttcattggctgttaaacgtggaaactttttaacatgctttgtcgcatttatatgctacaggttacaaagtgagagccttgtatacacttcaatacttaaaaagtacccgtactcagtactcagccggcagcataatgaaaagtgggactagacacggtgtccatatggagaggaaaaatatacatagaatatttttaacaaaatgtattcattgtataaatggaatccttctgtaactttggtaactgcatacttgttgtttggtaatgaaccagaggaggtataatactctagaattgtgtaacattaaagtgtaaacttttgtgtttaaagagagagaacattttatggtgtgtacttttaaaaaggaaacaaagctgcatgcaacagcttgaaattgtatattcaggtattaaaggtgcaatactggttagaaaaaactcagggcctcccactggggagctgcctttatttaattttaaagaaaacaaaatctaacccaaaaagtccaattcatatttccctctcccctctttaagtaattttacatggccatagtcattattctaactgatatgtctataaagttgcacccccagtccgttgagccttggtatttgttgtaaattctcctttcacagcgattgttaaatctattcgtgccctgagatgtatgg

SEQ ID NO: 28197 - DNA, 2300 bp, Homo sapien
ccataaacctcaaaaccttaaaaccccaattgaatatttactaaatctatgaagtaatttcaggagaatttacatttttatgatactgagtgatctttttttccccatgaagattttatttctccatttatttgtatatttatttgcttatttatttactgagacagtcttgctgtgtcaccaggctggagtgcagtggcacgatctcggctcactgcagcctctggctcctgggttcaagcgattgtcctgcctcagcctcctgagtagctaggattacaggtgcccgccaccacacccagctaatttttgtatttttagtagagatggggtttggtgaaaccatgttggtcaggctggtcttgaactcctgacctcaggtgatctgccgcctcaactcccaaagttttgtgattgcagacatgagccactgtgcctggcctgtctctatttgttattttattttactttgagacagagtctcactccttcacccggctggattgcagtggcgcagtcttggtttactgtaacctctgcctcccgggtctccttgcctcagcctcccgagtagctggaattacaggcgcctgccagcacccctggctaatttttgtaagtagagatgggatttcaccaggttggtcaggctggtcttgaacttctgacctcacgtgatccacccacctaggcctcccaaagtgctgtgattacaggtgtgagccaccacacccagcctatttagatcttcagtaaagactatcgatttccttaaaggtcttgcaaattttactagttttacttctaggtttcgtttattttcaagttgctgtggttaagggtcttcgttaaatgacacttttctggttattactggtgtatagaaatacagttgatttggccgggcgcggtagctcacgcctgtaatcctagcactttgggaggccgaggcgggtggatcacgaggtcaggagatcgagaccatcctggctaacacgatgaaaccccgtctctactataaatacaaaaaattagccaggcttggtggcgggcacctgtagtcccagctactcggaggctgaggcgggagaatggcatgaacctgggaggcggagcttgcagtgagctgagatggcgccactgcattccagcctgggtgactgagtgagactccgcctcaaaaaaaaaaaaaaaatacagttgattttgggcgggcgtggtggctcatgcctgtaatcccggcactatgggaggccgaggtgggtggatcacgaagtcaagagatcgagaccatcctggccaacgtggtgaaaccccgtatctactaaaaatacagaaattagccgggtgtggtgacacgcgcctgtagttgagctacttgggagtctgaggcaggagaatcagttgatcccaggatgcagaggttgcagtgagctgagatggcgccactgcactccagcctggcgacagagcaagactccatctcaaaaaaaaaaaggaaatacagttgattttggtaaatcttatataaggtgatttctccctgcttgtaggtgtgtgtgtgcacagatatcacacacacctcaaaagtaaaatgcttttagtgtctactgtcacattctaccctgtgcaagactccttgtttgcttttttgttttgagatggagtcttgctctgttgcccagactggagtgcagtggcacaatttcagctcactgcaacctccgcctcctgggttcaagcctcaagcctcttgagtagctgggagtacaggcttgagcatattaaaaagactgctttttaatatgtatataacatgtagtttattgaggaatgtggagtttatcctggttaagaaagtagtatttaccatcaaaattttggaaataaagatgttaaaatagatttccaagctggatacagtggctcacatgtgtaatcccagcactttgggaggccaaggcaggaggatcccaaggattgcttgagcccaggagtttgagaccagcctggacaacagagtgagactctgtctcacaaaaaagaaaaaaatgcatttccacattattcataccacagttttgccatattttcttttcagtttttagggtatcacgttcctttttttaagtcagaggtatcaatatatatatcctgttgtaatcttttttaagtcctataaatagattgctcttgtgttactggatatatgtaaacaattacagactaaactgatcgtgtgcatatataatgcaaaaaagtacacgtgaagatattcttatacaaggtagctcctgaat

SEQ ID NO: 28198 - DNA, 2300 bp, Homo sapien
ctggctaatttttttgtatttttttagtagagacagggtttcaccatgttagccaggatggtctcgatttcccgatctcgtgatccgcacgcctcggcctctcaaagtgctgggattacaggcgtgagccgccgcgcccggccgggaatgttaagacctaagccaaccacccctgctctaaatcactgcatggctcccatgtccctcaaaagagacacggcccccaaggccctgcttaaccggccctggggtctctctaatctctctacctcctccctcacccacctccctgcactccagcctcagccacctccccagtcttcttgagcacgccggacacatgcccaccatggggcctttgcactggccgttccctctccctctccagatatccccgaccttcctccctcacttcctttcctgatgagggattttaaattgcagccccctcacacccacaccctcacccggctccatccctgtcttctctgcacctcatccctgtctctgccctggggctgcctccctgccagacttggacaacaggccctgagagctggctctgcttggttccctgctgttttgctgttgatttccagtgcccaaagagacccagcacacagtaggtgccacgcaggtgtcagccttgaggattgctagttactgccttcctcactggaggaagtgccatggggggcgctgaggtgagaaaacgcctttgaaaaggtcacacaggccaggcaagtggctcacacctgtaatcccagccctttgggaggtggaggcgggcagatcaccttaggtcaggagttcgagaccaacctggccaacatggtgaacttgtctctactaaaaatacaaaaagccgggcgtggtggcaggtatcagtaatcccagctactcgggaggctgaggcaggagaatcgcttgaaccccggaggtagaggttgcaatgagcccagatccagccactgtactccagcctgagcgacagagcgagacaaaaaaaaaaaaaaaaaaaaaaaggaagaaaataaaaaagaaaaggtcacaaggactctctgggatgcctgtgaatgcctggcaccaagaggcctggctcacaggtgctcaaccaatgctgctgatccgtggatgagggcgtccccataatcgtcatgttcaaatcctggctccaccagctgctctcctgactgtgccccagttgggcatgagtgtccttcacagaggtgacacaccagttcattcaggtcaagggcgcagagcagtcctggcagcacacagtaggagatttattggagctctgagcctggctgtggttggcggcttccctgcaggcctgccccacccgtgtagcatggctgccgcccagacccgcccgacgtcccgcccagcccagccggcagcagcagggggcaggatttcccgctgatcccggcggtccgtcctctgcagtttaaaaagagcccagcggggcttaaccctcccgcgtccggccggcctccgatgccccccgtcccctgttctgtgcggaactccggctttggccatctgcctacttctctgagcttcagtatcctcatctgtaaaaccggttcccctcatttcagggtcaaaaatgagcattcagtgagcacaaggagccctcagtcgccaggggcatcctccccctccccgcggcggtgccgtttatctggccaggggaggtccacccgggaggaggtgactttgcagcctccagccgctatcgcttcctgccttcatcttgggaacaggccgtgctgtgcgccagcccggggagcccaccgtctggggaggggggcgattaaaaggtcccaacctcctccccaggagaccaaagaggttggacggggccccgggtactaggctgggtgggggttgggcgcctgggccggtcgcagttgtctgggggccctggggctctctgcgtcgagagcgctcgaagacccgggattcctggcccgatcgcgggcggggggagaccccagctccaccccagctcccgccggctcggggaaggggcggcccctttaagagcgcgcggccccgcccgccccctccgggcaggatccgaattccagggaggcggggcggagacggcggcgaggaggaggccgcggcgcgggacgcatagagctgcggctcgggcggcgcctccctgcggcggcccggcccggctccggcccccgctggggcaatgctccccggggccgcgggatgagccaggtgagcgcggagacccccagcactccctgcctggtgcgcatggacgggggtgg

SEQ ID NO: 28199 - DNA, 2300 bp, Homo sapien
cacaaaaattagccgggcatggtggcatgtgcctgtagtcccagctactctagaggctgagacaggagaattgcttgaacccaggaggtggaggttgcagtgagccaagatcgcaccactgcactccagcctgggtgacagaccgagactccatctcaaaacaaacaaacaaaagaccgtcctggtgtcagcttttcagacttctgggttttgttgttgtgttgctgagtgccttgttatttactccttgccttgttccccgaaggaattgaagcagctcacaaaacccagaagcctgaaaagtcaaaaacccagaagtttggccagatgtggtggctcacgcctgtaatcctcgcacttttggaggctgaggagggaggattgcttaagccaggagttcaagaccagcctgggcaacatagtgagattccacctctacaaaaaataaaaataaatcagctggatgtcgtagtacacacctgcagtcccagctatttgagagactgaggcaaggaggatcacttgaacccaggaggttgaggatgcagtgagctaagatcacaccactgcactccagcttgggtgacagagcaagaccttgtctcaaacaacaaaacccagaagtctgaaaagttacaacgtgaaagaggacatcaagtgaagggaaaaatcatggtaggaaagaaagatgaagccagcagtccccactcactgagctagaagacctggaacactagacagaggtggttctgagcttcctagtggctgaggagaggagtgaaagcggaccccagcccccgatctagcatgggaggatgaaagcacagccattgttctggagacactttctggttgtcattatacaggctccctggaggatgtgcctcctcccccttcaggatttagctcctctacttcccctgggctggtgtgggcacattgtctgtgctttgacagtccctagatcccatgtgttctagaaccttctctcccaaagcagaactttttttttttttcctgttttctgttttttaaatctatctcagcctcctgacaagcaataagatttggaatatttgttgaggggataaataaatgaactccttagtcagtgcagagatctgtgcattgcggccatttcttgagcattgccgccatttcttgagcattgccatgtgcaggtcagagacgtgggagcccccacacagcggggaggagagcagaggcggaggatgggggggctgggctaacccaggctttccaagctgtgatggggcaggagcttctccactagctcgagggagggggaacttgggctctgggcgcctgttttggaggttgcatccctttgaggggcgctacgggttgcaactcacgcaggaaaggtgaccttagtagtgatggaggtggagtgggccaatttctggatctttatttagtcacctccagccttgctgggacagggatctggggctaagctgctgtggtctcggcaccctctgtccccacttcccctcgaggacggctgtttgaatattgtctagtgtgggccatttacccccgtgggcaggaggaaggtaggagggacttcaaaggagacttcaagggcccccccactgcccttctaaccttgcagattcccctctcgggcctgtttcctcttctctcaaccagcgatgccaggctgaggctgtaggttcgagaatcacgtaggtaatgggcctggcacatagtaggctctcaagaaaaggttggagcctcttgaggagtctgcctgtgatggatgcggagcgcagacccagcgcagtgcggcgattcgcccaaggtcacacagccgccccccccaattcggaccccgggcggcctgactccgggggccggggcttgtcgggagccagcgtgggggcgagcagtgtttggaagagcggccgcggcagtgggtgggaaggggcttctattttggagcgggtgagaggagcgggacacgcggaggaggtaaggaaggggtaggccctctccgggatctctgtcccccagtcaccttcctgcgacccttcctgggaggggcgtcctgggcggtgggggaaggtgggaggggcgggcggttacctcatcgccgcctccgggaggccccgctcgctcgcgccggcggctggggcggcgactccaggcgcggaagcgagagaaggatagaggcacagaggctccgggaggcagcgctgccccccgcgccccgcaccgctgcgggacccgcgccgcgagaggggcggacttcggcgcctcgcgcgtccgccggcgcc

SEQ ID NO: 28200 - DNA, 2300 bp, Homo sapien
ttcttgttcctaaaattatatttagatatatgaagacaaaatttgaaaaatattgagaactttttttcctttaagcctaaccctaacttcagcagctaaaaaccaaagtctttagatggaaatgttttttcttcttcccttttttttccttaggacctaggacctctttttccctctcttagatcatgttacatctttgtccctggacactgtttccaaaagtctcaccaagggcttctttatacatctagaaaacataagagagaaagctactatattttaggctttattgctcagttccttttcttttcttttttctttttttttttttttttgagacccagtttcgttcttgttgcgcaggctggagtgcaatgctgcgatctcacctcactgcaacctctgcctcccgggttcaagtgattcccctacctcagcctcccgagtagctgggactacaggcacccgccagcatgcccggctaattttttgtatttttagtagagatggggtttcaccatgttggctaggctggtctcgaactcctgacctcaggtgatctgcccacctggacctcccaaactgctcggattacaggcgtgagccaccatgcccagcctcagttccctttctttaattctaaaaaatgaagttaaccagaactgtttctgggatgtgacatcaaagtcataatctttcaaatgtgggtgtgagaaatattaagattaagagaggacagccacactggctcctcaagggtgaaaccagttgttccaggtatgcccctcttttaattttgaccatgccatccccttgaggcatttcttggcctgtaaatgctgaaattgagggggggatcccagcccagaatgctgtctccttagcaaagtgactcattatactggccagagcagtttctgaatcaaaaattccccgtaattaaccactttaaaaaatttgccctgacacttccaaagatggaatccaaaccctaagctttttcttgcctaaatttgctggctttttttttttgagacggagtctcactctgtcgcccaagctagagtgcagtggcgcgatctctgctcactgcaagctccgcctctgggttcatgcttctcctgcctcagcctcctgagtaactggaactacaggcacgtgccaccacacccggctaattttttttatttttcatagagatggggtttcaccatgttagccaggatggtctcgatctcctgacctcgtgatctgcccacctcagcctcccaaagtgctgggattacaggcataagccaccgcgcccagccgctgcctgctttcaaatatgattcgtgtacccgatcagattcatcagagaacaaggtctcagcccctttggcctctatggggtagggatacagtgcatgataacagccaagcaggtgccaggaaaaacaccagtctttctcatggcatctatgagtctgagccccgttaggactgaactgtagggttttttccattcctgcggagagaatgagaaatctcttgcactgatatccatccaagaggcaactgcaagaccaggtaccagcattaggtgctcacaatggagaaaggacacgaggagatagctgccctcagtacatcactaagctgtaggtagggaatcattcatggtgaagtgaggtgttttgttttgttttgttatctgtgttttggggtggctttctaaagcgtttcacttttctccgcatctcctcccttctctactttaatttcctgcatatgaaacaacttcagagggatacatttctgcatcatcagtcccattgggccctctgcagagggatatgtgaaacagatactgcggaaaaaagctgcagccagcaccagtgcactgagtggcagttaagtttgtgagtagttgcttagcacctgtaaaaggaagactgtcacggaaagctcagcgctgttggggtatctgcagctgtgctttgaccagctaccctgcagctgtgctttgaccagctaccctgcagctctgtcactttttttttaaatccccagaaagaaaggctttctcacccgtttctcctcttggtcagttgcatacagcacccatctgtcaccagcaggttgcgtcctgggaatttagggccctctgatgttgtattgggcctgcaggggaggggacaggctctgacggctttttcttctggagaggcaagaaattccgagcagctctcacattagttatctaaggtattttgtttgttttattcacttttctttctttctttctttctttttttttt

SEQ ID NO: 28201 - DNA, 2300 bp, Homo sapien
gcggagcttgcagtgagccgagatcgagccactgaactccagcctgggtgatggagcgaggctccgtctaaaataaataaataaataaataaataaataaaaatggaataaggtttgtaatttagataacggtattttaccaacaccaccaatttcctgcttttgctattatactgcagatatataaaatgtcaccattgtgggaagctgggtgaagggtatatgggactcaattttggtactaattttgcaatttcctgtaagtctataattatttaaaaataacttttaaaggctttgaggctgcttaaacatctaaaattatattaaatataaaaaccagtaatatctatattagataggacgtagagacttagcaataagtgcacttagcagtaagtgcaagcttatttattaacaactttttgataatattaaaaaagatggataacaacctcaggggattgtttttgagattagcagtaccatccacgtaatggaatactatgcagatactggaaagtgccaagtagaaatgtatttactattttgggaaacttttaccaatattttggtgagttaaaaaataccaacagtggctcacgcctataatcccatcactttgggaagctgaggtgggcagatcacttgaggtcaggagttcaagaccagcctggtcaacatggtgaaacccccgcctctactaaaaatacaaaaattagctgggcacggtggtgcatgcttgtaatcccaattacttgggaggcccaggcaggagaatcgcttgaacctgggaggcagaggttgcagtgagccaaaatcacgacactgcactccagtccgggcaacagagcgagaccctgtctcaaaacaaacaaacaaaaaaaaacaaatgatctatcaagtttggaagaatattcaccaaaatattaaaagtgattgtcttaggtcagtgggattgcagatggtttttttcttttttctttttttttttttttgagacggagtcttgctctgtcgcccaggctggagtgcagtggtgtgatgtcggctcactgcaagctctgcctcccgggttcacgccattctcctgcctcagcctcctgagtagctgggactacaggcgcctgccaccacacccggctaatattttgtgtttttagtagagacggggtttcaccatgttaaccaggatggtctcgatctcctggccttgtgatccgcccgcctcggcctcccaaagtgctgggattacaggtgtgagccaccatgcccggccattttttttctttttttgagacagggtctggatctgtcgcccaggctggagtgcagtgctgcaattatagctcactgtaacctcaacctcctgggctcaagctattctcctgcctcaggctcccgagtagctgggactacaggtatgagccactgtgtctggctcaaggtcactcatcttaagaatggaggggtccaaactagagctgtaaacctagtttggacagagagagacccctctgtaatcccagcactttgggaagccgaggcgggaggatctctcgggtccatgatttcgagaccagcctgagcaataaagtgagactctctctacaaaaaataaataagtaaataataagtaattagccgggcgtagtgctgcgcacctgtggtcccagctgcttgggaggctgaggtgagaggatcacctgagcctgggaggcggagggtgcagtgagcccagatcttcgagccactgcactctagcttgagcaacagagcaagaccctatttcaaacaaacaaacaaaaaatgagtgaccttgagcaaaaccctgcccctcttagaacctcagatttgccgtctttacacagaagatggacttcaaactccctacgaccttgcccggccccctcacgctgaattggctagcgggatggtttcccaagggctctgcgggagactgcagcatagcagcgccgcggctgccgaggggttaataccgttgggctcttccccttttcttgccccgccccacgggcaccacccccgccagggttgtacccttgaccccgccttcaggccttgcgtccaccggaagtacccgcgcgcgggcagctcacttccgcccggcaggtgacagccgcggggctccgagccgccggcagcccggacgcaccgggagagcgagaggtggaggccgcggacattttggtgccaagccgaaccgagccggggcgccgggagctattgggacctgcgggtgaggaagcggggacccgggcgagccaggagaagaagtg

SEQ ID NO: 28202 - DNA, 2300 bp, Homo sapien
aaaaagggacaaagtgaagtgggtgttctccattcaaatgcctattttattttttggagttgtgtggttttcttttttttttttttttttgagacggagtctcgctccgtcgcccaggctagagtgcagtggcgcaatctcggctcactgcaagctccacctcccgggtccacgccattctcctgcctcagcctcccgagtagctgggactacaggcgcctgccaccacgcccggctaattttttgtatttttagtagagacggggtttcactgtgttagccaggatggtctcgatctcctgacctcgtgatccgcccgcctgggcctcccaaagtgctgggattacaggcgtgagccaccgcgcctggcctggagttgtgtggttttctataacatataaaaactacagataggattggaaggctgtacttgaaagtctcaattttgcgggggggggggtgggagggacagggagacagagtcttgctctgtcaccacgctggagtgctgtggctcaatcttggctcactgcaacctccgcctcctgggttcaagtgattcagcctcccgagtagatgggactacaggtgtgcaccactgcgtccagcctcaatttttttttttttttttttttttactttgtccttagccactgtcaaggaattgtcctccttttcagaagcgggaagcagaattccttcatcgatagagcataggaactaagctcaggtagacctgagatggtctcccagcccagccacttacaagccatttgaccttgggcaaattatgcaacatccctgagtccttttctcattttctgtaaaatgggattcaaagcagttatattattgacaagattaaatgaggtaatgtgggtgaagctcctgcctttaataggggctcggtaaatgatagattcttaataaatcttagaaccatcctagaagccttggccatgtatccagggtatctttgttcctgtgtaacttcttttctttcatctgttgcccagaagaactattgaggtacacagtagatgctcagtaaatttttgttgaatgaatggcggagcttcactactttctttgtcctatggtcttttttttttctgagacaaagcaggattctgtctcccaggctgaagtgcagtggtgctatcttggctcactgcagcctccgtctcccgggttccagtgatttttccgcctcagcctcctgagtaactgggattacaggcacgcaccaccacgcccagctaattttttgtatttttagtagagatgggtttcatctggtctcgatctcctgacctcaggtgatccacgtgccttggctgggattacaggcatgagctatagcacctggcccttattgtcttacaatagtactttacaccgtgagctttgctctaggagatgtcctgagagagcctgtaagaaatttggccaggtagatttgggaactgctatagattctagccctttccacagatgaatcatacatgttactgttttagcagcttagagaagtcatggggagaagtctccctagccttttaagcttggtattttctaatctcatttgactgtatagggtaacatcgtgccttgatgatgctgtgatgaggcttctaatgagttaatgtgtgccaagcatttaggacagtgctgagcaaagtgggtcccacaaaggggctgctgtaagcccgtccatccttgtgcagatatttttgtgggaaagatttctagaagaggcacattcaaaaatttgatgggatcaggtgtggtggctcacacctgtaatcccagcactttgggaggccgaggcaggaggattggctgagcccaggagtttgagaccagcctgggcaacatggtgagatcccatctctgaagaaaaaaaaaaaagttgatagattcctcagaattacttttcaaaatctaatctgccatgatctaaagtttgtttctccaggaaatagataagcagctgttttcctgtaccacatgtgttctggatccttctcctcctccctctgcaccataactgaagatgggatggagcataactgaaagtcacccctctcttctctctcttgcagaagcctggctacagataagggaccaaaatgactgactcaaaatatttcaccacgaccaagaaaggtattacttgtttaataatgggccttgtcctacgctttctcttcctgtcccttctgttttcctcctatggcggtagggagtaggggtgggaatgaaggcctggaaacatgtggcaggaatgacctagagct

SEQ ID NO: 28203 - DNA, 2300 bp, Homo sapien
ccagctgctcaggaggctgaggcaggagaattgcttgagcccaggagccggatgttgcagtgatccaagtttgtgccactgcactccagcctggctgacagagcaagaatctgtctcaaaaaaaaaaaaaaaagaaagaaatgtttagagtgtgctaattatcctgacttgattattacacactttatgcatgtatcaaaatattactgtgtgccataaatatgtacaattattacatgtcaactgaaagtaaagaggaaaaaaaagtaaaccaaaacaagacctgagtgtctcagagtcctctaatcccatgaggaatcatatttaaagccgaccaaaattaggtctttatttttaattatgcaaaaagagaaaattcctttaatatgtgccaaagggaatagggaaaatgataagattatattcaaattatttgaaatttgaaaacaaagcagtaaagatcccactacacagaaaggcatgaaaatgaaaagattcggggttgattcaaatggaagaaagcacaactcacttcacgggtaacaatttttatttgagaacacaagtttcacaagaaaatcatcttttttttttaaattgtgacttttatcttaacactgtgtgaagtactcaaggtccaagaagcttaatggtcatttgtcaaaatagtaattatccaattttttcctatgaattatgaaattttttcaaaaccagaaataaaccaatgaaaataaataaaaattccctagaatttcctcaatggaatgcatgcccctattacctttgagtctgatgtatatgaatttaaaccattttgtaaaattgcaaatccaatcatacttaatacttcaggtttccaagcaaagcttgaagcctacaacatattacaggaattatctttactgacaactgatggaaacatctctaaaataagcttttgaagttagtacattaagcctaatttaatataaaggcaatttaatcttatcttcatatgaaagaaaaatacactgtcaggatgaaggatttactaaagttacaattaactggagatatatcaccagtaaaaacctaattccctgttataattaaatcaaagcctcattaggttagagggtgtggaagggcatgacccagtgggaggtgggaatctcaccaataaaacgccctcatgtgccccttccgcacaagacctgagcgcccagtggaagcagctggaggacagaggagcttccagcagaagaggtgagcccatgcctgtgtgtgtgtttttcctccttagatgcctagaaatgggggttatgccttgggggatgaatgagagaaattcgtaattaatgaattcaacaaaggctgtctgagtgctgcctcagagttgaaaaccagtcaccctggatccccagatctccagtctaggagtggtggcagtcaatttggtattcatttccaaggctggagaaggatgtgatttttttttttttttttttggtgagacagggtcttaactctgttgtccaggttggagtgacctggtgtgatctctgctcactgctaatttttctattatttgtagagagggggtcttcctgtgttgcccaggctgatctcaaactccttggctcaagggatcttccagccttggcctcgcaaagtgctgggattacagatgtgagctactgcatccagtccctctctttttttttttttttttttttgagatggtgtctcactctgttgtccaggccggagtgcaatggctggatcttggctcactgcaacctttgcctcccaggttcaagcaattctcctgcctcagcctcccaagtatctgggattacaggcgtgtgccaccacgcctggctaattcttttgtattttcagtagagatggggtttcacccatcaggctggtctcgaacttttgacgacctcagatgatccactcacgtcagcctcccaaagtgctgggattataggcctgagccaccacgcccggcctcccagcccctaattcttatgttcatcaatcaatctcttgctggggttcccctaggaggaggtgaaatgaccccagctcgctgttcctcacatgggtgctgccgtgtcactggctcaggctcagttgctgggtcaccagtagaatggacccttcctccacctcagttcagagcacagtgatgattcgtgactttctttcccaatagaacttcaaatctctgaagacggggggtggggggatgtgcttgagtgtttgtactcatggtcttgttctagaagtgacaaagctgggacacaata

SEQ ID NO: 28204 - DNA, 2300 bp, Homo sapien
caggaagaaacagggagatgcagggaaatgacaggagaagagcctggggtgggagggagagaaaacagaactgctggatgtgcagggtcagccctgccacccctccggcctggggttctgccgcacaggaccttctgctcacagttctcccagggacgtttggaaccggaccattctggataccaggggtggggtgtggcttcattctaagcatggatgcctgagggcactggggctctgtctcctcagggatccttgaagagaaaggccaaagggatacattagtaactaaagtctgtcattcacatagtgttctttcttcctgttacacatttctatgaattttgaaatatttatgatgttatgtttaccattttgatctcaggaggaatactctccccgctccaaaacttccctcttctttacttgtgaatctctgtcctctttctccagaaaccttaccaactattgatatttttaccgtccccttggttttgccttttccagaatgtcatgtagttggagtcatgtattaggttgacgcaaaagtaattgcggttttcccattctttaaatgccagaaaccgcaactagttttgcaccaacccagtattatgtagctttttcagatgaacttacttcactaattaacataaagtcaccctgctctgccgcctttctgtgtgtctcatccagtgaaggcatgccctcacagtctttctgatatatgccattgtcttttctatgccttgttggagaactcctttaaatcacagaataatactgtgttttatggatgattttttttttcattcacctcttgaacatcttgcttctagtttgggtggttatagataaagctgctgtaaacattcctgtgcaggctttgtgtggacataacttttcatttcagctgagtacatacctaggagcacaatttttggattatattgtgaaaatatgttaggattcataagaatttggtggatttcataagagaaatcatttggttctggtgttgtctttttggaatgttcttaatgtcaattcacttaataggcagaggctgttcagattgtctgtttctagtgtgaccttgggaagattatgtctctcaaggaattgagagactgtgttatcaaactgtgggaatagagtcattcataacagtccctgattatccttttaatgctcaacagtttggtagacgtggcccctctttcatttctaatatgagtaatgtgtggtttgtttgtttttttttttttttgctttgttagcctgcagaggtttattaattgttaacaattataattaataattataataattaattggggggaattatcgttgttaatgtagatgaatgcacatccaggaaaatgttacctatactgagcaatgatggcaacaacttgttttttcagttctggttaggacataggcatttatccagctctctgtccaaatacacacacacacacgcacacacatacacacgctcacgcatttactatgaataaaatctatcgtactcctatcatttagaaaatcacataatccggctgggtgcagtggctcatgcctgtaatcccggcactttgggaggctgaggtgggtgaatcatgaggtcaagggttcgagaccagcctggccaacatggtgaaatcctgtctctactaaaaatacaaaaaattagctaggcgtggtggcagttgcctgtaatcccagctactcaggaggctgaggaaagaaagtcacataatccattaggtgatattccaatgtttatttaactcataacttctataatacattaatttgaacttacagaaataaaaaagcatttggaaattgatcccagaatacagaatatttctataggaaacaagatgtgaaccataagactcaatgagttggatggtggcaataattaatacttaggactcaatttataaactaatcaaattagattaagtataatcatgaattgtcccatatttttctcctatgactttgtataacgcttttaccgagtagagcgttcctaagtctgcccacccaagtaattttcttaacctgttttttgtttttttgcagtgggggcttatttggcctccccaggatggactggagcatcagtagtgcccgggtttatcacaggacagatactcaagacactcttatcaccattaggtggacttggaggagcaaaaaacaagtgcagtggctcctcagcagagacactcctgaatgtatagacatgggaaccaccttcagcatcaaaaaaggaaacgttc

SEQ ID NO: 28205 - DNA, 2300 bp, Homo sapien
agcctcaaactcctgggctcaagtgagtatcccacctcagctctccaagtagctgggacttcaagcatgagccactgcacctggctaatttgaactttttaatttttttttattgtagagacagggtcttgttttgttgcccaggctggactcaaactcctggcttcaagcaatcctccttcctcctcagcctcccaaagttctgggattacagacatgagccaacatgcctggtctagtcttaccttttactaatgcggaaactgaagcccagagatgcagagatgtgcctaaattacagttaattaggaacaaatgtaatcctcaaatccagatctccaacattcatgtcaaaactccctaaaatcaaacaacatcggctggggaaagaacattcaaagtctcccagtccaagcctctcatttcacagtaggagaaagcttgactcagagaagagtggaatatgcctaagagtgacatgcaggcaggcagaatgcaccatcaatgaatcgaaaagttagttttttactatatgtgccctaaggcatataaagtgacttctccgagcttcacctttgaaatggaaataaaatttacagtatagggttcactgtcaggaggataaatgattcatgaaatgcccttgggccagcacccagcacttagtgggtgctcaatgcatggtatctattattaatactgctagaaccttgtcatttccccctctgccattctgccttccaggtcaaacctttctcagtacagtatagtaggtaagactggggactactgcttcagctacttgtcagcagggtgactttggactggttactacccagcaactctgggcctcaaatgtctcatcagtaaactggggacagaatagcagtacccaccagacaaggctgtgggagggggaaataatgcatgtgactggccttcacacaaagccaagcacatagtcagtgctcaataaatgcgggctactactgttaccaattacttccacagccatgtctcatgtctgtcaccatcccagactgcagggagtctggtccaccagcaagtggccggtccccaacctccagggctctccagtctcaagagtgctgacgcagcaagggaaggagctcccagtacatccacaccggctctcctgactcagctctgatttctcaggtgcctgtgtagggtcgacaattctgagcatgctggacgaaatcccgatttttgcattcatgtaagagtcttggaagagcccccttttcacacgtgcagaaactgaggtctggggaggaggaagaggctgctgcccacggacacacaggtgccaggaccaatgtctggggaggaggagaagggcgctgttcacggaaacacaggcgccagggcttgatgcaccggtgtcctcgcttgtggctgggtccttctgggacgatcccctttcccaggatcccgcccctaggaagagcaccggccatgcccctacctgagccccaccccctgagttctttgagcaccgctgcccccaggccgttacgatgagggaagccacgacagccaaggctacggctaccttcctgcagcccctggggatgccactgatgcgacgccgcggcggccaaggcggggctgaaggcggcgcgcccggcttccctgagccagtttggaggagcgctcttcaatcttccgaggccggatgaagcattcgggcgttcccactgcggaagggcggggatggctgtgacgcaggcgtgcccgccgtcgcctgcagggggcgctgttgctggcgcgattctatcaagcgcagagccagccgaggcagtatgccgaggcagagaaaccggttctgcagtcccagggcctcggtttccccctctggagagtgttcgtttgtgacagggtctcgctctgttgccgaggctggagtgccgtggcgtgatctcggctcactgcaacctccgcctctccaggtttaagcgatcctcccacctcagcctcccgaggagctgggaccacaggcgcgccaccacacccagctatttttattttattttattttttgtagaaatgaggtttttctgtgttgcctgggctggtctcgagctcttgggctcaagcgatcctctcgcttggccgcccaaagtgctgggattagaggtgtgagccactgcaccgccgaaagtgggtttgatgacaatgttgtgaggctacagtggaacccagataaatttatgaaaggaaccagaagacactgataaataaccaaattacttaacctccctacacctgtttgttga

SEQ ID NO: 28206 - DNA, 2300 bp, Homo sapien
aactccctccccctcttccctcctcccagcgcactctccttccagtaaaaagtggttaaagggacagcgccatcaatttcccagctctgagggtctgcttagaactagggggctggaaggagacagagggcaaagagaaaggaactggcagaggtctttcctgggggatatgtctgttctgtcctggggatcctggagcaggaaaacccgcgtaaagtaggggtgtagtgggtgttgagataactgcctgggggaggttcagagtggaagtacgagtctacaaactctcaagggcgtctcagggctcccagcatccccaggggtcctttcgcaggggtccctaagcaggaggggaacagcccagaaaacacggaactggacccccgacaggaagtccagggaggggtccctggctcactatgtgaccctgctggatcacttgcctcccctctcgggtcccctcagcacagtgtccctcccttccttcccctaaagtaaaagcagagggttaatctctttccccgccccacgcccaacaaagagcaggccctgtccccggtgctgaagcgccagccgcagcaccacccccactcccacagcataaaacatgagccaaaaccaataaagagccaaatgtcacagccgttgcagggccccctaaatcctggggaccccttcttctacctgacatcctattggggtgagggactttggtactcagaaagcatctcatcacttccctgtaagagagaagggatgccgactcaggcgcctgcttgtctgttacaggagtgggggaagagaggacaagttgaggctgagaagatggggagggggagggagaaaagaggacttcctagtgttgacagaacggcaagatgtgggttccccatccccagttcagccagagacccctcaaagtggaacttcctggggcagtcgggggtcaggagttggagcttgtctctggggcaagaccccttcgttgtacagatggaaaaacaagggtgggaggacacagcttgtccaaggtcattcgaccagcaaactgcctagctgaccccagtgtgcagaagctggctcgggtgacacccatcatttccccccaccccacacaggggccagctctctcaacttcatgcccaagccctcctacggtacccccactgtaggttctctgcccctcaaactcagcccagctttctcctgcctgttcaggggaccttctgcccgcttcgctgagggtccgtcccctttactggggctggcagcagggtctcccatctcctctctcgggggccactgcagactttttagagaacgccttgcctccccccaaccccacccatccggggttccctctctccatcctctgcagtgtctcccatacccccattcagggtagccttgctattctccccaactccaggtcccccttcatctattccggggctggccgcggagtttcctgagcgctctccaagtgggtcctctagatgttaggagaacactgtacctcccccggtcaggggtctcctgtctccgttctatggagcgtccatgctcccattcaggactgccttgctccctcctctgttccggggctggctgcacagtctctgcaccccctatcctgaaagcctctcttaactatttggaaagcctcgtgtcctgtctcatacagggatcccctcatcctaatgactgcaatcttccattgctccatcccgagggcatcctgcccctattcccatcaggtttctccttgtcctctccctgtttcaagtcccctttcttattccgaacacactcgcaggctcttccgacgcgcacccgggggtcctcactggcccactccgggagtcctctgcccgcttccccgacctcgagggtctcctctgacgcagcgtcgattccccttccctcctcggtcccctgccccgcccctctcactgcggcggagccggtcggccggggggccgcaggggaggaggcggagagggcggggccctcctccccaccctctcactgccaaggggttggacccggccgcggcggctataaaagggccggcgccctggtgctgccgcagtgcctcccgccccgtcccggcctcgcgcacctgctcaggccatgatgagcttcggcggcgcggacgcgctgctgggcgccccgttcgcgccgctgcatggcggcggcagcctccactacgcgctagcccgaaagggtggcgcaggcgggacgcgctccgccgctggctcctccagcggcttccactcgtggacacggacgtccgtgag

SEQ ID NO: 28207 - DNA, 2300 bp, Homo sapien
gtgtagtgactcatgcctgtaatcccagcactttgggagaccaaggcagacagattgtttcagttcagagaccaagctgggcagcatggcaaaaccccatctctacaaaaaatacaaaaaaaaaaaaaatagctgggcatggtggcacatgcctttagtctcagctactcaggaggctgacgtgggaggatcacctgagcctgggagttggaggcttcagtgagctatgatcgtgccactgcactccagcctgtcatcacagagtgagacactgtctcaaaaataacaacaacacaacaacaacaaaagacagacgctcagcccctccccagacctgctgaatcagaatctgcattttgataagatccccggtcatctgtgtgctgctaaatttgggaagtactagtctgaggggtaacccccacacttactctgagacaagcattctgccaagtcttttccattcattgtctcactgaaacaaccctctgacgtagggactctaatgaccctctttttccagtgaggaaattgaggctcaaagagttggtgtgtcttggccaaggtcacccatctagtgaggagcaaagccaagaggagaaactgcggcctctaccctattcctgaaactcaaaagatggtaatacagggtgatgagagacactcgcgattcaaatgggagcgttctaagacctcttaaacccaaatttataaaagtagaattgtggtcgggtgcggtggctcacacctgtaatcccagcactttgggaggcctaggcgggtggatcggctgaggtcaggagttcgagaccagcctgaccaatatggtgaaacccccgtctctactaaaaatacaaaaattaactggacgtggtggcgtgcgcctgtactcccagctactcagtaggctgagacaggagaattgcttgaagctgggggaattgcttgaatctgggaggcagaggttgcagtgaactgagattgtaccactggactccagcctaggtgacagagcaagactccgtctcaaaaaaaggaaaaaaaaaagtggaattgtttgctcaggctcccagggttctcttgaataatattttagtttgagggacaataaatttaacttttgttaaatttatttaggagctttctcttgagggccattttttatggggcaaaagttgttttatttcaaaagtttcaggcttagctgtgttgaagaagaccagctgttccagcctgggcaacacagtgagaccctctcaaaaacaacaacatcaacaaaaaaagaccagtcccaccggggtacacattctgggtggtcactggaatgatttgccaagtgactttctctagtctcataatgcccaccattcacattcctgttccaccaaaacccatatcattcgatgtcagtgaccttcaggatagtctaggaagaacccaaatagtgaatttgccctgagtttatactaatgtgttccgtgatccatcctgcagaaaactcctggaaggtgaagagtgtcggattggctttggcccaattcctttctcgcttccagaaggactccccaaaattccctctgtgtccactcacataaaggtgaaaagcgaagagaagatcaaagtggtggagaagtctgagaaagaaactgtgattgtggaggaacagacagaggagacccaagtgactgaagaagtgactgaagaagaggagaaagaggccaaagaggaggagggcaaggaggaagaagggggtgaagaagaggaggcagaagggggagaagaagaaacaaagtctcccccagcagaagaggctgcatccccagagaaggaagccaagtcaccagtaaaggaagaggcaaagtcaccggctgaggccaagtccccagagaaggaggaagcaaaatccccagccgaagtcaagtcccctgagaaggccaagtctccagcaaaggaagaggcaaagtcaccgcctgaggccaagtccccagagaaggaggaagcaaaatctccagctgaggtcaagtcccccgagaaggccaagtccccagcaaaggaagaggcaaagtcaccggctgaggccaagtctccagagaaggccaagtccccagtgaaggaagaagcaaagtcaccggctgaggccaagtccccagtgaaggaagaagcaaaatctccagctgaggtcaagtccccggaaaaggccaagtctccaacgaaggaggaagcaaagtcccctgagaaggccaagtccccagagaaggaagaggccaagtcccctgagaaggccaagtccccagtgaagg

SEQ ID NO: 28208 - DNA, 2300 bp, Homo sapien
gcatgggccctgtaacgcctttgttttggccaatttctcccatttggaatggctatatttacccccactgtatctacgaagtaactagcttgcttttgattttacaggctcataggcggaaggggcttgccttgtctcagatgagattttggactatggacttttgggttaatgctgaaatgagttaagactttgggcgactgttgggaaggcatgattggttttgaaatgtgaggacatgagattcggaggggccaggggcggaatgatatggtttgggatttaaatctcaacttgaattgtatttcccagaattgccacatgttgtgggagggacccagagggaggtaattgcatcatgggggccagtctttcccgtgctattctcatgatagtgaataagtctcacgacatctgatgggtttataaggggtttctgcttttgcttcctcctcatttttctcttgccgccgccacataagaagtgcctttcacctctcgccatgattctgaggcctccccagctatgtgggactgtaagtccaattaaacctctttttgttcccagtttcaggtgtgtctttattggcagcgtgaaaatggactaatgcagatgggaagttgcacttaacagcacggacagtatgatcccgttttgtttacaaataaaatgtttatttatccacaatcttcactcagtttcggactgagaggcgaaattataggcaatttttccattttctttttgatactcctctgtatattctgaatctttgataccaggcatgcattactctgcaatcagaaagcaaaagaggtttctattttgaagagaagaaaagcatttaatttaaggaccagatcttttagagacctgactgaggcttcattgttactgtttttatctaaaaggagatgtcagccaagtgtccctgatcccagcagggagacttttaccccatgcacacagagcctttatccttacctctacaggaaggtaaatactacagtgaggaggccgaggtggatctgcgggaccctggcagagactatgagttatacaagtacacctgccaggagctacagaggctgatggctgagatccaagacctgaagagcaggggtggcaaggatgtggtaaggagtgggaccaggtggccgtgaacctggtgggtttacatagatgaggctgtttttgcacctaccagggcccttcctgatcttgatcttctgtcctagccatgatcaggtgattggagcctgagggctcccaaaacctgtgaatttattggaacttcttatcaccattcagtcaccaattacaggaatgaaagtacaggataattaattttttccctactaatttgatcattcatccaattaatatttattaagtgccaggcattttgctaggtgttgagaaatgatggtacttatacatttgcttgatacaaagatggatgtgtacaagtaaattgtagataccaaaaatgaaattatcattaatagtaaatgaataaatgaggttttaggggcagagaaattaaacaatgtgactaaaaactcgatagataagttttttaaaatccattttttcccccaggaatctcacgtatttgtgcttatgctgacaagttttgttagaattattgcattcaatctattctagccaagctttatggctataattctgttattttccatttaagttatcctgtaatgttatttatagaggtcaaattttatgacaagatgttactattgctgggatctctgtgtaggatctgtagagatagattgtgcctttgctgcccttattccatcttcaattcctgttactctagtccaagcagaaattacttttttttgcccgagattcttaatcattttccttatacaatcatcctcttattttcttcatgacccttctcatggttctgagctccctccggtgccgtttttggccccagatgaggatgggtcagtggtgaaggactgaaggaagctgagctagccctgtcgtcagtgggctttactgttttctttgcccacaggcaatagaaatagaagaacggaggatccagagctgtgtgcatttcatgactctaaagaagcttaaccgattagcccacatcaggttgaagaaaggaagagatcagacccacgaggtagtagttaaaaggtttaattttaaccttcctccttcctcctccccatccccttctttttttttttttttttttttttttgagacagagtctcgttctgtcccccaggctagagtgcagtggcacgatctc

SEQ ID NO: 28209 - DNA, 2300 bp, Homo sapien
tcttggctctgggaggactctgaggggcagtgctcagttcagacaagggggaactgaaggctgacaagttctgaggattacagctctgcccaggccctttctactttccctgcctgcctccctccccctgctagaagtagtttctgatttccctgaatgaaagatagtgatcttttaggccttcatttatcttctaaaattcctcatctcaaggccaccagtccccagttatcacccttggaaatcctctgtttagcttagttgcacaaaaggtagtatgtccagtggctagaggtggggtgggaagagaggaggccaggccaggccctcaggaattccctggtttccactgggccacccacttgctggacagtctgagccaagtccctcctgctggagaaaagcctggaactgccaaaacaaaaaaacaaatacaaacaaacctcgtcaccacggtcaggaggaggttcagacattctgcccagaggggctggggaaagggatgggagccaggaaagatttaggggcaggagacagacacgtaacaggaactcggaaggtagaacttagaattcagaacttgggtttcaattgtagaatttggaatctggaatacagaattgggaagaagaacagagatgacaaaagaccacttgaagagaggttcctaatactagacagatggagagtggcttggctgtttccccctgcatattggggttgaaaacttaaatgtgtagttccagtccttctatgcagagtctctcctgccctccctccttcctgcaggcaaatatacaagctagaccctgttccctcaccctgtatcctgtctcccctaattgacattctatcagcccaaccctcattctgcagggccacctggtgtgtggaggtggcgggaggggtcagtgactctgggggtctcctcagtgacccccatacctcatcatgaacccttgggtagcttgattctgcctaccatccaggaaaacttgtgctggaattgctgatggaaacaattaaatatttactataaatcagtgtcttttcttcatctgcaaggaactttagcaggtgcctgaggcagggcacagtagagctggtgggcttagtcccacatggcagatctaccctcctggagggtactgtgttcttgagctattctcaacagtcagtactggttgggtgcagtggctcacgcctgtaatcccagcattttggaagtccgaggtgggcagatcacttgagtgaggtcaggagttcaagaccagcctgggcaacatggtgaaaccctgtctctactaaaaatacaaaaattagctgggcatggtggtgcatgcctgtaatcccagctacttaggaggctgaggcaggagaatcctttaaaccctggagtcggagtttgcagtgagcggggattgcgccactgcacttcagcctgggtgagagagcaaaactctgtctcaaataaaaataaaaataaaaaagagccagtattttcctccttgctcctgggaaggagaaggaactggccccgtacaaccagggattcaggacacgtgttactagctccagatgaggatttacacgaaaaaatcctgggccttgtttgtacagttcatgccaggggtaggaaatacctgaagctttcaaatactgcgttagagttgtgactctgtcctgggcaagtcaggcctaaaatggagaaactggtgatgcactcctcaaaaagccaagtgtaaaatgaggttaatgccctccctgacttgttgccttcactggcgtggcatattatggtaaaaataataattaagaagtaaggttatgcaggcaaatcctctagcgccgaaatcttccccgccgcgctaccaggttctttcgtgttatcttggacataacacaacattaattcaactactcggtggagcgcccactagctgctggacactctcttaggccctgggcacagtgaacgagaagcatgtgtctttgtttttacagtctcaccacgccaccacctccctcgggggcctccgcgctgagcttccggcctctacgcctcgcttccggtcggccgccccttccttacttccggttctctatggtgcgcgggcaagctttgctccgcctccggcagtggcttactcccggtgccaggttcttggagctgtgaggtgaggaggggacaagggcagtggggctgggagatggggcggggctgggcgctccgggactgaggtgctgatcgcccaaagggcgcccctgggctggggtctgacccggcttctcctccctca

SEQ ID NO: 28210 - DNA, 2300 bp, Homo sapien
gagggtttctccatgttggtcaggctagtctcgaactcctgacctcaggtgatccgcctgtcttggcctctctaagtgctgggattataggcacaagccaccatgcctggccaacagataactattaaaatttaagaaaatgttattctcatcaccaccaaagtcctgtcttatcccataatttgagggatctggtgctcttcatgggcccttccacgagggcaatgggacattcctgtcgcagcatctggggcctcctcctgcccactcaaaggccagcatgtgtgggtggggccaggggaggttgttggcttgcttgagccccctgtgtgacctctgccttctctctccgcagtccccctggtgcgacacatggagtctaggatcatgatccccttgaagatctcgcctctgcagtgatgctgcctacacctccacctccttccccttctccctcaggcaaccccgacagacagtggcactcctggtcctgctgtcttggttttgtcttggctctgggaggactctgaggggcagtgctcagttcagacaagggggaactgaaggctgacaagttctgaggattacagctctgcccaggccctttctactttccctgcctgcctccctccccctgctagaagtagtttctgatttccctgaatgaaagatagtgatcttttaggccttcatttatcttctaaaattcctcatctcaaggccaccagtccccagttatcacccttggaaatcctctgtttagcttagttgcacaaaaggtagtatgtccagtggctagaggtggggtgggaagagaggaggccaggccaggccctcaggaattccctggtttccactgggccacccacttgctggacagtctgagccaagtccctcctgctggagaaaagcctggaactgccaaaacaaaaaaacaaatacaaacaaacctcgtcaccacggtcaggaggaggttcagacattctgcccagaggggctggggaaagggatgggagccaggaaagatttaggggcaggagacagacacgtaacaggaactcggaaggtagaacttagaattcagaacttgggtttcaattgtagaatttggaatctggaatacagaattgggaagaagaacagagatgacaaaagaccacttgaagagaggttcctaatactagacagatggagagtggcttggctgtttccccctgcatattggggttgaaaacttaaatgtgtagttccagtccttctatgcagagtctctcctgccctccctccttcctgcaggcaaatatacaagctagaccctgttccctcaccctgtatcctgtctcccctaattgacattctatcagcccaaccctcattctgcagggccacctggtgtgtggaggtggcgggaggggtcagtgactctgggggtctcctcagtgacccccatacctcatcatgaacccttgggtagcttgattctgcctaccatccaggaaaacttgtgctggaattgctgatggaaacaattaaatatttactataaatcagtgtcttttcttcatctgcaaggaactttagcaggtgcctgaggcagggcacagtagagctggtgggcttagtcccacatggcagatctaccctcctggagggtactgtgttcttgagctattctcaacagtcagtactggttgggtgcagtggctcacgcctgtaatcccagcattttggaagtccgaggtgggcagatcacttgagtgaggtcaggagttcaagaccagcctgggcaacatggtgaaaccctgtctctactaaaaatacaaaaattagctgggcatggtggtgcatgcctgtaatcccagctacttaggaggctgaggcaggagaatcctttaaaccctggagtcggagtttgcagtgagcggggattgcgccactgcacttcagcctgggtgagagagcaaaactctgtctcaaataaaaataaaaataaaaaagagccagtattttcctccttgctcctgggaaggagaaggaactggccccgtacaaccagggattcaggacacgtgttactagctccagatgaggatttacacgaaaaaatcctgggccttgtttgtacagttcatgccaggggtaggaaatacctgaagctttcaaatactgcgttagagttgtgactctgtcctgggcaagtcaggcctaaaatggagaaactggtgatgcactcctcaaaaagccaagtgtaaaatgaggttaatgccctccctgacttgttgccttcactggcgtggcat

SEQ ID NO: 28211 - DNA, 2300 bp, Homo sapien
tctcacaagtttccccaggcttgtctcatggcctcaagcaatcctcctgcctcagcctcccaaagtgctgggattacaggcataagccagtcatatttattattttttttgtagagatggagtctcattttgttgcccaggctgatcttgaactcctgggctcaagtgatcctctgacctcagcctcccaaagtactgggattacaggcatttagccatcgtgcccagctgattttatccgtcccaatggctgctccatattttggaaaaaattgattgattttttatttgcaagacatttgtccttttttttttttttttttttgagatggattctcgctctgttgcccaggcgggagtgtgatggtgcgatcttggctcactgcaacctctgcctctcaggttcaagcaattctcctgcctcatgctcctgagtagctgggattacaggtgcacaccaccacgcctggctgatttttgtatttttagtagagacagggtttcgccatgctgggcaggctggtctcgaactcctgacctcaggtgatctgcctgccttggcctcccaaagtgctgggattgcaggcgtgagccatcacacccagcctaagacatttgtctaaccacataaaagtcttaaaaagggatagggcagccgagtatttgtattgtaaaaatacgaaaattacctggatgtggtggtacgcgcctgtaatctcagctactcaggaggctgaggcaggaaaattgcttgaacccgggaggccgaggttgcagtgagccgagatcgcaccactgcactccagcctgagcaacaagagcaagactctgtctcaaaaaaaaagaaaagaaaaaaagaaaagaaaggatagggcttcctgtgacctcacttggaaaaaacaaaagagaaaaaagaaaaaagggataaggcttgctgccactcagggatccctcttgccaggctccctggctaggaattgtctccattgggagacttccttttcaggcctggctgcaagctgcaccaaggctgtggagcgggaagattggtagtctcaaaataagcacccctgcctcctgctgggaccttgggtatgtgtttaggatgggagtgcagttctggtccagtaggagctggcagcagaccctccactgcccttaaccacagtgctcatgggcaaagcacataatcatattcattgatcattcattcattcattctcagtatcctatggagatgggcagagcaggtgttggctggatgagtgaatgcatcttgctttgcagtgccttttactccctctatctgccaaaccagtcctggggactgaccagctcatctcctcctctgtagagagtctgcccaggttgccagaagcagagttaaggctagttcacctgggctcttccagagacccctcctataattgtgtcccaaggcccatttctcctagtggactatgagctcctcaaggacaaagcttatttgtatttggctttccatgtgtggggtcagggtggggacatgggccaagtgcactgtgagagtgctggggaggacggtgagagcagtcttctcgttagaggggacagaacttgtacagaaagcacagagtagcagatcctggtgtgttcagggaagagcacacctggagagtgaggtgtacaggtgagggggcaggaggggaggctgacaagttaggttgggttgtcaagggctttgggcatgatgcaaggtggatttggggttgatcctcttggcgagaggctggagttatatgacccaagtagaggacctcttggaagggggatgaagtggaggcagggaggctagagagagaagtgggaggtggggctgcctctcctggcgtcctgaggctctgcaaagcttcaagaagccaactgggcagctggaatatctgtagaaaggagctggctccaatagcatttcacagtctggagctgccacaggactccgtggccctgttcccagaaatgtgggtcactggtctaggggagcaggacatccaagtggatggaattgctggggctcccccaacctccgcgcgtccccctcaactcctctgtcctgcagtttctattccaaggacaatgaaggcagctggttccgctccctctttgttcacaaagtggatccccggaaggatgcccactccaccctgctgtccaagaaggaaaccagcaacctctataagatccagtgtgagtggctgctgagctgaccaatttctgccctttcaggggctctgggggcctgtgaggctccaggaaggagatgg

SEQ ID NO: 28212 - DNA, 2300 bp, Homo sapien
tcataactcactacagcctggacctcctacctcaagtgattttcctgcctcagcctcctgagtagctgggactacaggtgtgtgctaccatgctcagctaattttttgaattttcatagatcctcctgccttggcctcccaaagtgctgggattacaggcatgagccaccacacgtggtcctaatcttaaaattattattatttttttatagagactgggtcttgctctgttgcccaggctggagcgcagtggtgcaatcatggcctggcctccactccccccatgccaagcataacaggaggcaaccactagtcagtgggtggacattcttttggggagctgtccctgcccctttggaagtggatagagcccctgccccctgtggggtctgcaggctctccacccctgccaatgtctgtgatctgggggattgtgggctgagaagggattagtttagagggcgggcaaaagagctgggcagggcagaaagaggccccaggattttcaggcagagaagtcaaagggggatgaaaaggggaaaggagatggtggagataaagtgtctgcagctgacagccttgcccctgtcttcacttgtaaggaagtttgtttctttgatggtgataaacctggcatgtgaatgcctttccccagagaatgcaccacagaggagcacgtaacgttgtatacaatttcagggggcttactgatgcaacccctttgcagaaattttaacagtgagaaaattatgacagtgaaagtgatctgacctaaccgactccattttgcttctaacccccaaactgtccatattcattcctgggcataggccaaacttacagtctttttgtttgttttttgagacggagtttcgctcttgttgcccaggctggagtgcagtggcgcgatctcggctcactgcaacctctgcctccagggttcaagagattctcctgcctcagcctcccgagtaactgggattacaggtgcccgccaccatgcctggctaatttttttgtatttttagtagagacggggtttcaccctgttggccaggctggtcttgaactcttgacctaaacttctgatccacctttgcctcccaaaatgctgggattacaggcatgagccaccatgcccggcagcaaatttatagttcaactttgaaacaaagataacagccctctcccaaaataaacccctttcttgcctggggaccagactgcttttgtaagactaacaaattagccacgagattagaaattacggtttaggagtcatgcaggtagtggccacagattctaaacctccccagttgctcctagggataacatcactactgtaaaacctaagattggtgctcaagatatttttccgatcctgcactcaatggatccgctggcgatacacagattaagaaaccggatcatccggttttgtggcccccacccagagatccactcagcacaagaggacggcttccactccctatgattgcatctccgacctgaccaatcagcactctccactctctggcccctacccaccaaattatccttaataaaacccagtctccgaattttcagggagactgatttgagtaataataaaactccggtctcccattcagccggctctgcatgaattaaactcttattgcaattcctctgtcttgataaatccgctgtctgggaaacgggcaaaatgaacccatggggtggttacactgaccctctgctgcacatcccggacagccttgttaagaacccttggtaggctgggcatggtggctcacgcctgtaatcccagcactttgggagcacgaggcaggcagatcacgaggtcaggagatcgagaccatcctggctaacacggtgaaaccccgtttctactaaaaatacaaaaaattagctgggcgtggtggcagacgcctgtagttccagctactcgggaggctgaggcaggagaatggcgtgaacccaggaggcggagcttgcagtgggccgagatcgcgccactgcgctccagcctgggcgacagagcgagactccgtctcaaaaaaaaaaaaaaaaaaaaaaagaacccttggtattattgttccacgctcccattttaccgaggtggatcctgaggcccagagtgggcaaagggcttgccaaggtcgcagagcgcgcagaggattagaaccctgacttccgtccagcacctgcggagttggagacgcccacaggaaacgcccacctgaccgggtgagtgagggggcgggcgagccggaggggtggagtttattcgcgccccg

SEQ ID NO: 28213 - DNA, 2300 bp, Homo sapien
actgggcccggcccggtgtcacgtatttttatcagcagccatttgttgtccctgtggggagcccagaaaacccagcccggttctcccacctgcggggaagaaatgaagcaatgataatgaagacactcccatgccaagcccatactgccctgagcaatcagttttggtggggagaatttgctagcagaaggcaggacataaagtccccacagcagcctcactgggtgtggcagcaaatcattcctgaggcctggccggtgctaccaggcacagcaggggtccgtgcagaagaactagatttattccattaatataccgttacagcaacaatgtctgctgagtactccggaactgtaattcacatttcctgaggctgtagtagggagaatttggaagcagggcagcacagtgctaaccagcaggctctgggtgggacagacctgggtttgagtcctagctttgcctttcactatctgcattatagtcagcgagtggctctatcatatctctcagtatcttcacctgtggagttgggggggtgatgctaatgttagctaacatttatggggtgattattgttgttaaaactcagtacaccgggcgcggtggctcacgcctgtaatcccagcactttgggaggccaaggtgggcagatcacctgaggtcagaagtttgagaccagcctggctaacatggtgaaaccccgtccctactaaaaatacaaaaattagccgggcgtggtggcgggtgcctgtaatcccaactactggggaggctgaggcaggagaattgcttgaacccgggaggcggaggttgcagagagccgagaccgccccattgtactccagcctgggcaacaagagcgaaactctgtctcaaaacaaaaaacaaacgaaaaaacacagtaaattgtccctatttgactactaagagctattttaaaatagaatttattatctaagtacagaaaggtgtaattatcccccctacacccgttagaacccttgatgacactaaataaataatacatgaatacggttcaaaaatgggcatcatagagtataaaataaagaatgctttcattttcaacccaaattcagcaatttcataggatgccaggctcagctctaaagccttatatgtattcagtgcgctgaaattcaacaacctcacgaggtaggtataaccaataataattctaggcggggcgtggtggctcacgcctgtaatcctagcacttcgggaggccgaggcgggcggatcacctgaggttcgagaccagcctgacgaacatggagaaaccccgtctctaataaaaatacaaaattagccgggcgtggtgacgcatacctgtaatcccagctactcgggaggctgacgccggaaaatcgcttgaacccgggaggcggaggttgcagtgagccgagatcgcgccactgcactccagcctgggcaacaagagcgaaactccgtcccaataataataataattaataataataataataacaataataataataattctaaagggaagcagagggatctggcgggaaagtgccagcaaacctaacaggcctccacaagtgtctttaaagtttcataggggtcggtatatgtgattaactgccaaagaagaatattcgccgtgtgtccgaaacgcagtcccctggggcgccacactcggagcctacttgaaccgaagagtccctccctgggccaacgaaggacccaattcccctcgccccggatccagcctctaagtggtttcccgggtaaggtcagcagaggtccgccgcctcaaccagtcttgttagagtaggcacaaaagcattcagagtgactgccactgtagccactcaacgccgagcctaggcctgctttttttgcagttagagtgaaactttccattggtggagtcaccccaaaggaggcgggacggagcgggaaagtcctgcctaccttggccttcccagccaatcgcagcatctatgcgtcagcctccggttcggttgcgctgcgcgtagtggtctgggcgacctgagggcggggccgggagcaggccccgggctgtggggagggtgcgcttcccgcgggcgcgcggagtgaggacggtgacagccacgcgcgcgcgtacgcgcccgatgcagcgcggccccgtgaccctagtcggccgctgagaggcgcgcggagtctgggccgctgccgtctaggggtcccgtcccgaggcgtccccggcatctccggcccgaatcccggagtgccgggtcgcgcctgcaccgaaggtcccggctcctgtg

SEQ ID NO: 28214 - DNA, 2300 bp, Homo sapien
gcccggcacctttcctacattatgtcacttcatcctcaccgctgcctgggatgtggcactgccaccttaacaggcagggaaactgaggctatggccggttaagggacctgactgtagttccatggtgaggagatggtggatgcagaagccccagtctgcctggctcttggtgctgggttcttacttcctcaagtctctgctccatcaaaaacactggggaagctcaaggcattcagctctagcggtggaaggtcagaagatgggacaggtgggcaaggagagctttggagtggggtgggagcttttctggggcctctctcacctccaggcccaggtcccagtgggcaaccagctagcccggagaggtctggggagacagacagacagctggtgtccttcctggctcctccgcaggttatagatgtttctaggagctccctccagagcagggcccaggaagtgctgggcccaggctgacccaaccccgcttggctggggctagcatctctcactgagccccttctccccagaccctgagacaaggctgcgattaatcagtaacaaaaacagaaacaagcagaaaagtgtaatcagcttgggaagggcagggcaggaccgggcagggctgtgcaatcagcgttcctgctgggacctttagctgattgggccaaagggggcagggaggtggtcccagtagggggattcagggaagcacccagagatggggccacagccaggccagaaggtcaccccctcccatgcacatctgtgcaccatatgcccacaccactcccagccccagggcctgcacacctcccccgacctgccagcgtacaaccttggcacacacaggtggccacacactcccgacatttgtccatctgcatatggagtcacagacacctgcgcacgtgcccagtggcacatacacaccctcatggatagcagacatatgcacacgcaggctgctccctcaaacacctgcccccaccccagctctggggtgccgacgtgccctggggcctggggaagccctgcacatacattaggtctgagctgcagccatgtgaactggcaggccctcacaccagaccccacaggcaccgggccatgtctctgtcccgaactgccctgggggccatgagacactttggctcctcttctgcaagctgaaaggtaggggcttgggaagggtccgggactggggccccattgtggggagcaaggtcagcggcagggtgtcagtcacaggcagggcaggaagcctaccccagacgtgtacccagctcttacctgctgctcctgccctgtgaccttggtcaacgtccttctctctcagcctcagtttccccaccttggatcctcctggcacggaaacggtgactcttcttgaggacccaggtgcttggggccagtctcacctctctgggtctacagttcttagttccgggctctccgctcctggtgcgtggatgggggaaggtgagccaaggggcaggaaggaggacccccgcaacccaccccctccctggtcctggtggctgcagacttagggtgaggagagccagtgaacagaggggagccctagtgggaaaggggaatcggggccgaaggggagaaggagccccgggcaggtttggggcggccgctcaggggccggcggcgggaaggggcgggctgggggtggggagcgcggagggggcgggcgggcggctggcgggggaggcggggagcgcagccagcgcggcacagaacgagcgagcgagcgagcggagaggcggctacagcctgagcgccgggccggtagcggccgcgccggcgagcggactagcgggcggcgagcagcgcggagcgcgcggggcaccgaggagcgggcgcggcgggcaccgcgcgaggcagccggagctctcggaaaggccagagcggcgccgcccccgctgcccctgcggggccccggctgggagcccgacgagggagcgggcggcatggcccggcggcccggggcgcgggggcgctaggcccccggaggggcgtccccagcctcgccgctgccgccgccgccctccgcagccgcgcgccccgcccgctccagccgcccccggggccgccaccggcccatgagccccggcctcaaagtttgcggcgggcgggcgggcgcggagcctccaagatgccgttccacccggtgacggcggcgttgatgtaccggggcatctacaccgtgcccaacctgctgtcggagcagcgcccggtggacatcccggaggacgagctggagggtgagtgtccgccgggatccc

SEQ ID NO: 28215 - DNA, 2300 bp, Homo sapien
acaaaaatgagctgggcgtgttggcatccgcttgtaatcccagctattcagtaggctgaggcatgagaattgcttgaacatgggtggcagaggttgcagtgagccaagattgtgccactgcactccagccgcacagagtgagactctgtctcaaaaaaaaacaaaaaacaaaaaacaaaaaaaacttagatatcctcctcaattcctctttcctgtgcaccctacacacatctgctagcttgctctgtctgccctccctcccaaattacatcccaaatctgatcactgccctgctccacaccctaacctaaattaccacccatcaggccgggcatggtggctcacgcctgtaatcccagcactttgggaggccaagatgggaggatcacctgaagtcaggagtttgagactagcctggccaacatggtgaaaccctgtctctactaaaaaaaaaaattagccaggcatggtggcaggcgcctgtaatcccagccactcgggaggctgaagcaggagaatcacttgaacccgggaggcggaggttgcagtaagccgagatagcaccactacactccagtctggacgacagaccgagactccatctcaaataaataaccacccatcttccctcaaatgatctactacaataacttcccccttgcggtccactctccatagaccagccaggatgatgacattaaagtgcacattaaatcttgtcgcatttctcctgaaaacccttcaatggcctcctagtgcaactagaaaaagacaagactccttggccagacgcggtggctcacgcaccttggggggcgaggcaggaagattgcttgagcccaggagttggagaccagcctgggcaacacagtgagaccctgtctctaaaaacaaaaaccaaagaaaacaagactccgtaaggtgggttccaaggccagacatgagctgaccggagtcaacctcttcacagtccactctacttctttccctcaaacatcccaggactgtagctgcctcaaggcctttgcaccaacgttttcctgttcaactctactattcattcaggtctctagtcaagtgtcaccccccagagcagctacccagggtgcaatgtcaccaccactgcctctccagtcaaccaaagcactatctgtttgctgtactgcatctccccacccgcccactccgtagattgagcgctctgtgagagcaaggactttgttcactgctgggtccccagagcagggaccagaacaggcgctgggaaaacatctgttgaatgccccaggtactccaaagcccttgctcttttcaatcccaagcaggttccaagtctccagccttccaaaccagggttgcccggtgcgaagcccaggggtgagaggaacaggaagcagggcagatccgtccctgcccttaatccagggtgaagggtttaacctccaggacaagacttttgccgcaggctccagctcctggcctagacttggggctggtgcaggggacaaggcgaagagttgagccagggtctcgggaacccagctgccctcgcccctctatccacaccctatcccaagaaatggtgcgtcccgccgcagggcgtacgcacagagaaggaagtgttcaagtcttccagtgcggagaaaagagactaggactcgcccctcgacgtctcgcggaaggtacctggctccccggtggctgcagctccgggctcctcctcctgcgtcctcgcgtcgcgtactgcttgctgggattcgtagtctcgccttggccatcagttcgcccttcccagagagctttgggaatctaagccgggactgggcggagggcggggagaaggtgatggcgcgcgagggcttctgggagttgtagtttgacatattctaacagccaggaattctggagaagaaaaattgggtaataaatcttatcagattatctgggctgtcctgatatgaaccttttgagtttttttcctcattcccaggataggaatacctctgtggttcaaaacacgaaggctgagattcagaggaactacaaatcccataaagtgttgcacgtctagggcctttggggaacgaggtcggccccagcgcaggcgcggtggcgcgagttggactgtgaagaaacatggcggccgcgacgttgacttcgaaattgtactccctgctgttccgcaggacctccaccttcgccctcaccatcatcgtgggcgtcatgttcttcgagcgcgccttcgatcaaggcgcggacgctatctacgaccacatcaacgagggggtgagggcctgtgc

SEQ ID NO: 28216 - DNA, 2300 bp, Homo sapien
gagggaagtgccccaaaacacacaattattaaggaaaacagcctggaagatgtctcagttcttcaactcccaggtattactgaagagattataagtgcgtagtcccaaaatatttcaccatgagccatttaagacatttcctgggacctaaattggctgaaattctcattcccagaagcacaagaggttgagcacagtggctcacgcctgtaatcccagtactttagaaggctaaggcaggaggactgcctgagctcaggaattcaagaccagcctgggcaacatggtgaaaccccatctctacaaaaaatacaaaaattagctgggcgtggtggcgcatgcctgtggtcccagctactcaggaggctgaggtgggaagatcacttgaacccaggaggtcaaggctgcagtgagctgtgatcatgccactgcactccaacctgggcgacagagtgagatcctgtctcaaaaaaacaaaacaaaacaaaaaaaagcacaaggaaaatgggtgagttataacaacatacttggatgtctctccagatcaatgggagtggttaacagaaccacttgcaagagatgggacagtagcaatgctttcatatggggcaggaagttgcactggtcacaggcagcatagcactagtggacagtgccttcccgggctgcagagtcagacagtctcaaattaaaaacacaagtgagtggtggaacagggctatatgtataaggcctactccagcacagtcataatttagcgatataaagcatgcactgcacctagcacagtgcatgatacataaaagtcaaaaatgtgttgcgattcctacctcatgcttccactttctcctgaggaatgtaagcaatgattatttttcagtggtaccacctaccaggcatgtggcaccctgcctgcatctcatgtaatcctcacaatcgtgctcaggttactattaatatctccatctcacagttaaaacggagttcagagaagaaacttgctcaacttaatgccacagttaagtgacaaggaccagtgttcctatccaaggctttctgatttcatagcccccactctcaaccattaataccaactgtctacgtgggaagccttggggaccagaagcgccgtctgaaacttcagccacggcgtctaaggtgtctaacgtccttttcacgaccgtcgcctgctcaaatctgcccttgaaactctgagagacaggggtcccgtttctggccctgacttgcccctggcttcctgtgcagctagtaagtcctttgctctcactagcctttagtttttgcttctgataatgggcaagtgggtatgtagggtggcacacagcaatacttacaacccctgcaaaatgaaatatattaacctcgcttaacgttttagaattcacatcaagccaaggggacagacggcggactcgagacagaagacgccgacggtttaccccttacccccttcctggtaaaagtatactgagtcccatcccacctctactccactgtcacccctcaggcgggtccaaggtcagggatggcacaggccctcaccccctcgttgatgtggtcgtagatagcgtccgcgccttgatcgaaggcgcgctcgaagaacatgacgcccacgatgatggtgagggcgaaggtggaggtcctgcggaacagcagggagtacaatttcgaagtcaacgtcgcggccgccatgtttcttcacagtccaactcgcgccaccgcgcctgcgctggggccgacctcgttccccaaaggccctagacgtgcaacactttatgggatttgtagttcctctgaatctcagccttcgtgttttgaaccacagaggtattcctatcctgggaatgaggaaaaaaactcaaaaggttcatatcaggacagcccagataatctgataagatttattacccaatttttcttctccagaattcctggctgttagaatatgtcaaactacaactcccagaagccctcgcgcgccatcaccttctccccgccctccgcccagtcccggcttagattcccaaagctctctgggaagggcgaactgatggccaaggcgagactacgaatcccagcaagcagtacgcgacgcgaggacgcaggaggaggagcccggagctgcagccaccggggagccaggtaccttccgcgagacgtcgaggggcgagtcctagtctcttttctccgcactggaagacttgaacacttccttctctgtgcgtacgccctgcggcgggacgcaccatttcttgggatagggtgtggatagaggggcg

SEQ ID NO: 28217 - DNA, 2300 bp, Homo sapien
caaccaggttccctcctccttgtggctcttgctcctggttgaacctcgtctttgatctcatttctctccacaccctcaggccattcaccatccctcaggtgctgagaaccaaagtgcctagagaagggcaggaggaggatgacgacgatgaggaagacgatgctgacgaggaggctcccaaggtacctccctggcaggtagcagatgaaggggagagtgcagttctgaggggtgaatcagaagggcccctcacccctccctatgtctggccctgaggcagccccagcatcactggcagggacaggaggagtccctttgagcccaggatgtctgcttggagagctactggcttagaactaacttctgctgcccactagtgaggacctaggggacagattaaaggcagggcctctgagccaccagcttcattattaggcccaggagcctaggagtcaggagaagggcagttagcagcaccatacccaggatggcaattcttaaaatcagagaggagttagagcccaagggccctgggaggtcatctggatcggtaagttagaaaattctactttttagcagctaaactttttatttgaatgaaatcttaactagaacctcaacgtacagaacagataaacgcggtactgctcaggtgacagggcagcaacctgggatcatgccccacaccagggtgacaaattcagatgtttctggggccaggtcaccaacggcaatgagtagcggggcctggtggggactgcgctgagcagtgggaagcacgtgccctgcctcaggggctcctcggtgcaagcacagactcagagtttccacagatttatctgcttctcaggcaaggggtcagcccagatttttatgtaaaacctaccagttttgtgtgtgtgtgtgtgttttgttgttgttgttgttgttttggagatggcgtcccactctcgtcatccaggctggagtgcaatggtgcaatcttggctcactgcaacctccacctcccggattcaagtgattctcctgcctcagcctcccaagtagctgggattacaggagctcgccaccatgcctggctaattttttgtattttcagtaaagacggggtttcaccatgttggccaggctggtctccaactcctgacctcaggtgatccacctgcctcggcctcccaaagtgctgggattacaggcatgagccaccacacccagccttcttcttcttcttctttttagagacagagtctcgctttgtcgcctaggctggggtgcagtggtgcagtcatggcttactacagcctcaaactcctgggcccaagcaatcctcccacctcagcttccctagtagctgggattatgggctcacaccaccacgcctggctagtttttatgtgtttttgtagagatgggatctcacagtgttgtccaggctggtctcaaactcctggactcaagtgatcctcccaccttgacctcccaaagtgctgggattacagatgtaaactacagtgtctggcctttttttttcctttttaaagctactggccaccaaagcctgtctgtggtccctaggtcccagtttttccttgcactattggcagagaaggctgtccttgagagtgggcactcccacacatgctgctagtggtgccacagtgaggcctaggcctgcagctcccgggaccacttagctcccacggtggctcccgcagtcttcagggccctgcacagcctctcacagtggccatcctggcttccccaccactcccatttgtcattgttatgccataactatggtctatccactctaccagcctgtccaggaagcctcagtcccttcagctgccacccgctcagggaagaggtggggcagggggctcctaatggaaacctcagaccacagtaatcccactccattcctgggcgtcgctctgccaggctgcagcttccccccacacctggcatggaggcatcgacaagcttcacttgagcagggcctcatcgccgcttaggaaaatgtggcagctcctgactccagatttggtctcctctcctttccacagcccgaccattttgttcaggaccctgcagtgctgagagagaaggcagaagccaggcgcatggcctttctcgccaagaaagggtgagcattcaaggggctgcttctggggggacccctcccaccatctggggagggcctagccagccacccaggaaacccacacgtacaccctaagtgctccacgtgtatttagttctcacgacaacccagtgaagtagctaccattatcactatc

SEQ ID NO: 28218 - DNA, 2300 bp, Homo sapien
gaaaagaggcagctgcagtttcacttgccagggcaacagggcaatatattccacatgcagtgcatctagttctggaaaggaagaattcccatgagtgagcatgatcaggaagtgcatgggaggagatgggcctggaatgctgcatggaggaggaggagaatgaggagaaagaagagaagagcagtggccagcattagcctgagaggaagccagagggctgtgggagtgctgatctctggaagaatgttgaggggttgtgcggctgggatggagagtttgaatttgagttgggaaagggtggtatgaaatcacctaggtgagaagcaagattggctgtataccgtgacagatatggatgtaccagagagaataattatggtttgctgtcataagaggtagggagctgctagcagctgtttttcttttgtttttttttaattagtataattatatttatttgaaaataatttcgtataaattatttttaattttacaatttttaaatttttttttgagacagtcttactctgtcacccaggctagggtacagtggcacaatttcagctcactgcaacctccacctcccagattcaagcgattctccctcctcagcctcccgagtagctgggattacaggtgcccgcccccatgcctagctaattttcgtatttttagtggagacagagtttcccatgttggccaggctggtctcaaactcctgacctcaagtgatctgcccacctcagcctcccacagtgctgggattacaggcataagccaccatgcacagccttaattttataaaagttttaagccaggtacctgtaatctcagtgtcttgggaggctgaggcaggaagatcgcttgagcccaggaggtcaaaactagcctgggcaatataactagacttcgtctcaaaaaaaaaattaattagttaactaaaaagttatagaaacagtgctaactggcttaactcataagccaatgtagaaaatatgatacatttacttttttcttaaattttttaattattattttttattttaatatatttttttctcatttccaatgggattgggaaaaaatcatgagaacatttagcctattttgaccaaatacaaatattgtgttgagattttcatgttaaattttttttttttttttttttgagacagagtctcactctgttgcccaggctggagttcagtggggggcgatcttggctcactgcaacctccacctcccaggttcaagcaattctcctgcctcagcctcctgagtagctgagattacaggcgtgcaccaccacttctggctaatttttgtatttttagtagagacggggcttcaccatgttggccaggctggtctcaaactcctgacctctaagtaatccacccatctcggtctcccagagtgctaggattacaggcgtgagccaccgcacccagccagaacaattttttttttttttttttttgagatagggtctcactgtcactcaggctggaatgtagtggtgtgatcatggctcactatagccttgacctcctggcctactgcctcagcctcccaagtagctggggctacaggtgtggaccaccatgcctggctaatttttgtattttttgtagagatggagtttcaccagcctgtttcccaggctgatcttgagctcctggctcaagcaatcttcctgcctcagccccacaaagtgctgggattacaggcatgagccactgtgcctggctaactgacagtttttgagcaagaaaattacaagcaagtaatcttggatctgcttctcaaacttcagtgggttccgagtggccttctgattcctctgttagtatgagcctatctgggcctcagttgcccatctgaatgagggacatggctataggtcacttcttatgagctgttcctgggaccagccctagtgggtcagtctggggtgagctcagggaagaaccaaggggtccctggagaaaattgtgtggaaaaagaaatgggccttcccactccctggggtttgctttgatgttcttatgaagtgtggtatttatgaactaatccaacattttccctgtgtgtgcctgcacagactagcttccttctacgaagcagcaattcccgaaatggagtctgcaattaagaagaggaggcttgaagatagcaagtgaggcggggacaaaattaagaatgttgttgtgggacagagaggcccgagcagggccctgccttccctgggcattagcatccctatctctaagacaagtgggtgggaccagggactgtgc

SEQ ID NO: 28219 - DNA, 2300 bp, Homo sapien
gcaccagcatgcctggctaattttaaatttttttttgtagagacgaagtctcgctatgttgcctaagatggcctcagacttctgggctcaagcaatcttcccaccttagccccccgaagtgttgggattataggcatgagccacggtgcccggcccctattgccttcttttatttatttatttatttttaatttttagagactgggtcttgctatgttgctcaggctcaatttgaactcctaggcgcaaacaatcctcctgcttcagcctcccaacctgctggaaccataagcatgtgccaccactcttggcttccctattaacttttaggcttgcatgctttgatgaagcaggctgctacactggagaagcctacgtgacaagcctttagccaaaatccagctaggaactgagacccttagtccaacaaccattaaggaactgaatttagccactagacatgggaagcagatcctttttgagttgagcctttaaatgagactccagccctggccgatatcttgattgcagtcttgtgggtgaccctgatgcagaggagccagctatgccatcctcagattcctggcccacagaaaatgtgagataataaatatgtttgttggccaggtgtggtggctcacgcctgtaaccccagcactttggaaggctgaggcaggcggatcacgacgtcaagagatcgagaccatcctggccaacatggtgaaactccgtctctactaaaaatacaaaaattagctgggcctggtggctcatgcctgtagtcctgcctacttgggaggctgaggcaggagaatcgcttgaacccactgtaacctccgggaggcagaggttacagtgagccaagatcacaccactgcactccagcctggtgacagagtgagactctgtctcaaaataaataaataaataaatgtgtttgttataagtggcaagcagtgtgttgttataagtttgtggtaatatgttatgcagcaatacaaaactaatataatatccagcccctctcatctcatttctggtttacagcccatctctcctatttccttagcaccctgcattcatcacactgactcattgctattggttttcttgcacttcctatcctgtaagccccttgaagacaggcactgaactaagcattccttgtagccctagtgcagatagcaggggttggcaggagtgtcctgggaaatatttcacaatcccagggtggggttgtgttctccattcgggggcttctataacaccccaataatgatggtggttggttttgaattcttactgtgtaccaggcactgagatgaagccaggaatgtgtgttcttaacaagttttctgtgatgattctgatccatagtcaggcttaggaaccactaaacctacattacctgagacattctgtagaaaaaattgcatccttctcttaggatagctatacttgtaacttccttaaacaaaacagaacaaaactgtattgcatacatacagaaaaatgcacaaatcttaagcgtacaatttgatgaattttccaaagtgaacacatctacatggctaccaccgagatgaagacagggggtgaccccagcctcacttgtggcccctcccagcccacagccccagaggaaaccaccaattttaacaccatcactactcatgagttctgtctgttctagaatttcccgtaaatgaaatcgcagtctgtacttgtacatctgcttaacattatgttcgtgcttttgacttgttaaaatttctcttctggattaaatatgtaaaacggtgactaaggaggtcgggcagaaggtggaagcctgggattccgagacgtcctctcaggtgccatacttggatttcccgagaggtgtaatcacacagcccgccctcagctgacctattctctgcttaagcaggaagggagataggaggggaagggggcgtggctacagacgccgagtgtggggcggagtcttaagaagagaggcgcaacccgggtccggcttcccggcggtagtttgctcggctctgggggcggggccaggccgagacttcctgtctgctcctgcggaatcgcagtttgaccccggaagtgcgggcgctcagggagctgtcaccgtggtcggcggcggcggcggcggcggcggcacagagccggtggtggagccgccgaggtgagtgcgtggctggtccctgccagatgcagggcaagggaccccggaggagccgcggctatgccttgggcagccttggctctcccatcctctggcctccattgcggggccc

SEQ ID NO: 28220 - DNA, 2300 bp, Homo sapien
atttatttcgttctttcttttttctctctctgacacccagattggagtgcagtggcacaatcagggctcactgcaacctctgcctcccaggctcaagccattctcccacctcagcctctcaaatagctgggactacaggcgtgcaccaccacgcctggccagttttttggtattttttgtagagatgggatttcgccatgttgcctaggctggtctcgaactcctgagctcaagcaatccacctgcctcggcctcctaaagtgctgggatttcaggcatgagccactgcgcccggcctaaagtaatttcttacttgagattttatttcaggctactgtgtccatgcactgggcagtacagcctggtgggtaagacagcacagtattttttttttttttttgtctgctgggtttgaattttgttttaatacacgcaatttattctgtgcttcactttcttcatctgtaatatggagataatggcatctacctattaaagttgtgaagattcaattagatgagttgtatgaataaatgttagctgttagtttagtttcgtttttttgagacggagtcttgctctgtcgcccaggctggagtgcggtggcgcagtctcagctcactgcaacctccgcctcccgggttcaagttattctcctgcctcagcctcccaagtagctgggattacaggcgcccgccaccatgcccagctaacttttgtatttttagtagatccggggtttcaccaagttggccaggctggtatcgaacacctgagttcaggtgatccactcaccttggcctcccaaagtgctgggattacaggcgtgagcccccgcgcccagccagctgttagttaatcaagaaattcgactgcctactacttaacctgcacagttctaggtgctggggaaacagtgacgaacaagacaagatccttatcttcaagtagcttttacattttagtggagtaaaatgacagtaaacattgaaaataaatttcagaaagtgctgtggaaaaactttacaacagacgcaggaatagatttcatttgactagttctcccagtttccagaaaagtcaagggtagaatgttaaaaggcaactcagaggaggtgaatctgttagggcctacggtaatgcaatcctggtttgtggaattctgcaggctagtgtgggtaggttacaattttttgggggagttgttttttactttgtttgaaaactcacttcttcccgctgagcttttgattaggagctgaagttgaatcagtttgaaattgtattctggaccggatgcggtggttcatgcctgtaatcccagcgctttgggaggccgaggtgggtggattgcttcagcccaggagtttgagatcagcctggacaaaatggcagaaacctcatctctacaaaaaatacaaaatttagccgggcatgatgttgtgagtctgtagtctcagctactcaggaggctgaggtgtgaggatcgcttgagcccgggaggcagaggttgcagtgagccgagatgccactgcactccagcctgggcgacagagccagactctgtctcaaaaaaaaaaaaaaaaaaaaaaaaaagaaaagaaaagaaaagaaattgtattctgaatacaacttctaaaacactatatttacttgcattatattaaactggttttatcctgaccacaattgcaggtggaagataccactattgttctatttttctggtaagtagagtgagccatgtcttgcccagggttacagagcttggaaaagacgcctcctaaaaatctgtaggaccacctttggttttcttccagatttttttttgtcatctcttttcctccacccatttcccatctgtctagccattcttgctccgctgggctttttcgcgagcctctccccagctgcagccccgcccatctcctggggcgtgaccacctgtccaggccccgcccccgtccaaccggcggagacccgccccctttcccggacaccgggctcagcgcccgagcgtgcgcgcgcgtcctcgctcgtcgcccggctcggcgtcgggagcgcgctctgtgtggccgctgccgccatgttgttgtggttgtgagaaggcggcggcggcggcggagtagcagccggacgagacgtcccagcggctcaggcgctgcccagcgccggccctggcagggagcctggtggggtggcggagggggagactgtgccgtggagggcctcgccatgtcctgctgcccggtaagaaccccatccccgtcctccgtctcctcggcgggtgaggaagagct

SEQ ID NO: 28221 - DNA, 2300 bp, Homo sapien
ggcttgtttcttccgggtgggaggatggtggtcagagccaggagtatggagatctgagaccgtgagcagggaagaaagccagtgctaacatgcaaccattcctcacgccaccgccacatcagagctggttgggaaccctttgctgctggggaggctggaagcatattccccaagagcactgccctgggcatcatctccctcctgcgaggagctgagccagtcccctcacagatggataaatgaggctgatgtttggagggagaggcacacggtaaatggcatccccttaggcgcctctttgggaaaggaaagtggatgctcctttgaggcaggcgaggggctgggagtgggtagccgtcatgttgtcccccgtgggatcccatttttaacttgacccagattgtcttgggctccttttactttcagggggctgctttcctgggccaggctgtgtagcacttcccaccctcaggcatgagtacagactggtcaaaatgtttatgcagtcaaggccaaagcctgccctgagcccagacacacctgggtccccattctggggcctggtcccctaaacaatctcttcctcagccagcacagggaaatccagactcagggttccagaaatcccccgttcccaaaccaaaccaatcatggatcttccctttaaggggtagaatcagcctttagagttacaagcccctggaaaagggagcaggtcccatacaatcagcctttctcctcttctcttcttgggacaggaataactgctgagcagtccccctttgccactcctggctgtctgagtgggcacttgtctggctgctggccagcagtgaagggccacttggtgacttcgtagggttccttagagaagtgacatggccttgaggagattcagggcacctttcctcagtgagctttgatatggtccaaaaacagccttaaatcaagaatatttgtggaggtaggtgtggggaaggttggagaagagttaggtttgtgctttgtaatcttggcatccatgttttgtgcctgccctccctcttggggaggccatgcttgactctgctgaaagctgctaactggtgacagggtggatcatggtgaggactaggggtaaggtcagggaatgcttaagctctggccctgccctgtattcctcttccccttggtagcagttccctgaccaagggcaaggtgtgtctcaggaaggtggttctgtgcatgcctgggtgtggttaaggcgtggcccagaaggcttccctggtgctctcagtccaggcaaagcccagagcatctgagcacgtctctgacttccagtggcaacacagtttgaacgtggtgaaacagggtgtagttcttttccacattctgtgtcatctagtcgtgcaggtagggaaaaagttggtctaattgaagattgtgcatttcctagtgacaggtgccaagaggttatgatacgggtttcttgggtctgatgtacagtgtgaataaatgcttgcagctcttagctcttttttgatcgatgaagcacttttttattaatattttcctttgttaaaggaggaaccgtaactctccatagctgtacatataacccttttctcctaaagaggagtcagtcagtgctcctatatttttcattttttgtcaaagcaagaagtaaatactttagaattgttaaatatataaataaagcaaataaagttgagtgttccacatggtagcatttgctaacacttcctaattctttgccctgtggtttatcccctcttcgtcccttttccctctcacacagaagtgtttgagggcctgctgggaaactgacctttggcaaaggaaagctacagatagccttccgactctagaccttggcaaggagcctcaccatgatgttcaagcactgaacgcatttcctcagtgattttgctcctaaaatctcccaggctaaaagagggcaaagcagtcagggatctgacctggcagctattcctccttctctgaagagttcccatcagtagtcattacaactacctctcgcctcaaggctccatttttagctgctgctctgatttcagggcagccagtactctggccccttcagtcggggagtggaaggagatgtggggtgggggtgagaaaatgcttctgcctgttgttcttgaaggatagactatgggtgggcagagagaactgggggcagaaatggaattagatgtgattgggttatgcagtcaactagaggtctccttcccgccctctctccacacagagaggaacctctgctccttagctcttac

SEQ ID NO: 28222 - DNA, 2300 bp, Homo sapien
gggaggctgaggtgggtggattgcttgaggtcaggagttcaagaccagcctggccaacatggtgaaaccccatctctactaaaaatacaaaaatcagccgggcatggtgatgcatgcctgtaaccccagctacttaggtggctgaggcaggagaatcacttgagcctgggaggtggaggtggcagcgagccaatatcacgccactgcactccagcctgggtgacagagcaagactctgtctcacaaaaaaaaaaaaaaaaaaaaaaaaaaaaaattagattgagagaaattctatgaaagaaacagaataacgaataactgtgtttgctggtggggtagactgccaatagtatagggcagagaggggtaagtctttggatatggtagcagttgactgagctcagatctgaaggcagaagaaaattagaacagccagcacagagggcctagtgatccagccagagaggctggtaaatgcggaggctgagaagggctggtgcagacaaaccatctgtgtggttggagcttaaaaagcagttacttccggaaagtatagggtgaacgcagtagttctcaacagagggcaattttgcacaccccatgggacatttggcaaagtctagagaaatttttggttgttatgatggtgggggtggggagaaggttgagaaaacttgcactaaaagaatatttcagcccaaatttcagttttagtcattatgttctaaactcatgttctcgccaacttgaatagttttttttttctttcctgcagaaacaaaataagaacaggtttcaagtggctcactctttcatctactctcttgggaaatccccttggggaggttcatgggactccaggagcctttggaaagcaccacaggatacgaaatatctacctaaacaggtgagaaacgatccaaggagccacacccccaactgctcccacagttaccagggcagaaaaaactgagattaggggtagggcacaaaggagaatatatttatgttttatttgcataattacaaattaatgttaaaaagaatgcaaagtcaggtccagggtagggatgaagaggttgcagatgccctcaagtattggaaagctctggccttctggccttatgtcttttttctttcttttctttttttttatttttgagacagggtctccctctgttgcccaggctggagtgcaatggtacgatcttggctcactgcaacctcaaactccccggctcaagcgatcctcctacctcagcctcccgagcagctgggactacaggcgcacgtcaggtggcccagctaatttttgtactttttaaaatttttttgagacggagtctcgctctgtcgcccaggctggagtgcaatggcggaatctcggctcactgcaacctcagcctcctgggctcaagcgattctcgtgcctcagcttcccaagtagctgggactacaggcgcgcgccaccacgcccagctaatttttgtattttttgtagagacgggttttcaacatgttggccaggctggtctcgaattcctgacctcaagtgacgcgcccgcctcagcctcccagagtgctgggatcccaggtggagccaccgcgccgcacttctcgggccttcttctaactcgggtccctgggccccccaggctctcgcttccctcccctacgccgccccgcgcccgcctcagacctctctgggacccgccggcctggcgtcctggcccgcccgagccccacggtccctcgggtcctaacctcggcggggcaggcacctcctcaggaagccccggagcaggctgtcgttgtataggtggcccaggctggcggcccctgaccgaaggtcgcgtcgggtcagtgtgcagcccgtggctgagaggcggctgctgaggggccgggcgggctaggggccggctagccgccgttcgcccctgctttgcatattcatgaagtctagcgaggccggtcgcccaggctagccgtggacgggtcatgaattattcatgaggaaacctctggtcccgcccagaaaggcctcgttgactattcatgagccgaggagcgggtttgggccggaaaaggccgttgacccccggtgggagggaagcgtcgacgagctgaggtgagggctgttgagacgcgaggtctcggcccagagagggcactcgggcgttgttagttctgtctttatgtcaaaaaacaatttttttttcttttcttattacttaaggctttaagttggatttgaaagtatcatatttcgtgagggcctaaagtactgtgaagagaatcgg

SEQ ID NO: 28223 - DNA, 2300 bp, Homo sapien
aaagtatagggtgaacgcagtagttctcaacagagggcaattttgcacaccccatgggacatttggcaaagtctagagaaatttttggttgttatgatggtgggggtggggagaaggttgagaaaacttgcactaaaagaatatttcagcccaaatttcagttttagtcattatgttctaaactcatgttctcgccaacttgaatagttttttttttctttcctgcagaaacaaaataagaacaggtttcaagtggctcactctttcatctactctcttgggaaatccccttggggaggttcatgggactccaggagcctttggaaagcaccacaggatacgaaatatctacctaaacaggtgagaaacgatccaaggagccacacccccaactgctcccacagttaccagggcagaaaaaactgagattaggggtagggcacaaaggagaatatatttatgttttatttgcataattacaaattaatgttaaaaagaatgcaaagtcaggtccagggtagggatgaagaggttgcagatgccctcaagtattggaaagctctggccttctggccttatgtcttttttctttcttttctttttttttatttttgagacagggtctccctctgttgcccaggctggagtgcaatggtacgatcttggctcactgcaacctcaaactccccggctcaagcgatcctcctacctcagcctcccgagcagctgggactacaggcgcacgtcaggtggcccagctaatttttgtactttttaaaatttttttgagacggagtctcgctctgtcgcccaggctggagtgcaatggcggaatctcggctcactgcaacctcagcctcctgggctcaagcgattctcgtgcctcagcttcccaagtagctgggactacaggcgcgcgccaccacgcccagctaatttttgtattttttgtagagacgggttttcaacatgttggccaggctggtctcgaattcctgacctcaagtgacgcgcccgcctcagcctcccagagtgctgggatcccaggtggagccaccgcgccgcacttctcgggccttcttctaactcgggtccctgggccccccaggctctcgcttccctcccctacgccgccccgcgcccgcctcagacctctctgggacccgccggcctggcgtcctggcccgcccgagccccacggtccctcgggtcctaacctcggcggggcaggcacctcctcaggaagccccggagcaggctgtcgttgtataggtggcccaggctggcggcccctgaccgaaggtcgcgtcgggtcagtgtgcagcccgtggctgagaggcggctgctgaggggccgggcgggctaggggccggctagccgccgttcgcccctgctttgcatattcatgaagtctagcgaggccggtcgcccaggctagccgtggacgggtcatgaattattcatgaggaaacctctggtcccgcccagaaaggcctcgttgactattcatgagccgaggagcgggtttgggccggaaaaggccgttgacccccggtgggagggaagcgtcgacgagctgaggtgagggctgttgagacgcgaggtctcggcccagagagggcactcgggcgttgttagttctgtctttatgtcaaaaaacaatttttttttcttttcttattacttaaggctttaagttggatttgaaagtatcatatttcgtgagggcctaaagtactgtgaagagaatcgggagggcagggggctgaggaggaaggcaaaagggaggcgatttcccccagaactggacagagagcacccaggtagttttgaaattcagatttttctggacatgaaatcaaacttgctgagcaagcagcagccataatgagccatgatgaggctggcagggcagacgatgtctgtgcccgacattggagggggccgtgtgtggtggagctttggggaagtttatcttacctgggtcagattctccccagccattgaggttttctgccaggatcgatgcctggtacaggccaagaggtgagagaggtggggacaagacaccccgccccccttgacctcagctcccctttcactttagtgaggatttgccaattaatccctatggactttagttccctaaacagagggagagagtcttgaacctcaggattagccaatcgccaaaatgtgtccgagtacgcagggcactggacaggctgtgcagtacatcgtgtactcagctggtagaaatgaggggtggttctggcccctaaaggggtttttaatctcag

SEQ ID NO: 28224 - DNA, 2300 bp, Homo sapien
tcccagccctgccgccaaccctttgggcaagctcttgcgtctgtttccccatctagcgcatgaggacccaactccttgccctgtaagcatctggaattgtcatgagagccaaaactaattgtaatgtgagtgcccttgctaaagatcaaagactgagccatgcacgcagtcatcattatcatcatcatcatcatcaccaccctaaggggacagaagggaaaactcggtgtctagccctagctggggcaccacacacaagtacttccatccctgcactcacaatgttccgggacgcccctccatgcccagcacccacagcccactgcctctcaaccgcatctccctggtgcctcacgcccatttcccctccatccctcgctccctgcagcaggacaatcacaagataagaagtgccaggtccccacctttgcactcagttctccccttgctaactgggcaccctggggaagcttccctggggaagcttgggcaggaagtggcgggagtctgggggtggtttaatcaagccctctccccattctctccttccagccccaaaaggtcccctcaacccagatcaggacagcccctaatgatatttacaagccccctccctgccatctcctgtcagtatcccaggggtaacttacatagagaataaagagggcattggcactgccattgagctgtgccagttggctcctgatctggttcatgaggttgttgtgacatgggtggcgtatggcacaggtggcgttgacaggggtgatggggagggggctccccgccccatgtttccagtgcagaaccaacagcaggggcacaactcctggggacagtcaggaagaagccatgagtagaaaggcaggaaagggtggcctggggtcatggcacaccggatgggggtccaacaatggccgcatgggagaggactcctggttccccctcaccacctgcagctgtcttcctggggcctagtcttcactctgtcactgcgtgtgtttctctgtctccctttctctaccttagttctccctgctctcttctgggatgacgtaaagatgagggcaagacacaagccatttccacccaaagggtgcagggtccaggagagactcccagccatcccaccctttccctcaggaaggcaaaggtcctaaggccccctggccctctggctggaaggcaccaggccccaggcccagcaggcaccaggagaaaggagacccctctcttcccacctcccgtggtggcccaggttcctcagcagcgcttcccactcactggcccattgcagcccaaatctccgaagccaggcacccatgggggccacggggcatgggggagtggggaggagtcctcggttgaccctcatctccctcccaaacctgccacttgattctggctccctgggccaattgcccccaattctgcccccgcccccatcatcctctatctcttccttccctagtgtcccctatctcactcaagctcaccccatttctgcctggctgtccccactctccatccccaaatcatcattcaaaactctctgttcccccagctccggacagcccctgactccatgccttctcccgactcatccgctgtcccttgtcccaggggttcccctccctcctaacacacacacaccggctcagggagggagaggaaatggtgcaccaggagagagaaaaggcaaaaggtcataggcagtcgggtgggcggggaggaaggaaagtgaaaggtgacaggagagctgggagctgtcccgacatgtcctggtttgcccctcccccaggggggcctgttctcccgactccccccaggcccccttagacgcttttccagggctctgcagaagggcacctgaagatggtgggggccggggtcagcgggcgagtgaggctggagacctcccccggatcccccatgctggaacagcggggacaggggcctcctcaagttcacttctcctgggtcccctgttcgtcccagcatcccaaggcagtgctgaggccccggggtggctgcgggaggggggccacacccctatatctcacctagcgcagaccacacgcttccagacaccagcagatggaggcggcacctgctcccgtcccaggccggagtttgcaagctgctcgccgcccgcgcccctccctgggagcagcccgggaccgcggttggaaaggagaaagcggaaagaaagaaagaaaagaaaaagagagagggagagtgaatctgggagaaagcgcagagggaagagcagccagcgagtgtccggagcgaggaggagg

SEQ ID NO: 28225 - DNA, 2300 bp, Homo sapien
tatagggctgatgtggggtctggcttgccagaaggcatgcaagggcctgggggtccgcttggaaggatgcaggggagactgggcagaatggtagatgtaggggcagctgcagaactcttgagcctaatgagagactcaggccgggcgacgggggtttgatgggtggaggccacagtgagcccctggtcacatggatttggggtccatgtcaggagagccaggctgagtcaggtggcaggggtctgggtgatgtgggatgggactggggactggtccagagctcacgtgctctgagtggtcaggtccttgtgcaggagatgctgggggaggtgtaagaagaagggttgagctggggtgtcctgggatgtggggttacctgagccaggccagggcaggtgagtctcctagtagtgtacgctgaccccagagcaagtgtataggagcagtaagtgccaagtggggccctccatggtccctcaaagaagagacaaggtgtggggtgagaggcaggaaggaggaaggagagccagttcgggaagtgccagctgggatgggcagttttatcacctcacatccgaggccctgctgggagagaatggggggcaagagcgtagataaagcagggtgtgtgtgtggtggggaacggcagcaggcaccagggctcgtcctggcacgatgaaggaggaacccgtggctgggcaggtctgggatgtggcaagaggcaggaactgggggcatggaggatgggcgagggggcggtgggggcccgggcgaggctgcaagagctccctggccttggaaaaccaactcacacaccttgatctcaggtcagggtcaggcggaagggctgggaaggggccacaggggactaaatcatctcctggtactgggggtcccctggcagctttagggacggcatggccccagacgcgtggccatgctgtctggccggcattcccgcatctcatagggtgtatttattttcacttttctgttgcatttcttggaggtgtccctgtgctcattttgcccggctccccactgctcctttctgcccttcctcattcacaaatcgcctggcctcagaagacgccagaacatgtgacactgccttagagcctctagaagcactttttggggacctccatcattctctgaggctgggctcaaaggggcttccaaggcaggtctggaagggaccagccacttctcagtttccccaaccatcaatcagcacccggaggaggaaactggggtacgatttcgccaagcctctctcagtcctgcttcagaatggaaatgctggaccgccttcccagaagcaccttcccagagtgtcccgacagaactgagtcagtcacccctacccccatgtcttcctagccccttccccagcctcacaggtacagtggtcagcagggcgagtgcactggtggtgtctggaggcctgaccctctggggccctgggcaacgtgttcccctcggagccccttggggcccagtggcaatgtgcagattggaggaggctacctctggggtggcttccagcgcccatgttcagttccactttatgaccgtctaaagtccacgccggccccggcccctcctcctggagcctccttctcagccaagccctagccctcctcctcccactgcccccctaaagccccccaaccagggggcacaggggccagtctccatctgctagtccagactcgctacctccccaaacccaggtgagtcagggccgtctggggcgcccactgctgggacccctgctgactcggccaggggccccctcctggcgatgcccatcttcagacaactcccgggacaagccaggcaggaaaaccacagggcgttttgtcgaaggcttcattataattttatcaatcaaattcttagaagagggaaaaagtctgttctccccaccctcccccctcactcgtccccccccttcactctcactttcttccattcataatttcctatgatgcacctcaaacaacttcctggactggggatcccggctaaatatagctgtttctgtcttacaacacaggctccagtatataaatcaggcaaattccccatttgagcatgaacctctgaaaactgccggcatctgaggtttcctccaaggccctctgaagtgcagcccataatgaaggtcttggcggcaggtaaatacacccgccccgcgccggcttcgcgtccccgctgcggggcgcggcggcaacttggggcgcttggcagcgcgagccggacgcccacccgccgcagacacacgaacacttggg

SEQ ID NO: 28226 - DNA, 2300 bp, Homo sapien
tggctgttgcaggatgagatcggtggctgggtgctgtggctcacgcttgcaatcccagcactttgggaggccaaggcaggaggatcatttgaacccaggagtttgttatcagcctgggcaacatagtgacaccccgtctctacaaaaaataaaaaaattagctgggcatagtgatgcatgcctgtggtctcagctactcaggagactaaggcggggagccttgcttcagcttaggagctggaggccacagtgagctacctacaatggcgccactgcactccagcctgggtgacagagcaagatcctgcatttaaaaaaagagaaaaaaagacgagatcagggatgtgaaatggagaaggatcccctcttggcatggccccaggaaacagcattgtgggggtgggcacagagatgaggacttcagcggaagcgacattctcaggatgagaatccagaactggcccctgggggtggtgagggggaggtatgaggcctggtgtggtgagtcccagcctgggtgccggggagtgggtaggggctgaagagcagcctcctgggcgtggggtcgcctatttttgcctactacgtgatcctcagacctgggagtggctggtgcagcatggagccaaataaaggtttgtcgaatgaataaatgagtgatggggagaatgggtggcaactgccttggtggccacagtgggcatcgggagcaggcatggacaggggtgcatccaacctcctcctttctggctgccccagctctccttgctcaggcgccccagaccccatgctccctccagctggagcagctcaggcctccctggcagcctccaggagtcccaccctgactccccagactcctgagggcctcctcccacccgggcttcttagggtgcaggccaaggaccctcctctgggcctgggagatgtgctgaccaggcagggtctataggcctgggccagcctcttggcctccctgtctgccttcacccaggcctcagtttaccccacagtaaagtagcagtttgactagggaggcgctgttcccagggccctttcgcagaggaccaacctaagatcgctatctttcagagaaagtgaaacctggtccccaactgtcaaggcggcaactccccctccccggcttcccctctgagctcacagcttccccatctcctccttcccccatcccgccccctcgacagctaatacttggaatcagaccttcatctttgctttttccttcagaggtcttttccttttatgtccatgctggcagcaaccctgtgaggtgggctgggaaaggcttttctcctcctcattttatagttgtgggtctctgaggcccagagaggttaagtgacttgcctcaggtcacacagcacctcagcaggcttgaaccctggcctcctgtttctcttgctccaagtgtccagttctccccagtggagcctgcctacaaagacaaggcctggctttggggagtgggcctggcagagggtgcacgatgggggaaaggagaccgtcgggagccgggctgggggatgctggtcctggggcctgaaccacaatctcggggctgccagcctgcgtctggctctgtgcccagagcccggtggtttccgctcacagatgtcccaacagccccggcgagagggcaggaagggcactcaagaaggaagatgtctcgctcccctcagcccccaaccaccgtgtcctgtgaggccaatggctcctgggccaagactggcctggggcctccagaggcccagctcgaagtccctcctgcccatccctggcccagttccctgaagatggcatggacccttttcctccccactcaccctaggaaggctgaggctgcggttttacatcatccttgggcgtagggctgacctcgaagaacgaattcgaagaaaacaggaggaggagcgggcatacaccgcgccctgcgcccattggccgcccgtggaaattttggtttttggggtcatgttcccagaaggcctgccctcccccctccccatccccacccacctcatgaggtgttggccaatcgccccagcgggcataaagtggctgccagcctgcagggctcccagccgagaggtgtcacccccagcgggcgcgggccggagcacgggcacccagcatgggggtactgctcacacagaggacgctgctcagtaagtacttccttcctccccgccagaacccgcctgctgggtctgcccacgggtgccggtggggagcagaggcaccctctgccctccgggaactggggaggccaggcgccaggc

SEQ ID NO: 28227 - DNA, 2300 bp, Homo sapien
ccctaggccttggtcctcacccacccaccaagggggcagggactcctaaggaggaggtttcagggtcttcctccttcaagtcctggcctggatgctacctcaggctccagtaagtttctgagagctgattctgggttggggtcagggacggggcccggagtggagcaccacgaatgtcctcacaggctcagcccaggccctcagggaggggggcgaattgtggttctttgataaaatgccgccttcgatttactgccaagtgccaggctggactggtcaagtaggctccattagccccatttaacagacgaggaaacaggagctgaatgggaaagcctcagccggatttgcaccaagagcccctcactcagcttcctctcctgaccagggctccaggagacctgactctgcccttgagggcccaggcaggcactgcggtcacaacctgatgactggtgagggcaaggacagggtgtccctgggagaggccccccttctgctgaggaagcagcttttccagtcaaacaatagcgctattcctggcagatgaccaagctgggccaggccaggccatagcgggagggggcaggagagggaggagcagagcctccctgggagctttcagccttcgcctgggcctggaacatcctgtcctggtacagctggggatactgaggcctagggaggtgaagggtttcaagagactatcagggtaggccactccacttcctgcctccttcccctcagccccatggtttcccactctgtctgcacctgccattgatgagatgggctcagcctttgagaagctcctccttcccctagtcctccaggggataggccaggatgtggtggctacatagtgtttcacaggaatgtgtcaagcccgagagtccagggaggaggcttagcttggcttccatctgcctatggtgggggctccagagcaggcagagggcctgcttaggcctgctgggtcccaatcaggcctgaggcctgctttagtctacttggttcaaagcctcacatctgaggcctcagggtgctcaggccaggcaagggtcccctggagcattctcagccctgcatggagccaacatggacatgctgatgcctgcttagccttgggggggtcttagacctgtgaaggcctgataagatctggggtgtctgccagtgccgggggcctccttgaacctgaagcaagtttagatgtgcacaggctagctaagggctgcaggctttggggctcaagtttcaggcttgaggtctgagtactcactgaacctcagctgcaagggcctcccccaccaaagtctgagcactgggcattactggctcaagcacttccgggttttgttggtatcgagggacctcaagccttaggccttggccacctgcagccccctaacccaaagtatgtcgctcaggcagaggtggctaggattctacctctgtgtgcccctggtgaggagccttctattttgaaagttggatgaaaggaacaagtggggctaccaggccaggtttcaatttgtcagccccctcgcaagcggggaagggtaggtatcaatcgcaatcctgtgttggcggccctgccccctgcagccatgagaggcaggagagcgaaaggcgcccgggggacagcgctgcacagcagacctgtgcctctcattgctccggggatttgggggcagcgttctggtcctagccgagctccagtttgtttcgtgtcccttctgtctcaaggacttcaatcatgaaacccacgtgtgtgccagaaggacagaaacgtcccctccgggatgctcccaccggctgcgcagctggctttccgcggaaagggcggagcccagggagggggcgcgtcaggggcggggcctggaggagtcagacggggtggggtctatccccgagccagtactaaaaaaggcggagccgttcggggcggtctcggtgggctggctggaaagcgggatgaggttctggcgttaggaggaggcgtgaccacccaataggcttctcttcccgcggggcgtggccgtcaaggagccggacgccgcgcctggctgggcgggtcagcctcgcagcgggcggcgtggacgcggcagcgcagcggctcctttaaggctcgggcaccacccccgccgccccgcctcccgtgcggcctgggtctagttggcggcggggtcgggtccgcgcgagccgcgatggagctgcacatcctagaacaccgggtgcgggtgctgagcgtcgcccgtcccggtctctggctctacacccacccgctcatcaagctg

SEQ ID NO: 28228 - DNA, 2300 bp, Homo sapien
atgggctcagctgtccttttgattttcagattcgtctgcggtgccaaaagggcatcccgccttctctgcggggccgtgcttggcagtacctgtcaggaggcaaggtgaagttacagcagaaccctggaaagtttgacgtaagtttcccttcctttgccctgccctcccttccgcatctcttggcgtcctccccatggcggcaatcctccatgtgctcacctgaacctcacaggatgagcagtccatgaaacctccagtcatgtgcccaactgcccaggccccagcaggccagaccggcccagtcctgggtacctgtgtctcctggagggtctgtacaactgaggctccagccctgagcagccctcagtggaatggccagatttggtaccccctattccagctctttctcttgatgaccactcaggttttgctttcctgggctcagtaggctacctccctgctcttggtcatcaggaggggacactcagaccatttccctgactgccttgggccctgtgccctgggcctatgggggcttgactagcaggaccacaggtccttcagtgtctcccggcctcccatcctctactttctcctgccttgtccaagcctggccagcacagcccacctgtgtgtcttgtggggtcatcagccctaggagtagcagagccaaacccaagggggctgaagggaactgcccaagtagctcaaggggtcagacgccagtcagtggccagagagggtgccctctgttgttatccctcctcctgtcccgatatccctcctgctgctccctgccccatggctggccagagtaaaatacctctccattcagagctgggcagctcctccagcctgctcccccagggaactatggggaagcagttggattccctggggttgccccggcttacctgccagatctggccgcaggcatcggggtttctcgcaggcccttgggactggtgacaggcagacagtgagacagagcagagctgcctaccaccagctctttgttgacatatctcatgcttcttcattgaacactccagtcttgccaaacctgttccttgagatgactgggcaggagcagggcaaggtagcctagagtttctgctgttgacctggagagggcgagagctttttgctggcaacacgtggacttgcaggggcagggaagctggtagagtgtctggctggggtaggtctgaatctggctgattggattattccccagagcaccaataccaggccacactggagcagcctcttgactccagagtcttcctcctagtggctacatctcttccatttcgaggggccgcatcctgggcaaagtgggaggctcaggggtgggaacctcagtccaagtccatagttaaaatcaggctgccagagccaggcatgagagccaagagcgtgggcagcctggtcagcctcttggctgtgtggttcagcaagcatgagtgtgtgtgcagcagaacacagagctgtgtgcatgtgtgtgtagagctgtgcttccagagaagaatcagccaccccccagggggtctggaaagttgcttgtgtgaggaggtggatttgcagagaaggccttcttgatgcaccgaagctgagtgacgggttcctgcatggttctgggggctggaagaatggtttgtgagcacacctggaaagactttgcctgtgggtgacccagaggaagcatgaggagcttcccctggttgctgcgggtcctgtgccgaggcagggcacagtgggggtctggtgatggcagcatgcacctgtttctgtgctctctccccacagggccctccattcaatacccagtccaggtggcccatcccaacctcagcattcagggcaggctctgcaggtgctggtggctccttctcctgcacgtgctatttcttcctccttccttgggcaggcaggacctcctgtccttttttacctggctttcttctctggcttcaccttatgatggcgccagtacccctcaggctggtggaggctacaggccccatgaccatggtacctgcttgtctgccggtgccctttcgatctgcagctaccctcttttcctttctcaccaaccatgtgtggccaagtgccttaggctgctgaagtgccagatgaacacatcctaggaactgacttccggggttttcgggttcctacctcatgggaactgctaggagaatttgtggggccctcttccccattctgacaaaagcaaacctgcactgcgctcagacagtacttagaggtgcacagtacacagacccccatcacaaggg

SEQ ID NO: 28229 - DNA, 2300 bp, Homo sapien
aaactcttccttgcgtctagtgcagttcccttcagcccccttcctctgcctcctttctaggcagtcccagaagctctcacttggcacctgtgaccagccactgctactcttcccccaccaccctcagcctgtttgcctggctccttcctggttcttgactctctctgacccttggaaagttttctcttgtttgcactggtccccaggaaggccagggcttctgtactccctcctctgagagcttccagcaggactgttgaagggggtttctaggtgaggggaagttaggtgtgagctgaggtcctgggcttctgtgtcaagcatcctcctgggatggaggggcagagaggaagccattgcttactgaacacagactgtgtcaggccccacactaagcacattttccctctctaatggactcctttgacaactctgcacagtagtaggtattattcagatcttacagttgagaagtggttggcttaaggtcagcgctagattcaaacccacatccagatgttcttctcatgccccgagcgcccatcccctttatcccaggtcaggctgcttagtgcaggggttgagggagtatcattggccatctcacccctcccccaccacagcatttcacaggagtgatgcctctgcctttgtccttgcccaccttgacgggtcagggcaactgccttcagagcctcattctggtcccaagcccaggaggagcccactggtgatgtagaaagtacacggggctgggtccctccagcctgtgcggtgcagctaggaggtagtagggtttctgattgtatgacaaatttacccccactctgcttgtgtgatgaaatttcccccacgaattttcccctaccctcaatgccccatttgtaaaagacatgatcgttttgatagtttttcaaattgagttttgccagtgaaaacttttcctgataaaaacagctagccggaattgagcactagctctgggtcatgagctgcctcaaatacttcctccctcacttctcccattctacgagtggcagagaagacctgggccattttagcaagggctgagatcaggactcacactcaggccagctgcctatgccccaggctggtgatgttgggagctcagggtcaacgagaggagagtggggattcttgaccaaaacaaagagggagccatttgagcagctcccatcttccttcagagttctgctgagatttctcccctctaggctggcggtatcctgccacatggctgctgaaaccaacatacctgcgtgaaagtgcccaggccacacctctgggcacattctggttcatctcatgagctaccttccctgtggctgcagctgagccgcacacagtgcaatgccctccctggtgacagactatggggttcacccaacttgtaatggttccttttcctttttttttttttttttcctgaaacagagtctcggtctgtcgccccggctggagtgcagtggcacgatcttagcttactgcaacctccacctcctgggttcaagcgattctcgtgcctcagcctcccaagtagctaggattacaggcgcccaccaccatgcctggctaattttttgtatttttagtagagacggggtttcaccatgttggccaggctggtctcgaactcctgaccttaagtgatctgcccttctcggctccccagagtgctgggattacaggtgtgagccagcgtgcccgcctatagggttccattttgattcagaagatagttatgagggtctggaattccatggcaaacctcaggaatgcctgtgttgtcaccagggatgtgggaccctgccatcacctggtgttagcatatctaattgcaggcacctcctctccccgcaccataggattggcatggtagcaacagtaggaaaagtcctttttttttttttgagacagagttttgctcttgtcacccggctggagggcaatggcacgatcttggctcactgcaactctgcttcccgggttcaaatgattctcctgccttagcctcccgagtcgctaggattacaggcgcccgccaccacacccagctaatttttgtatttttagtagacacggggtttcaccatgttggccaggctggtctcaaactcctgaactcaggtgatccacccgcctcggcctcccaaagtgctgggattacaggcgtgagccaccttgcccggcgaaagtcctcttttctccctgtttctgctcttgctgctgtgtgcactgagggcccaccacgcattggcagaggggctgggctaggggag

SEQ ID NO: 28230 - DNA, 2300 bp, Homo sapien
gagctgagtaagaacatgtttgggatataaccctagggatagaatcatgaagtcaaagggtcgtggatacttttctttgctgtacttgaggcttcacatctgccccaggtatgtctggctcctccccctccctttcctgggataggcccataccaccatgaaagacccataccgcccctcctgggagctgggaccaggagcccaccactgtctggagtcactgaagagaaggaacatcctcctagactgagggtttaagaccaaaatagcctgtgcccactcccatgtctgttcttgccttgtttatggaaagccagaagctcatggaatgtgaggattgtacaatgacgccatcaagaatgtccaggccacatggcatcaaggtgaaatcactcaaggctcaagaccccctcttggggcttgccttggggccctgaatagtctgtcccaggccctgcagccaggtctgagtcttccagtcccttcccctctctaggcctgtctctcccacaggtctgcagggagtgtcagatgacaatatactgtgacttgtaaaccataaagtactagacataagcgaggagctatcattatattatagatccaagagttgacaatctctagggtcagaaatcagctgcttggggctaagcccatatagataaaatcggcccatccctccaaatataggcagttggtaagagctaagttcgaatcctggctatattcacagctaattctgggaccttaggcaactgactttacctcagtctccttaactgtaaaatgggactaataatggtgtatacctcattgctaagagattacaagacatgttgcaaccaatttggaaaacagtttgccagttcctcgaaaggttaaacagttgccatatgacccagcaattccactcttccttatctatccaagagaaatgtaaacataaggcccccacacaaaagcttgtacctgaatggtcagagcagcattattcataatggctaaaaactagaaacacgcgaatgaccatcactgatgaatggaaaaacaaaatctggtatagtcccagctcccaggaggggcagtataggtctttcatggcggtgtgggcctatcccaggaaagggaggggtggagtcagacatacctggggcagatgtgaatccagaagcactgatacatgctacaatgtggatgaaacttgaaaatgttcaagagaaagaatccagacataaaaggccatatattgtataattccatttatatgaaatatccagaaaagggacatctatagaaacaggaagcagattagtggttgccagggactgggggagccaggatgcggagtgactgctaattggtaggagtttctttttggggtgatgaaaatgttctaaaattagaatgttgtgatggctgcacaactctgtaaatatgctaaaaatcattgtacactttaaacgtgaatttatggtatgtttatgttccataaaactgctggggaaaagactacaggagaaagtaggtagagcttcgggcgtgcgtggctcagtaaacgctggtgattattaataattaggtctcacgaggtaatttaaagccccagaagcagtgagtgcaatgggactgccagacttctggctcaggctgggcctttaagccgctctgcgtccctgaactcacttgggcctcctcagagttcctcataaatgaatggggcaaacaatccctaccacgtccttggggtctcgcagggagcggggctcaggaggcagatgaggaatccatggaggaagccctgggcctccggctcgcgctctgcagtaggtgacaggccccgcttggagccaacccggaaaggcccgagctcgtccaggtgagttcttgtgattggcagcccggaggagggcggggagggctgcggtgacggctgccccgccccctcacttcgggcttgttggcgcccgccgggggagggtgggcggggcccggggtccgcggcgcccattgggcgtggggggagagctccggggtgggcctggagccccgccccccggccttgcggcggccaataggcgccgcgcgtgggcggggcgtcggcggcagcagggcggctgaggtggccgctggagctcaggcggcgggcgcggctgggatggcgaagagcaacggagagaatgggccgcgcgcgcccgcggccggggaaagcctgtcgggaacccgggagagcctggcccagggccccgacgccgcaaccaccgacgaactcagctctctcgggtctgactcggaggccaacg

SEQ ID NO: 28231 - DNA, 2300 bp, Homo sapien
ttgctttaactcttctgtatttcagatcttgattccacccaaaggtttattttcaaagctcaagaaagaggctgaaaacccccgagaagttttggatcaggtaaactgaatagcatttcttgcaaccagttactggtggttggttctgttttatgtctgaaaacagtctctgaggcaggaccttgttatgttccagtcatgggaatggtgggagaaaaggctttgttggctacaaaggccaaagaaacctggagtccggatgcttcccaacataccacaactttctgctttgctctcagcctcaatatatctccctcttttccactctagctagaagacagaaggccagctcccaagcagatcagagggtggaattttcattctgtcccaactctgcacctgggtggaaccaggtgcaaatgccatagtttggaaccatacttccattctgttccgaaggaggcgctgactttgatgaaagccctggaggtggtagcctcatcaggagcagaccctgcttcagcgtagcaccaagctgtttcccatctctgcaggtgtgttaccgagtggaatgggccaaattccaggaacgtgagaggaagaaggaagaagaggagaaggagaaggagcgggtggcctatgctcagatcgactggcatgattttgtggtggtggaaacagtggacttccaacccaatgagcaaggtaggtctgtgaggagtgactccagatggggagccaggaactcagacttcccgggaaacctggtgcaggtgttcccagagagcagtagaatctctcagagggctttatcagtgctgtctcctccctgctcccaaaagacttcagttctaccactttgcccaacttagattcaatacgtacttgccagaccctagatgggcctctggagatagctggagagaaaacagacatggccccagcccttggggagctcagacagggcaaataggtgggtctttgataaggaatacctttgcctctggctcaccctctagggaacttccctccccccaccacgccagaggagctgggggcccgaatcctcattcaggagcgctatgaaaagtttggggagagtgaggaagttgagatggaggtcgagtctgatgaggaggatgacaaacaggagaaggcggaggagcctccttcccagctggaccaggacacccaagtacaagatatggatgaggtaagctgctgggcaggcctgcaggatgaccttttcccctgaagccccaggaggtcgaagtgctctccaccagtcagatccagctcccctgtgagccttgaaaggaggcgtgggtcctgaacaaggccatacagctgcccaagtccaggcagcacagagcctctttccagctccggcaacaaagattcattcataggcaaggatctaaaagctgtgctgacctgttctgtggccgcctccctggcccggacagcctgctctcactgcctcgtgccagccctcagggaactcactgcattaccctgttctgttttgagctctcagctgggctccaagctcccagagcttttctaaatgtagcccacgcttcctttcaggcatccctacccccttcaagccaggccctctaagcaggcatggagtctccagaaccagactgttctcccccactcggaaataatttgtgcacagcctgagaagaaagggcccctgtctgtgggaaatgactttttctctccctcccagcattgctgtgtgagcagctaccattgattggcgactcgccgcccccacccctcgcccccttggcactgtccccccccggcatgttaagtgcccttggcctcttgggactgcctggtgccagctgctggaaatgcctgggaggagtgctaggaccgtggcctcagcactcccattcatgctgtgaggaagcagcttggcctgctgccggctggcctcagctgccctgggaggcttagcacatggacgctggctggcagaggccaaggctccttgccacccagagacctgccaggctcagctacagggaggtggcctcagcccctctctgagtcctgccattgctttgcttttcagggttcagatgatgaagaagaagggcagaaagtgcccccacccccagagacacccatgcctccacctctgcccccaactccagaccaagtcattgtccgcaaggattatgatcccaaaggtagggagggcctgcttcccaaccctcgggctgcccaggaagtcctgtgtgccctcatgtgttcctcacacccgtctttctaggagggct

SEQ ID NO: 28232 - DNA, 2300 bp, Homo sapien
ggttctcttctcagtttttggtgtcctccacttccccttccgcctctagactaaacaatctggcccaaactgatgtcccagaacactcttgtgtactaaacagcttcaggtgcagctaactactgggcactttcatctctaacctctttcctcaggaatagctacccagtcacccatgccagaaagttgggggctcctctctcttcctcagcttccacactcgatgataataacgtttatcaagttgggcacaatggcttgcacctataatcccggtgactcaggaggctgaggtaggaagattgcttgagcccaagaattcaaggctgcagtaagctatgactgcaccactgcattccagcctgggtgacagaacgacacccggtctcttaaaaaaaacttttatcaagctatgagtagatcccaggtatttttcccaagcactttaaatatattaactcttataacctttagaagaagcctataagattaagtactctttttttttttgagacagtctcttgctgtcgcccaggctggagtgcagcggcatgatcttggctcattgcaacttctgcttcccaggttcaagcaattctctcccgaatagtggggattacaaacatgcaccaccacacctggctaattttttatttttagtagagacagttttgctatgttggccaggctggtctcaaactcctgacctcaagtgatctgtctgcctcggcctcccaaactgctggaattacaggcgtgagccactggacccggccaagaactcttaatatctccacattacagatgacaaaactgagagatggagagcttaatgtccaactggcagaaccaggattctaacacaccactctggctgaagagcctgcctaccccctctgccctaatctcggccaggccttcagcctctttggaatagcgtgactggcctcccctcatagtgattctccacacgtctgcctacctgaatttctgaaacacaaatgtcactatttggcttaaaacactcccttttcttcccactgtctacaaggaaaagttcaaatcctaagtaagaatcgcatctcctgccactacgctcctaagtctatgcttcaacacttgttcatttactcttgatcagagacaccgtttgattcacctcggtgtctttgcgcatattatctggctattaccttattttcccccaatgcctgggaaaatgccagggacacacgggcacttaaatatttgtggaaaaggcatggcttcttcagtcatgttccccccccccgccccccttattctgaacccaaagcaatgatcagcgtatgtgttcaataaatatttgctggatgaataaaggatgctatttcccttccctagtcacctacctggcaaactcctattccttcttctaaaagaaatttacctctcactcttgtgggcttccctaccttaatatcccttctagcccagcaaacaatgttcattagatttgtacctgaaacttctatcacagggcatatcacaccatactacaatggtttgtgcacattcgagattggagagctttattaagggcgggctggcactgtatcatcgatggccattgggacaacaaacatttggtgagcattctcatatgtctgtcttctcgttagcctgtgagctccctaggcagggaccatgccccattcattccggtaatgtgggagcctggcacggtgtctggcttggggcagacaccgaaatagatgctgagaattaacatccaaagatgtaccgtgcaggctgggaaattagccattactggggaaaggctgtggccggcggccccaactgctacataagatcagaggatgggctggatcagcgcctctcgcacttataaatcaatcaccttaggattttgttcaaatgtagattcctatttaaaagatctacggcggagactccacatttctaagaagctcccggctcgtgccgacggggctgctccgcggaccacttagagaatcccgttcagggtggctcatttcgctaccagaacaccaccatagcgcgggaagcgcgcagcctcttgggacttgcagtccctccaagcccttcatagcggccggccgcttattcctgtgcgagtaaggagcgcccaggccaaccctccggctgcaggctgaggggcgggggagaggtacctgtttgggctccgtgggcacgggcggcggcgggggcaccgcctgcacgggtccggccggcatgactgcgacgctcagggctgccagtccgcctcggtgtcggtg

SEQ ID NO: 28233 - DNA, 2300 bp, Homo sapien
agtagatcctggatcagataagcagcagcaaatgcccaagtgtcaggaaaatccaagatgaccttatgttgtttcttctgaaaattgaagtcatgcagatacaagcatagtttaagaagtactttatgtgtgtgtcaagtgaagaagcacttgacgtgagctctttctgcaattcctgggtcttgagtggaaccctcagtctgaagctgccagcccggcactgtacccatgaccacataggtgacagcactaattgagcccttagggaggagcagcagctatctctgcctctcctcaatttcctggggctcaaggtggacttttgactcccagagaagagcaggagcctttcctgcatttccgttcaacattcaagcgccttctctctctcagaactagtaccctaaccctactcggtaaagatgatgcctacttcccagccagggtgcctggtgagattcaaagccaccaccatgaaaacacgggaaactctaaaaccagctatgtggcagatgtcagtctcaaacatgagattgttaattgcctggatccctggggatactgaagggactgagggcaaaataactaactgcactagtagaggaataagactggcttgaacttgcattcccactctaccaactccaaacttcactgtcctcatttgtaaataggttgctataaggaataaatgacgtaacacatgaagtgttgggcacagtatccggctcatagtaaatgaccaatacatcccagctatcattattctacattaataacaaccatgacacacagctacgatgtgtgtggggggagggggaagacttgagagagcaacctttcctatcactccctcatttcacaggtgaggaaactgaagtccaggaacaggttcggagccagctccccgctttccagagttgaggagaggaggaaggagagaggggggaatcgcaggagagggagagaagccggcgggattcgaggtaggcctctggggagcgagccgcatagcttgcagggctgcatctgtgagagtgaggggtgaagcctaaagcagcagccctgcgtgatggctcatgcgtgtaatcccagcactttgggaggccaaggcgggaggatcgcttgaccccaggagtttgagaccagcctgggcaacatagggagacgtcctcccatgtccctacaaaaaaaaaaatttaaaaactggccgggcgcggtggctcacgcctgtaaccctaacactttgggaagccgaggcgggcggatcatttgaggtcaggagttccagaccagcctggccagcatggtgaaaccccgtctctactaaaaatgccaaaaaaaaaaaaaaaaaaattagccgggtgtggtgggcgcctgtagtcccagccactcgggaggctgaggcaggagaatcgcttgaactcgggaggcggaggttgcagagagtcaagatcgcgccactgcactccagcctgggtgacagagcaagaccttgtctcagaaaaaaagaaaaaagaaagacaaagaaagcagcagccttgatttgagagggaggcccccagtggggcttgagggcgggactacggaaggcaggggatggaagcaagaaaaggcaggttccgtgggaaaagcgaattaagggcgtaggatttggaagcggggcttggaggatgtgggtctgaaatgaaaggggggactaagggagtagggaagtggggctcttaggcggtgagcctgaggggacaggggctctcctaaatgagagaccaatgggagggagctgggctcttggaaggcggggtcgaagggagcgaggtactggcctgtggagtaaaggagccgcgaggtgagtgcggcgggggtccggcgggtgacgtacaacatctcacctgtcttcggcgtcgcggcttcagccttcgtgtctggtcggctcccggaactgcccccggtgcgcctgcggccaccgggatccccgaaaagccctagccgggcgctcaggccgctgccttggcaacggcgtcggacgccgcggtgcccgcggggaggggcgggaagcgcgtcacggcgaggggacggtcccggaagtgcgccagtcgtaccttcgcggccgcaactcgctcggccgccgccatcttgcgagctcgtcgtactgaccgagcggggaggctgtcttgaggcggcaccgctcaccgacaccgaggcggactggcagccctgagcgtcgcagtcatgccggccggacccgtgcaggcggtgcccccgccgccgcccgtgcccacggagcccaaacaggtacc

SEQ ID NO: 28234 - DNA, 2300 bp, Homo sapien
cccttctccttcagcccccagggccacagagcagaatttcaggggggtgggggaagccgtgaggtttcagttccccagctgaggcgaggggcatgggaccaggcacccccacgtggagtcctgcttcggtgacctgagcccttcctcccccacccctgtagtggctccgggtgctgccctgtaagcacgagtttcaccgagactgtgtggacccctggctgatgctccagcagacctgcccactgtgcaaattcaacgtcctgggtgagcaccaggggtggggtccctcggcctactctgcctgctcctcacctgatgcctctctccctgttcttcttcccctcccctgcagggaaccgctactccgatgattagctgcccagctggactctgcacatggggatggacccttcctgcctgcaccccggtcctcagcctgggctcccaggacaggacaggatgggacagcaggatagacaggacagcaagcccagtgggtgggaggaaggatgagggccccaccatgtccacactgggaaggagggccccacagcttcagactgaggatctagggctgggacctgtcagtcaaggaagagaggtcactttgggaccttctctgcaatcctgtgacgtgagtctgccctccttacaggcagctcccaggtcaataaggaaagagaatatggggccagtgtagctgtcgccagggttctgggagctccctgtggcctgtctgggaattcctgggggctgagactacagtggccaggttttgtgcttatttattggggggtgggttgagggaagagctatctggccttggggtaccctggcctgaccgtctttcaggatacttcttgtcaaggctgtctgcctgttgcctttggtcctcaagcactgggagccatgggtcccactgcctgtccagcctggctcccttcctgggcctggctaggaccagaggtcttagaaaccgtcctgttctggaatccttggctgcggctttgtgttgctgaccgggatactcgaagccacaggatcaatgtggtgcctcatccaggggcatccttttttttttttttttttttttttaaagagttggagtagggaaggtttaatagtaaaataaacgtggctatattttaacataagatgtaaaatgtgtataggtgttttaagattttaaaaagttaccttaggttctactgcctgtggtagatggaattctaagatggcccccaaggtctcccactaccacctgccgtgaacatgccttgcattaatataatttctggaactgggactcagagggattttatttatttattttatttttatttcttgagatggagtttcactcttgttgcccaggctggagtgcaatggcgtgatctcgcctcactgcaacctccgcctcccgggttcaagcaattctcctgtctcagcctcccaagtagctgggattacagacatgcgccaccacgcccggctaattttgtatttttagtagagacggggtttctccatgttggtcaggctggtctcgaactcccgatctcaggtgatccgcctgcctcggcctcccaaagtgctgggattacagacgtgagccactgcgcctggcttctcaaagggattttatgcccatggttgggttctgtcttatagcaagctgacctgaagatagggaaagtatttgagtgtgagccttgccctaaccacatgagcctattcaaagtagttttctgctggtagaagaggaggaagtcagggatttgaagcatgtgggggattcagcacatgagaaatcctctgttgttgacttgaagatggagggagccccatggcaaggaaggtggacggcctctaggagccgtgagaggacctggcttacagccagccagcgaggacatggggacctcagtcccacagccgcaaggatcggaattctgccaacaagtggagcttggaagccaattcttccccagaaccggcagaaaggaacgcaacctggtagatgcctcaatttcagccctctgggacccggagcaaaaaaacccagccacacagaacctggacttctgactgccagaactgggagctaatgaatacatggcacggagttggtgggcgcctgagagagctactcagctgtgaggtccttcccctggacttgagcacaggccttctggctcagggtgctgagggatggtgctcccctgtgaggggggtgcccggggcaccccagcctccctcaggaactcccaggcccctcagaagcaggaagttgggctgac

SEQ ID NO: 28235 - DNA, 2300 bp, Homo sapien
gtaagcccagcactttgggaggctgaggcaggcagttcccttgagcccaggagttcaagaccagcgtgggcaacatggtgaaaccctgtctctacaaaaaaaaaaaaaaaaaaaaaaaaaattagctgggcatggtgacacacccctgtggtctcagctactttggaggctgaggtgggagaatcagttgaccctggaggttgcaatgagctgagaaggcaccattgcattccagcctgggcaacagagagagaccctgtctcaaaaataaatgcataaataattttttaatgcttaaacttttacttttcttatttaggtctttaatctatatggaattcatattttgtatatgatgtgtatgtaataggggtctaatttcttctcctaatggttaattcaatttcttagcacaatttaccaaacagtccatgctactgcctccttgtatctccacaaacacaatgtttcctctgatgtacaccatctttagatgtgtgggtcagtttctggcctatttcatgttccatttgtctgtctttaggctgatatcgggggctgtcttatatacccgtctcacacttcttcaggagcaacttggtcatcccatatcagtgttcctacaggtgttcactgtaaaattctttcaatttttctggagaaaaaagagtgttgtggctcatctggcccaggttggagtgcagtggcaccatctcaggtcactgcaagctccgcctcccgggttcacgccattctgctgcctcagcctcccgagtagctgggactacaggcgcctcccaacatgcccggctatttttttgcatttttagtagagacggggtttcaccttgttagccacgatggtttcgatctgctaacctcatgatccgcctgcctcagcctcccaaagtgctgggattacaggcgtgacccaccgcgccctgcccaccatacaatttttaaaggctcaggtttcagactgagccagctcccagcagccccaacccttggagaaacggacaagttttagaacagtagtggaacttccacattccagtagacatttgagttatttgctgggggtgaggcagtgttgattgtacatggtgcttatttatttatttatttatttagagacggagtttcactcttgtcgcccaggctggattccaatggcgcgatctcggctcgccgcaacctccgcctcccgggttcaagcgattctcctgcctcagcctcctgagtagctggaattacaggcatgcgccaccacgcccggctaattttgtatttttagtagagacggggtttctccatgttggtcaggcgggtctcgaactcccgacctcaggtgatccgcccgcctcggcctcccaaagtgctgggattacaggcgtgagccaccgcgcccggcctatggtgcccatttcacagatgagggaagtgacccagcctctcggtcccactgaggcactgagtccctgcctgcttcgttttgccttgccccccagcccctttcccctgcccctctatctcccctgtcggcttcccacgccagtctctggttctctgcctcctgctgtttagtggggtcgagacagggaggaccggggaagagagggatgtgacttggccctggccaccccgtgggtccacggggctgccgcagaacaagggcctgccaccaggccccttagacatcccttgctcctgcccttctcaggctctgatcgtgtctctgctcccccaggtcgccctttccaactattttcctgtctgccccgctgacgcgtccgctgccgaagcacctcctctctctgactttccgccttcccgctgcgaccccggttttgcccctctccagctccctcagccgcgggcacctgagctctccgcggccaccagggggcgcccgcggcccagtctgggcgcgagagccgccaagcgcccactccgttcctcctggtgccccgccccgtccggccgcggccccgcccctcccggcgccccgccccgtccggcagcggcctcgctccctccgatcccccccgcgcccgggacccctggccccactgttgggccagctcgccgggtccggccatgggccccgccgctcgccccgcgctgagatcgccgccgccgcctccgccgccgcctccgtctccgctgctgctgctgctgcccctgctgccgctgtggctgggcctggcggggcccggggccgcggcggacggcagcgagccggcggccggggcggggcggggcggagcccgcgccgtgcgggtggacgtgagactgcc

SEQ ID NO: 28236 - DNA, 2300 bp, Homo sapien
aaccgagcctgggcctatttaggatttatatgatcaaattaactagctgttttatggtgggccagaagtaggttaagtctcagtggaggaagaagaaagaggcagctgttgaacctgggaagggcaggcctggggaagggttctttaccgaggcttttatttgggtaacttcagatgcggggagggctgtatcctgctgggtgaaggtgatcttgtactttcgtgggtaactttcgcaggcagttcccaggcccgtccacaccttggcctgggagcatacggcctagaaaccacaaacttgggtttaagtcccaactctgcacgtgcccacctatgaccacctctccctcaggctcctcaataagtcacctgacctgcctaccttagaggattgtcccacacttaagtgacaagctagatctgaaggtaccttgtgagctctaagttgctgaaccaatataagaggctgtgcttcttgtttttattttttgtttgtttgttttttttttttagagggagtcttgctctgtcgccccagactggagtacaatggtgtgatctcagctcgctgcatcctctgcctcccaggttcaagcaattctcccacctcagcctcctgagtagctgggactacagatgcacaccaccacgcctagctaatgtttgtatttttagtagagacggggtttcaccatgttggccaggctagtctcaaactcctgacctcaggtgatctgcctgccttggcctcccaaagtgctgggattataggtgtgagccaccgcgcccggccaagatgctgttcttctataatagtttcctttgagtaggctctagcctggaaagaatatcctggccctggaagggtcttatataaagatcttagccatgtatccagtaaggaaggcagccctgtcctgccccaggccagaagccagcgagcctaactagggcagaactgcctgaaaactctctgtagaggtgggcgttgggggcctcaaccctcactctgcaccctgcagcaggcgtctatggagggggccacaccaagggcagagcaaagtccttaaatgtctttaacaggcctggtgcctttgcctccaggtaaggagagagactggggacattctgctttgtctctcccagagacttgagtgttgagggggcagaagtatggctctgggagacgagatgcccacagactcctggacctagctctgcattaattccaggccataaggggagggcacagctgagcactttccatgtgccaggcagtgggcactccacatatgtcatgccactaacaactttgggcaagccatgccttatctgggcctcagtttccctagctgttaaacgaggtaagttgcatgatccctgaatgatctatgtttctctctccctctcagggttctgccagccccgggatctgtgtctctattggagcagttcttacattcattcattcattcaggatacatttattaataatccctgtaggctgggcaccgtggctcacatttgtaatcctagcactttgagaggccgaggcggatcacttgaggtcaggagttcgacacccgcctggccaacatggtgaaaccccatctgtactaaaaatacaaaaattagcttggcatggtggcgtgcacctgtaatcccagctactcgggaggccgaggcaggagaatagcttgaacccgggaggcgaaggttgcagtgagccgaggtcgtgacactgcactccagcctgggtgacagagcgagtctccgtttcaaaaaaaaaacaatgcaaaaacaatccctgtgtgcaggatgctgtgctgtcctgcactatgcgagcctggttagaagagctcattagatagcacctttcaatccctccttgttcagaggcccagagagctcaggtgtctcttccaaggtcacacaatgaggtaaggataaatttggaactaaaactgagactccctgcccttctgatgcccactggcctcagtcccagtgggcacacttgctcgcctcctgcctgggtctctgacttcaggagggcggagggggcccgtgtcagagccttccgcgccccagcgcatcgctccctactccgcctctcgggatcctttaagaggcggggcttggctgccagctccgcggcccgggcaaaaggctgggactttactccgggtggcggcgaggacgagtctgtgctccatcagctgccgcacccgccgcctcccgcccccaaaccccatccccgcggttgagccacgatgagcggcagagtcggcgatctgagc

SEQ ID NO: 28237 - DNA, 2300 bp, Homo sapien
gtttctgccctgattctgcttcgcattaactgtaacttcaggtaagtcccctcccctctctgagcctgttttctcatctggcaaatgagaatgaccgaccacattctttgaatgaccgccactgtgagggggtagggtgtgcctgaagtatgaggctccccaggaatcaggagaccagctgccaggacccctggctggcccctgcctcagtaagagagctgtgttgctgttcagtggctctcagaaaccatgcttctcccccaacagcagctccctagtctgctggatcattttgcaactggccctttaagaaggctactatcttcccactctctccacccacctgcttctagctgcagccctttagcaaatgctgggccaaaatttcctccagcctgaactgattccactgccgcccccacactacccctccaccatctctgggcggtggactggggtagggggatggtatggaagcttttttggggaaaggggcaagtgacacttccagaggctcctggatggatctgccctcagatgtttacaagcagcctctcaggagcgtgccagctctgtgaaatttctggaaagaaaaggaaaatacatctcttcatctgccccaagactcctagggtgtgcatgtgcatgtctttatgtgtccataaagaaataatagggccagtcacagtggtgtgtacctgtaggccaagctactcgggaggctgaggtgggaggatcacttgatcccaggagtttgaggccagcaagaccctgtttcaaaagtaaaaataggccaaggcggatggatcatgaggtcaggaattcgagaccaggctggccaacatagtgaaaccccgtctctactaaagatacaaaaaaaaaaaaaattagccgggcgtggtggcgcatgcctgtaatcccagctacttgggaggctgaggtaggagaattgcttgaaactgggaggtggaggttgcagtgagccgagatcgcaccattgcagtccagcctgggcgacagagtgagactctgtctcaaaaaaaataaaaataataaaaataaaaatataaaataaaaataacagccaggtgtggtggctcacgcctgtaatcctaacactttgggaggctgaggtgggcagatcacctgaggtcaggagtttgagaccagcctggccaacatggtgaaacccttagccggtgtggtggtgggagcctataatcccagctactcaggaggctgaggcagaagaattgcttgaacctgggaggtggaggtggcagtgagccgagactgcaccattgcactccagcctgggcaacagagcaagactccatctctaaataaataaataaataaataaataaataaataaataaatcacttgagaccaggagttcaaggcagcagtgacctacgatcatgcccattgcctgggcagcagagtgagaccctgtctcaaaaaaagaaattaaaattaaaataatagggcataatttgtactttaatattttaggatatgattctataccacactttgggaggccaaggcaggcagatcacttgaggccaggagttcgagaccagcctggccaacgtgaaacctaggtctctactaaaaagaaaaaaaaaaaggtaaccttctttttttttttttttttttttttttttttgagacggagtctccctctgtcacccaggctggagtgcagtggcgaaatgtcagctcactgcaacctccacctcccgggttcaagcgaccctcccacctcagcctcctgagtagctgggattacaggtgcccgccaccatgcccggctaatttttgtgttttttagtagaggtggagtttcaccatgtcagccaggctggtctcgaagtcctggcctcaagtgatctgcccgcctagcctcccaaactgctgggattacaggcgtgagccaccgcacctggccataatggaattttctttattatttctatgtctgttaataaaatttctatatagaggggaaaaaaagtgtcagaagaatcagggagggtggcacatgacctgaatcacaggaaaggagaggaggggaaggaatggaaacatctcagggattggggcaccaggctgaatttgaccctcatgccagtagaaatgtgtgcatttcaacaccacatgcagagttctgtcatgtcacgtcttgcagcaggcaggtcttgtcctgctcttccagaggaggatcctagggaagtatttaccctgaacaaggcaccacagccaggctggggaagagctggaaccaggacctggg

SEQ ID NO: 28238 - DNA, 2300 bp, Homo sapien
gtgctgggattacaggtgtgaaccaccatgcctggctgtccatccctccttttaaaaatttccccattgtatctttgtagcatgtggagttccgaaagcaaaaggacattgacaacatcattagctggcagcctccagaggtgagcacaaattatcccacctcatccctatgctaggcctttcagacccacaacctgggtcctggatccactggatttggatccttagaggaaaggtctgacaatgcccactgagccctgatggtctccagaatgggcatctgttggtacccaggagagggaggtagagaaagatactgatgaacctggagtaaggccctgtggtccaggcaaggtatggatgcctgctgaccaggtggctcctctgtgtctttgcccaggtgatccaacagtatctgtcagggggtatgtgtggctatgacctggatggctgcccagtctggtacgacataattggacctctggatgccaagggtctgctgttctcagcctccaaacaggacctgctgaggaccaagatgcgggagtgtgagctgcttctgcaagagtgtgcccaccagaccacaaaggtgagtggaccaccatggctagaaatgagttgaccacagcagaggcattccagcagaagcagggatgtcacacaggaatataagcacagcttcagggccaaggcccagcctttttttttttttttttaatttttaaaacttttttagtagagacggggtttcatcatgttggccaggctggtcttgaactcctgacctcaagtgatccacccacctcggactcccaaagtgctgggattacaggtgtgagccactggacctggccgaggcccaggctttgggatttcctagaccagtgacatttccaagttttagaatattcccaaatatctattttgccatgtaaggactttaaaacaatgaccatctattgttgccatcattaacacccaaaactataagaatggcaataatctcagatgaaaaagcagtcctttaggaagctgcagtgagccaagatcgtgccactgcactccagcctgggcgacagagactccatctcaaaaaaaaaaaaaaaggagtcctttaaattgaataaatttagcttcataaaaaactcactacattattgttatttttctgatttatatggggacccagtgaaatcttactgtggaccaacccatccttgagcaagtatttgggtaccactggtgcaaatgatgtcagattcttgcttctctaattctgtatttaaaaaagataaggatggctgggtgtggtggctcatgcctgtaatcccagcactttgggaggctgaggtgggcagattgagcccaagagttcaagaccagcctgggcaacatggcaagagcctgtctctacaaaaaaaagtaaaaaattagctgtgcatagtggcatataccagctactagggaggctgaggtgagaggatcacttgaacttgggaagtcgaggctgcagtgagccgtgatcgcaccactgcactccagcttgggcaacagggctagaccctgcgccaaaaaaaataaggatagctgattcccttactgagaaaaagactgaagaacaagcaggagctgccacttccctcctgccctcctctcagcagttgtaaagatccagtgaaatgatgtcataaagtctaggaacattcccacactcatctacaaatgttcacagagagcctactgtgcgcagagaccctgcggagctggggatgcaggaagcattagacgtggatgcacccctgagggttcagggtgcacagaacgtctgtcctcgggcataagtggctctacgggtaccgtgcacagagcacacagtgactcaggaagggggaggccatcaggccaaactgcagaaccaaagccatctcagatgtcatctagatccacccagtcatgtactggaaaagaacacagagacctaggcaggaagagtgactcgcctagaccacaattctggcctggggtgattatctcagtttggaaaactctaggtccggccctaactagctctgattgctctctggatgcacagtgcaatcatttggcctggactggaacgggcttctgaagtaggacagcctgacaagacttcctgctctctgttccctgcagttggggaggaaggtggagaccatcaccataatttatgactgcgaggggcttggcctcaagcatctctggaagcctgctgtggaggcctatggagaggtgaggggcaggggtggggaggaaggggacag

SEQ ID NO: 28239 - DNA, 2300 bp, Homo sapien
agctgacttccctgaagtgttaagtcccaatctttcacccttttctaatttttttccctgctgccaccctgtggtacatgccccccgccacccccagcttcgctgtccctggacaggtgaagttggcacagtttacaggacagacagatcctatcacgatggccagccagctcctggggactccttaggtatttgatagacacggagacccactgcagtcgctcttcctctgcctaactgaaatgaaagctcctgaggtctgtcctccagcccagtttctttgggcttcagggttgtgcgaaaatgactgctacaaggggtagaaattgacagggagacactgagggggccaggcctgctataggagaaggtgttatttcggggtgcctgcccccagctgtttcatcttctcttctgaggctttgtctggaagcaggacctccacagtgaaattgaccttcttggcatgaatgaagctgtaggtgttgtcaaaccgcaggacatctgagggaaggcagaaaccagacagacattcaggcagttctggcaaagggcttggggacagtgatttttgttgatgtttagtgactgagcaaggcagtgtggcaggtcatggggatgaaggtagcctaggtaatgatccttgaccttctgaaacttaatctagcggggttgacaagacattcatggagagaaaaaaataggcagaacatgccaagtgccagatgagtgacagagaccatctcgtctgtaccagcttggaagaagagggcctggtagactgaaatcatgtgaaacgctttttaaaggagttagagcttgaactggactttgaaaggagggaggagaattagcagcagcagtagcagttgtaataacaataatagctgtgtgtcgcagcactgggttggtaatctatatgttatctcactctttcccccaactctacgagttcagcagtagtcctgttttatagctgataaaaaggaggtggtgtgactctggtgacacacagtgaggaaatgacagagctggagtttccgtctgttccacattgctgcatttgttctgcctgacttggaccctggaaaacctggccctcttcaatttctgacaaaaggtaaaatgtgcaaactttgtgaaccaggaatttatcctgcaaaaaggtaaatggacagagatgctcgttgcatccctatttgtaataataagagattgggaaaactcaaatgttcatcaaaggagaattgcttcaacaattttatgttgtaatccatgtgatagaatactgatatattttttaaaaaagaggttagctccacagaagtgacaggaaactgtccacaatgtgtcctgaggccaaaacaagttgcagaacagtatgtaaacagtttgtaacttttttgtaactacataggtaaaaatacttttggctttacttctttgtctgcttagactcccagattctctgatgataccactctggtgcttgtcctaatgggaaagtttcctgaaatcctgcgatgagtttgacagtttcaaaattccttcaaacatacagtgaatgacagacaattcctgtgaatatgtgtgtgtgtgtgtgtgtgtgtgtgtgtttgtgtatgtcctgttttctatttatttatttaagataacctgattgtcatcctcgcgcaggggccatgctaatctctgtattgtttcaattttagtgtatgtgctgacaaagcgagcactgtatgccctgtttattatggaaacatgtaatgcttctagatggaagatatttgataggataatagacattagcagtggtttcctctggaaagagaaaatgggcatgcacttggcagagaaagcttccacactttggcagaggaacaggctgcttttaatctaaccctgtttctttgagaagttgttccatttcagccaaacaccgcttcaggagaactgaatgtgaaaacaaaaacactagttctgccccatccctatcccggtcttctctcactgttctcagcaagaaaaaaaatatcctgtatttaatcctaagacttaaccttttcctgaccctggacaaaatgcatagtttagacaaagggtagacacaccacccactctttcctcatggtgaaggtgttagtcatctatttttcccctgtactagaggtctttcagagccaatagtccctctggcaagagtgaagcttcatctctgccctggatgatagagtcttagcaaccagaatcagccatgctggaggagaggtcctttgcattcattgcaccaagtactaggt

SEQ ID NO: 28240 - DNA, 2300 bp, Homo sapien
cgagccccgccaacgaaccacaggtgctgggctttagagaacatgggaaggcggccccagacctgcgggaacgcctttccctcagagccaggccccggccccgtctgggaagctcatcttgcgaagctgagggagctcagggcaaaggccaggctagcgcggaccggaaggggccgaggctgcacgggcctctgccagaacgctcaggacatcccggcctgggtttacaacgctgttaggaaaattaaccaatgaataaagcaacgttcagtgcgcagggagtgaaattcaatgcccaccgctaggctcctcgctgcctctcactcaagaggcccaaactcagacggcgtcagggacccggacccagcagccgtttcacgccaatagatagggcgcatgcgcagaaatcctcctcggctctctagcgtgagctttcccaaggggccacgcccagcttgccttctgattggtccagctggtgggttgtcttccgccatctttgatcagggcactaaggatgctccccacggccttcacagtgacggcggagaccctgccccgccagctgctcagtacgtgccgcgtagcccgtgcgagccaagtgtgagtccgggcgagcgcctgcggagctagcactgggcccagaatgagagggaggcggaggagcagcgatcacgtggttttagggactgtctaataattccacgccagcattgccggtgtttcagggggtgggaaccgctgcgttccccatcaacttttctcccacccaccaccctccccaacctacaagcccagctcagcttgaggtaactgctgaccggactgtcctatacagccctacaagacagaggcgcctagggctgaaagcgggggcctccgtagggagccagcgggggcctcaatagttactcattttctctacctttgatgaaaataagagctaattcttaataaggcctaccgggtatcacgcaaaaaccctgtgcttactattacactttgggttgttgcaaagattaaaggaaataagccgtgcaaagcgcttaagagcttggtataagtaagtgctcgtcaatgttggctactctcattttttttgcagacgtgggaactggggctcagggaggctaacagccagtaggcggcacagctaggatttgaacccaggattgtctccaacgccgctcaattatacccgccaaggagtcacagagacttagtgaagtgcacacattgctcacctgggtgaactgaggtccagcgggggaaggcttcctcctgttgtaatcactaaccccaactctgtctcccttgcccgattcattcattcgttaattaattcatccaacatcctgtccccaagaagctcagtctggggacatactgatccagttaaatgcgagtgcttcctagttatacatggcgactgctgagaagggactccagagtccaggcacctacctcccaggggctcaccgttcactcctctagcctcatttagagctcgcattaagagcacgggatctggatccacactgtttggattcaaatcacaacttcaccacttagcagctgtgtgttctgggaaaatgacccaccttctctgtgcctccattttctcacctgtaaaacgggctcccaggctggtgggagggtttcaggtgtaagacatggagagtcctttagcgaacatgtagactggcaataaactcaataaatggtgactgttataattaatcctcggaaccatcctagggagtggacactattgtgttccccattttatttattacattaattttttttttttttttttagtagagacgaggtctcgctatgttgtccaggctgttctcgaacccttgggctcaagagatcttcccgcctccggcctcccaaagtgctgggatcacaggcgtgagccaacgggcccagcctgtgtccctccctcgtttttacaaatgaataaagagatgctggataagcccgaggtcacaagctttgcagtgtagcatcccccaacttgatcccctgtctctttggctccaaaacctacactcagtcctgggagcgattagcgccaacagctcagagaaaacgtgacgaaaaccagtctgtaaaacccgagcctgggagaggggcttcggtgcgcggggggaatttgcagacgctccctgctggcggagatttcctgacctgtccttcggcgcgggactttcggcgggtcccggccgggcagacccaagtgccggcggcggagactgcagtggagccagtaccggctgtagtggccgggg

SEQ ID NO: 28241 - DNA, 2300 bp, Homo sapien
gcctcagcctcctgagtaactgggattacaggcatccgccatcacgcccggctaatttttgtatttttagcagacacggttttgccatgttggctaggctggtctggaactcctgacctcaggtgatccacctgcctcggcctcccaaagtgctgggtttacacgtgtgagccacctcaccaggccaaaatgaggtaatgcatgtaatgagaccccatctctacaaaaaatataagaaattagcagggcgtggtggaatgtgcctgcagtccaggctactccggggggttgaggtggggaggattgattgagcctggggaggtcgaggctgtagtgagccgagatcatgccactgcactccagcctgggcaacagagtgagaccctgtctcaaaaataaaataaaataaagtagaataaaataaaaatgggccacctgcaccatccaatatggtaaccactagccagattgaacaatttaaagtaaaatgtatcaaaatccaattcaattaaaacttcagttcctcagtcacgctaaccatctttcacatgtaactagtggctaccagatatgtctaacaggacaccccagacagaagatgtctaccatcacaggaagttctgtggagtggcactgtagctgatgaggatttgtgaacatagcaaggtacttgacaaatctgtggtctgggtcaggaaaagagctcagtgtgaaggctcacaactcctgaggagacccccaaccctccctcctggctctccttcacagtctccgatgcccctagaagtaactagcacacctcacattatagggattagggtgagaaaggagactggtgagaaatgggcaggattagtggctcgggaaagggcagtggaggaacccaatctctgtacattactggcctggcaggaagtgggtgtagacagcagctggggctttgcagaaattgaggctggaatgtgaaatggggcagggctggggtgtggagagttacctaactgttcctgagtacatgccacgggctccccaggcagagggaaatggccagcattagccctgccttctccttctggatccaactctgtgaggagcccagagcaaggaagatgtccctgagaagatgtctgatactgaccaacatctactagcctaaagagaccctgggttagcccagaatagaggcccactgtagctcaggggtgggtacccaggatgccccaggagtaggggacctagaaaagccctaggcagaatggtgtgggctagcccagctgctggggccgaggctagcccggggttggtttcagcccatgcagaccccctcaaggctgagatgtggccatgtggccatgtggccatgctgcagcctcaagctgatggtttcttcagagagagtcatggataacagggtctctcccttcctggagctgaagcttacagctccaggggggaccaggagagctgaaggagagtatccctcagatgcacacaacccttgacagtccctatgtctcattagatcttccctctaaccacataaggaggggaaggcaaacattaacggccccattttataaatgaagcaagtgacgttcaaaagatgccatctgtcctcttcttgactgtggacacaaaagaaggacctgggcctcccacccccaacaaagtgaatgaactgtttactacactgaccaagcctcagaatcctaccctttcagagctgggtagaggggggtgatctttgcagaatcctaagtgtgggaagactggggctcagggagaaagggtacccacaaggagcggtcctcattctcctgaaactcccccttctccagggcagtggtcactggaggcctgggagggtcagcgggttctacaggcactcactctgggctccaaggtcacgggaggccagcctcccttcctcccagctgcctcctcctggcaggggacctctggcacacgctccatgcccgcctgcccctccagatctgtccccaagccaagcaggggacctcacttaatcccaattatgtaatctgcaatttaaacagttggcccatgaggaggcgcttggagccacgcccaggagtgggggcaaaaggacccagctgggtcagggctgacaaactaggcttggcctcttgcctatagtggccaccactcctcaagccccagccagcaccatgagcggccgagttggagacctgagccccaaacaggcagagaccctggccaaggtgagagcccctccccctggagttccggaagaccaggggaaaggggctggggggtgg

SEQ ID NO: 28242 - DNA, 2300 bp, Homo sapien
ttggcctctgacacccctgccccactgaccgcccaccccccattcctgtctggaaggctcgcctgccatcatcccgcacatccgacagctctcccttcagggtcacctcctccttggacaaagcatacgtgaccccttgtcaggtttcttggctgggtgctcccccagagtttggctcctgcccccaaccaagcatgcatggtgacaatgcacccacttgataactgatcactggtgtcacttccacctccctccctccatgagcgcaaacctccggttaatacagttgggtcagcccagggtcctcggtgtccccagagtctgccatgcctggtgctgggcagatactcaataaacacccaaaatcaggccgggctcagtggctcacacctgtgacctcagcactttgggaagctgaggcagggaggatggcttgagcctagaagttcaagaccagcctgggcaacatagcaagacccctgtctctacttttttttctttttttttttgagacggaatctcgctctgtcgcccaggctggagtgcagtggcgtgatctcgcctcactgcaagctccgcctccagattcacgtcattctcctgcctcagcccctcgagtagctgggactacaggtgcccgccatcacgcccagctaattttttgtatttttagtagagacagggtttcaccgtgttagccaggatggtctccatctcctgatctcgtgatctgcccgcctcggcctcccaaagtgctgggattacaggcgtgagccaccgcgcccggcctgtctctacttttaaaaaattaaattaaattaaattaatatcaatgagtgaataaatgaagaaacaaactttgggcaagccactgcccctctctgggtgacttttttttttcagttttgtaaaaaagtgacagtgttaaaaattagacatggaggccaggcatggtggctcatacctgtaatcccagcactttgggaggctgagccaggcagatcacttgaggtcaggggtttgagatcagcctggccaacatggtgaaaccccatctctactaaaaatacaaaaatcagccaggtgtggtggtgcatgtctgtagtcccagctactcgggaggctgaggtgggagaatcgcttgaacctgggaggtgaatgttgtagtgagctgagatcgcgccactgtactccagtctaggcaacagagactctatctcagaaaagaaaagaaaaaaaataattggaaatgggttgctgaggacatgtgcccctgctccctgctgagctcccagtgtgcccctcccctcctgaattggtaggagattctgctctcacctctgcaggcgatcactgctcactgcaattcagtcactagtgcctgcacctgaccccatttttgtttgccacccccgcagccagcccgtatttgtgatcacggccctgtgatcagagtctcaggaaacacttgtgcatggggcagagcaatccttgctgcctgcaaggaaaccagacaaggctgtgctgatggaaaatcggctgtagttacatgggcaagaatcagagttcaagtctaggaacccctggtttttaggcagaggacatcaaggcagaggatgtcaaagctgaagtgaggcattacaatcccccatcatgacaaccggtgggccttgtgaaatttagcacaggtcctcccggctccagttggccacagcctgccatggaagcccaagtgcctctgggcactccaaatatcactgcatctgggaaagcagcagacagcgtggccatgcagtgcaacagggtagtggggatgcctgtcacatctccgatgcagaggcagcccctggacatggggatgtcctgtgactcttgcccgacagcccaggccatctccttggagccagcgcagccatttttttttttttttttttttttgccaatctgctcaaacacccagttggaacaggaatgcctcgtggcactggctttaggagtttaatctagatggtttgctgtttctagcagcagagcacctgttcagactctacgtatatgcacccatgaatggtgcagctgccaagagaaccaaagctaaatgttggcaggatcacagcaggtgtggaggggaggtcactgggaattccctggagactcagtcgttacccactcaactggaaggctgagcatggctttttcctctgatggttacccatgccaggccccacctctccatgtccaatgttctttctttatttgtttgtttgtttgtttgtttgtttagagacggagtctggctc

SEQ ID NO: 28243 - DNA, 2300 bp, Homo sapien
ccagcaatttgggaggctgaagcagatggatggcttgagctcaggagtttgagaccagcctggctaacatagcaaaaccctgtgtctataaaaaaataaaaataaaaataaaaataaattagccgggtgtggtggggtgagaatgtagtcccagctactcaggaggctgaggtgggaggatcacttgagcccgtgaggtcaaggctgcagtgagccatgattgcaccactgcactccaacctgggtgacagagtgagatgctgtctcagtacataaataaataaaattagttaatgaaacattttactttttctggtactaagccatcaaaacttggtttgtattttacaattacagcatgtctctatgcttgttatgacaagccacgttgtctgggctcaaaagcctctgtggctcacggccactgggttagtcctttcgggactagagcttggtttgattccatgggaggacagagggaacagggtcttgtggcctgttttactctctccttcatcttcacgtcccctctactcctctcttgaaaattcacacccagccaacttctgttttctttttttgagacagaatctggctctgtcgcccaggctggaatgcagtggtgccatcttggctcattgcaccctcaacctcccaggttcaagcaattcttgtgcctcagcctcctgagtagctggaactacaggcgtggacgaccacacccagctaatttttgtatttttagtagagacagggtttcaccatgttggccaggatggtctcaaactcctgacctcaagtgatccgcctgccttggcctcccaaagtgccaggtgccaggattgcaagcatgagccaccgcgcctggctgaacttttttcttgcttttcctagtgatctccgcctggctctcttgtgtcagccagagtggccttttggctctccgcccactctgtcactctgcccagggcttccattggtccacggctggcaccttgcatgcctccaccttcagactgtggctctcacccaggagctccgcacttgggacaccctaggatctccacccctgcagctcccagctctggtgacagcctcagtaataacacaattctgaaatatattcctaccagccagcacttactgagcaggcaacgccagacattctgctgacccagggtgcgtcctcttatccttccaaccatcttgagggcaggaaccattttgcacatgaggctgtcctatcagtcagtgagcactgacaggtcccaggctgtgttcaaggtcaggggaaggagcttgggggtcattagacaaaagccctgggggtcctagagggttgagccaggtttattaaaaattcctccatgttggccaggtatggtggttcacatccctaatcccagcactttgggtggcggaggttggaggattgcttgaggccaggaggtccagaccagcctggtcagcatagcaaaacccggtctctattttattcaaaataagaaaaagaaaaaaaaaattttttttttttttgagacggagtctcactctgtcacccaggctggagtgcagtggcgcgatctcggctcactgcaagctccgcttcccgggttcacgccattctcctgcctcagcctcccgagtagctgggactacaggcgcccgccaccacgcccagctaattttttgtattttcagtagagacgggttttcaccatgttagccaggatggtctcgatctcctcctgacctcgtgatccgcccgcctcggcctcccaaagtgctgggattacaggcgtgagccaccgcgcctggcccaaaaaaaaaaaaacatttaaaaaaaaatttcctccattttgctggaaagaggatctcagtgtattccctttcctgccacctgcgaacaggcgggagcccccgcagtaaggaggcctggaggtggctgcctccagctgccccaggccactctcccggcaggtcacctccctgtcccaagtagggtgcgcttggtgaccgcagcaaaaaatcctggagaggaggagagaactgggcggggcggggcaggcccagtgcctctcccgtcggggcgggaccaacatctggcccaggaggcacaaccaggcggcagcggatacaaggccaggcggcggcgggcgggcggacctgcgccctgagcctttctgcgcccgcgggcaccatgagcagccgagtcggggacctgagcccccagcagcaggaagcgctggccagggtgaggagcatcgcgggctgggaggcttgaggaggggccctgagca

SEQ ID NO: 28244 - DNA, 2300 bp, Homo sapien
tacaccgggcctggcccatgggagcttttacatgcatgtgcctcacatgtattactttcgtctgtaggtctcctacacaggatctctcctgtgtctcagtgaggtgttgtctgcctggaccatgtcctcatccacattctctgcacgggctctatagccctggacaccttctgccctgagggtcatgggaagtcattcatcacacattcaccaggtgccaggctcggggagctcagggatgagtcactggtaggcttgcctgcagcggggcatggaagggacctcacctctggcacgccggtgaaccaaggctgggtcagagtcaatggtatgataataattaatatgagttgatctcctgggtacgtgcattatctcagtctcacagccttagggcatggcatggtggcttacacccagcactttgggaggtggaggtgggaggatcacttgaggccaggaactcaagatcagcctgcaacatagtgagagcccccatctctacaaaaaattaaaaacttagctgggcatgggtggtatgcacttgagcggccgaggtgggaaattcacttgaggccaggtgttcgagaccagcctgggcagtagagtgagacccccatctctacaaaattttttttaaaaagtagccaggcatggtggtgcatgcctgttagtcctagctactcaggaggccgaggcaagaagatccactgagcccaggatttcaaggctgcaatgagctatgatcgtgccacttcacttcagcctgggtgatggagcaagatcctgtctttttaaaaaaattatctcatagcctagtgactgttctccctcaagccaggctcctggctgccagctagctcctctcccgacctcagtctgcccaggggctctgcctgtgattacagagcgctctgtgtgccttgatcttgctgttgtgtgtccattgcacacacgaggagactgaggcttagggagggtgaggttcatagcttcatgcctaagtttacagtagctaggcaggaaaggcacaaccagccttggacccctcaggtggctggcacgggagggacggacaccagggccccctctgctttccctccccttatcctggccgcaggctcagcccacagagacgggaccctgctgtgctcccaggatagagcttcctgtccaaccccacatcccccacttcctgcaatgcaactttccctccttccttcccctgggcttgggacagggcttaggacacaccaggcaggggctgccatggacaaagcaggaagcagcacattggagttccatagacctgggctctaattccagccctgcccccgctttgctgaatgaccctggacaagttatgtcacctcctggaacctcacctttcccatctaccaaatgggggtgacagcagggtggggggtggagtggtatccactgagtggttgctgagtagggtcagttagatgctctggagaggcaggcccctgctttgggcctggctcctaacaggggctcaaaagtaaaactaggagggatagcccaaggttcagtggctggcagcacccagcacgtgtggcaggggcctggcaagctttgagaaatagcaaatgggggccaggctcagtggctcacgcctgtaatcccaacactttggaaggccaaggcgggtggatcgcttgaagtcaggagtttgagaccagcctggccaacatggtgaaaccccggctctactaaaatgcaaaaattacttgagtgtggtggtgggcacctgtagtcccagctactcgagaggctgaggcaggagaatcacttgaacccaggaggtggaggctgtagtgagccgagatcacaccactgcactccagcctgggcaacatagggagacaccgtctcaaaaacaaacaaaagagcaaatgggagaatgaaaccagtgagtgaatgagtgaatgagtgtaccagtaatggggttgggggggtgcgggtggaggaactgtcctgggcggggccaggtggagcctgattggcggggcagggaggctggtctgccccctgctgctgggcctgaacctcagcgcctccactattgcagcctccctgattccagaaggtaccttggtgagtggggctgctggggccggggtgggtccttgggatttccagagggcaagccacaggaatcctaatccctcctcatctttaagtcagagaaactgaggcccagagttttggactatgatctggtccacgactctgccctgttttctgctgggtcgctgagaagtgggaggctgaca

SEQ ID NO: 28245 - DNA, 2300 bp, Homo sapien
gtgagaccctgtctcaaataaaataaaataaaataaaaatttcctgggggtgggggtagagaaccagccaaagatgtcatcggctgggcgtggtggctcacgcctgtaatcccagcactttgggaggctaaggtgggcagatcatgaggtcaggagatcgagaccatcctggctaacacggtgaaaccccgtctctactaaaaatacaaaaaattagccgagcatggtggagggtgcctgtagtcccagctactcaggaggctgaggcaggagaataacatgaacctgggaggtggagtttgcagtgagctgagatggcgccactgcactccagcctaggcgacagagcgagactctgtctcaagaaaaaaaaaaagatgttatcatcaatactctggaaagagacccctctggcagggctggaagcacaggtctaccatcagtgctccctactctggaaatctttgcttcccttggctagttgctcacctcctcagccacgatctcacttcttgttcaaaagcctgcacttcactctcacctagatgaagttctcactcctctataaaatggaggtgataacaagagctccccagagaggactatgaggctgcatgatgcatgacaggtcccaagcacagaagtggaccgtgttgggttcagagtccacgctaataaactacagcccctgcggtttgatgccagctccgccctgactcaccgtcagaaagctgtcttcattctagctcagctcaaaaggcagaaggtcaatgggatgttaggctggataaaacaactccataccatgtcccaaacctggttccagtacctagagagaaggcgactctggtctgccttgtggcagtttaagctctggtgtttcgtgggtgcttgggggctgctcccagactggtgaggctttgagggaaagggggactcagagcaagtgaggatgcctgctgttccctgggagaggctggcagctgcttagcctatgaaagtgcttagtgtgggatgaatgactgtcacaataatgatcattattaattgatggtggcacctgggtccctaaatggtgacacctgcctggtccatgatggggttctaggcagcagtgctgaagggaggatggaggaggcatttctgggcacaaggagaccctctgcccatgggcaaagctgagacaactgacctgaacctaagattcaagtgcctgaactgagtcctagggttcctggggcttagggccagggcacctagaactgcctcttctgccaaggccttggggaagatctgcatctccaatcagcccaaatcctgcagagctggtcgagtgtctgggtatcaccattcctcacccagggatagaggcaggacaccctctctgatgaaagatttagagctcaggaagtgaaatcttgccagactcatcttctgagccctggtcagatgctctgcctcctggaagccttccaggctgagttagttgttcattcttctgggttcccacagattttagataaaccttggtccctggttgtgtctcagcatctttaagccctggagtttggcaagtctgcgtatgtactccagctctgtctgccctctactagctgcgtgaccttgggcaggtgacgttacctctctgagctttggtttctttaccaggagggtagactaacaggggtgcttgatgcatcagctgtgagacttaaatgaaatgcaataggtggggcaattagccctctggcaccccagcccacctgcacctctctgtccctcactcagccttagagcctgttctgggctctctgcaggcgtctgcggttgctgtgtccttggcccaaggatacctggaatctttctgtgcccttggatgaaagagctgcttgcttgttggggtccaaagagaggtgaggactggccagagctgtccagtggaggcagaaggcctgggcaacacctgcagggtactggggtgtgccacctgctatccccaggaagcaaactcatgaatattcacaccactggagtgggagggagccagccagcttgctgctgggtgtcattggagcattcctgtctcccagtgatcgcagaggcagcctgggagttggacgtggctcaggcagtgggtagaaaggggcagccagccacagcccgaggtgagtgtgtctcttttgctccaccacaggggttacagggaaagtaggataccctgagacctgactggtggtgatgctctaagccagaaggtttaccatcctgggctgagtttccctttgtgcatgatgtggggg

SEQ ID NO: 28246 - DNA, 2300 bp, Homo sapien
caaggttttgccagcccctctgggctagagacagcgctgggagcaccaccctctggtgctcacacgctagcccagcagcagacatgcagcaaagattgtagactaggtgatgtagaaggcaggagctctggccaggtcggaaagtggtctgtccgagtctgagctagacctgaaggaagtgggagagccggagcagggaggggagggccagccagtcttcggagcagcagggaccagggtcccttttctcactcttttatgggggtctggcactgacttccaggatgcgtctaacccttgggacccctatccagagcctcacttgtggctgggaacacttgtggccggaacgcccctggtgggaagatccatgccaccccttccctagggcagcgccttaagggcagagccttcttgaggagcttggggtctttgggtaggtcagacaccctccactctgtgggttgtctgtccctcctttgcccccatccctgcacccacactgctcatgcatctcttgtgttccccagcacccgacagacgtggactacagggtcatggccaccttcaccgagttctacaccacgctgctgggctttgtcaacttccgcctttaccagttgctcaacctccactatcccccgaaggtaggaccccagcccagtgccttctgctcgccgtgcaggggccacagcccttctctgtccacacagaggcgaggggctgtggctgtcctctgcctcctgaccttccctttgcctactagctcgagggtcaggcccaagcagaggcaaaggccggtgagggcacctacgcgttggactccgagagttgtatggaggtgagaggctccaggagcatcatccggcatctcccaagggagtggtctctgtccccaacacctctgggggtctggttcagagtgggggtggttatggctaggtgggtggtctcagcctgcccttggaacccacacctgctgatgcccaggactgtcactgctgcccctccccaccctggccacatgcccgcatgaggtcccccactgcaagcagcccccttctctcctgtagaaactggcagccctcagtgccagcctggcccgcgtggtggtgcctgccacagaggaggaggccgaggtggatgagtttcccaccgatggggtgagcactgcactgccttctggcaggagggctgggaggggtcgtgtggggggtttcccagcttagggacatttgcatcctataattaggtgttatttgatggtcaaagcaactgagcagaagaatgggctgaattgtcatcagagtttacataggaggcaacagagctcaggagtggggccttggagtttcctttgaaggcaggatccaggatctagaaggaagctggagtggacgttatctccagccctggccctccagtgggggtgggcagccctggtggtgcgaggcctggcccctttctcaacaggagatgtcagcgcaggaggaagaccgcaggaaggagctggaggcgcaggagaagcacaagaagctttttgagggcctgaagttcttcctgaaccgagaggtgccccgtgaggccctggccttcatcatcaggtagggaggctcaagggcccgctgacagcattggttcggccatgctctggtctgggtcctgccctggtgcccatcggtaacattgggatggtgtcagtttccacttcttatgaaacagtgtgtggaaagtgctcggcaccgcactgagcacataggaagtgctcagcagagggcggaactgccgtcattttattactagcttagcacagaaggatgggcagtgggcagatctctgctgagccaggattgaaggatcctggggtgaggagggggtaattgtgtcctaagagggtgagtttatgggctgggtggccagcaggtcccagggagctgagtctcaggacaggcagctcatgtctgtgtacccgtgtgggctctccctgtccctgtaggagttttggtggggaagtgtcctgggacaaatctttgtgcattggggccacctatgacgtcacagactcccgcatcacccatcagattgtcgaccggcctgggcagcagacctcagtcattggcaggtaggccctcaagggtcctcgtccggatttctgggtatcctgtctcaaaggccctgcgatgcagcaggaccctgagttgccctctgtgactcgtttttgcctgccactctgcgccaggtgctacgtgcagccccagtgggtgtttgactcagtgaacgccaggctccttctccccgtg

SEQ ID NO: 28247 - DNA, 2300 bp, Homo sapien
atggttaaaaacctcttccctttatggaacaaaaatctacctggcattatcctggagtcacataacattctttctactatacgttaggtagtggaatgtgagtttagcagaggactctgaaaccagactgcttggtgagaatctattctgcacagcttagcagctgagtgatcttcagcgatcacttactttcctgagacttagtttcctcccttgtgaaatgtggtacctatatgacggctattttgagctgaaattacaattgcttccctgaacatccccacctgtgtcttccagtgacccctcaacattaatgtgagcaaaacaaggctcaactttctgcaaacatggttctatctgtgcaggacgagctaggtgatttgtgagggacagggtgagatgactgcccaggccacatgctcacgacaccagccctgttcctgtgttgccctcatgagccagccactgccaccctctccagtccatccctttccttcttcttctttttttttttgagatggagcctcgctctgtcgtctaggcttgagtgcagagtgcagtggcacaatcttggctcactgcaacatctacctcctgggttcaataaattctcctgcctcagcctcccaactagctggggttacaggtgcctgccaccacacccggctaatttttgtatttttggtagagatgggttttcgccatgttggccaggctggtctcaaactcctgatctcaggtgatccgcctgcctcagcctctcaaagtgctgggattacaggtgtgagcgaccgtgcccggcttcatctcatttttaactgtggaattgctgggttttaaattttagctttaaattagatagtgcaagtcacatagttcaaaacaagtattcaccagtgcttaacgtctgtctctgtgtaagttctaagaccaagtccttgggccaggtcacattcacaagagcctcaaatttaaacttttgagatcatcttcgaacgaaatttggaatttggaaaaagggagaaacgtttaaaaaaaaaaaaacctcttaaaattgcatctacttccagactgcaccatctcaaggtgatgtgactatttgtataaatcttggaattattatttgaggaacacttacagaatttatgtgtacaaattaaaagctcgaatatgttgaatgtacatttaattttatttatttatttatttttgagatggagtctcactctgtcgcccaggctggagtgcagtggcaagatctcggctcactgcaacctctgcctcccaggttcaagcgattctcctgcgtcagcctcccgagtagctgggattacaggcgtgtgccaccatggccagctaatttttgtatttttagcagagacggggtttcactatattggtcacactggtctcgaactcctgacctcagatgatccgcctgtcttggcctcccaaagtgctgggattacaggcgtgcgccaccgctcccagccttgaatgtacattttaaatataccacgagtccaccactaaggctcagaaaatataagtggcctctaggatctctatacctccgcgaggaaaaatgtcttccttttttctattttagccgcataaccgcgaatgaaccaaagagaacccgaagccggtgggaactcagcgcagtctcaccctgcccctcgggaaccgcttctcagcagcggcagccgaagtctgacgacgcttagcaaccgttaccttgacaacgcaatcctatcgcgcaccatggagtgcggcgcccctctgcatcccagaaggcaccgcgctgtccctaagccttccgcccctctccgtcccaacatgcaacgaggctcacagtcaatgaatcgtcatcagggtgattacagaaaagcctgtatatccacgtttgttttaacacttaaagtgtttgtaaccattgtgagcgggaaagatctggaaagagtgttctcagtgatttttttcagactatagttttaaatcttgaggaggaaatccccatctttccctggacttgtacaggcatctcattgggcagcccgcacaaacagacagcgtggggtggggagggtcctcggggtccttggcagggcacgtgcgggaggaagtggagctccctgtacgcgcggccctagtcggctcctcaacgtggagcgatgggaggccttgagaagaagaaggtgattgggaaagacggtggggattcccgaggggtggggtgcgggggcggcagagcatggggtcgactcttttcccgggctccgtctcgtggagactggaaa

SEQ ID NO: 28248 - DNA, 2300 bp, Homo sapien
tttttaattttactttatttttaggacagggtctccttctgtcgcccagactggagtgcagtggtctgatctcagctcactgcaacctcagcctcctgggctcaagtgatcctcccacttgtagcctctagattagctgagacttacaggcacacaccaccatccctggcattttttggttttgtttgttttttagaatcagggtctcaccatcttgcctagactggtctcaaacttgtgggctcaagcaatcctcctgccttggcttcccaaagtgctgggattacaggcatgagccaccagtatttctaatatgtatgggaaatatgctgtcttcctattcctactcccccaccctctagcactgagtccaggtaggtaggcaggggggtgtctccctcctttacttcgacaccctaactaccttggggatcagaagtgactctctggaaggatgctgctgcttctcaccagaggctgacgataacgaaggctatcctccatggccacctcctccaggctgccttcctggaaataggaatcataatagttgttactggaaacaggcagagggttgggggagccaaggcagtcccacccaggaccaaggtggctccattgcacacacttcaccatgactcccctgaaggtccaaacgtgcggttctgcggaagttgggctccccactggcctccctccttcctcagaacctccaggggtgctcctcctagtggccacatccagcctttctgactggacaacctatcatttaaaattttcaagtagttccgtaaacagacacacgttgctgtatttatttatgtcaagggcttggtttgtgataaatcaggctcaaaaagattgtcttaaaagagtgaaccttggcaatttaccataaaataattgcaatgcagattgtgcatggaaatgattggagatattttaaggtcatagtgtcttcacaaattgagctgaaagggaactgttaggatgatcttgcctaaccctctcttctcacacaggaagaactattttaaactcgagaggttaagtgacctggccaaagtcacacagccaccactagttaactcgtatacattgattctcctgtggggctgggcagatgaggaatcttttgttctcttccctgtttgcagagattttttttgaggttactttccgagttctggcaagtacccctgcttctggtagctttgtgtctcgattcaatctcattctttttattttattttatttttgagacagggtctcactttgtcacccaagctggagtgcagtggtgtaatcttggctcactgtagcctccacctcttgggttcaagcgatcctcctgcctcagccccccaagtagctgggattacagacgtctgccaccacgccaggctaatttatggttttttgtatgtgttttttgtgtttttgtagagacagtgtttccccatgttgcccaggctggtctccaactcctgagctcaagtgatctgcccgcctcagcctttcaaagtgctaggattacaggtgtgagccaccgtgcccggacttaatcccattctttaacttgttttgttttgtcctctccaggaggctcccagccctttcggattggttgagaaaagtggcctggctggtctggggccagcggcacccaccctcccctcaattgcccaactccccccccccaccgaactgcccaactccccctccccaactgcccaactcccccacccccacaatcccctcccgccacaactgagggaggcggtgctgaaaaacagctgactccagcaatgctgctcacgtgaccactgcagctgcagctcccgttccactccttgtcctgggctaggtgggcactaccaggggctcctttggtaaggagtaccgggtaggcacccggtcctgccaatccaccactggaacagctggggggacagcagacaggcacggtcggacagacttgacagatcaggcatcaggccctctgcgctggtcccgggctctttaagcaggaacgtgaatggcctcaagatgtctcacatggtcccactagccctcctcctccctttgttccctacctccaggagggctgctctgcccttccttcctctgttctttggccttatgttccccgccaccacagaccttcccccgccccacccctctgcagacttagccgtgcattgcaggcatggaggattaatcagtgacaggaagctgcgtctctcggagcggtgaccagctgtggtcaggagagcctcagcagggccagccccaggagt

SEQ ID NO: 28249 - DNA, 2300 bp, Homo sapien
gtttgtgcagcgatccctgtcaatttcacaacatacatatagagctttaaactgggagagcaggtgtcatgggatccttccttgtactacaccgaggaggaaggcaggggagcattcttagcccactttacagataaaggaatgaggctgggtgcaattaagtgactcagtgcagatatttgcaccccaaaccccagttcaagattccccagaccccaagggattggggctcctgtggggtcaggttaatggactaactgtccaaggctgaggaccagatcagccaggaggaagagctcttgctggttgaacccagaactcccctggggactgtccggacatgaaccaagagctggggttcctgggcccagacctgaggtgtctgattgcatttatggaacacagatgagaggcttggagttctggccgggcacggtggctcacgcctgtaatctcagcaatttgggaggccgacgcaagagtttcacttgagcccaggagttcgagaccagcctgggcaacatggcgaaaccctgtctctacaaaaaaatacaaaaattagccaagcatggtagtatgcacatgcagtctccagctacttgggaggctgaggtgggggaatcacttgaacccacaaggcagaggctgcagtgagccaagatcgtgccactgcactccagcctgggcaacagagggagaacctctctcaacaaaaaacaaaacgaaaacaaacgaggcttcaagttctaaaaactaagttcagcaaagctctggaaaaggtggagcaccctgagtgggtcactcagcccctccaaccctcgacttcttcacttgacacctggacatgactgcacccacctctcagggtttccccagggtctcaagagaccatgggggtgaaagtgtattgctcaacgtaatcctaggtgcagaggaggagaaaaggcgcgtgggcggcccaaagttcccaaagcctgccttctgcctcctgtctgaaggagcagccctgagcctctaagctcagactcatagacaggtcccaggagactgtgctccaagagaccccttggggcacagagctggagcaggcaggacctccgaaggctcacttcctgctgcctagaatgtgtgtcccccactcctttcctgccagctccttttcttccttcgagtttcagctcccatgtgtcctcttggtcttcagaaagtcttccccatgcccagctattttttaattttttttattttttgtagagatggggtctccctatgttgcccaggctgaccttgaactgttgagctcaagcgatcctcccctcccgcctcagccttccaaaatgctgagatttcaggtgggagcacctaaccatttcttttgtctgtcccccttccctagaacataagctctaggatggcagggattagacttgtctcatgctttgcacgttccccaaaggctaacactgggcctgacacagaaaaggctcagtatgcgctgaatgaatgtgtgaacgaatgactgaattaacggagatcttgtctggtgaggagtcaaacatataatcaatcacaataggatgtgttaaatgctgaggtccagctaagcccaaactgctatgggagcttagaagggcaggtaagttccctcatcctatgccctagccaccccactaaggacccaggaggaaagaggcacaggatagaggcgagttactcaccacacatctcagtgagggcccccaggacccccagaaggaagaggaaggccccaaggtgcctcatggcagcagcaggtgggtgagcagtgagcaagaatcgggaaagactcctggggctggccctgctgaggctctcctgaccacagctggtcaccgctccgagagacgcagcttcctgtcactgattaatcctccatgcctgcaatgcacggctaagtctgcagaggggtggggcgggggaaggtctgtggtggcggggaacataaggccaaagaacagaggaaggaagggcagagcagccctcctggaggtagggaacaaagggaggaggagggctagtgggaccatgtgagacatcttgaggccattcacgttcctgcttaaagagcccgggaccagcgcagagggcctgatgcctgatctgtcaagtctgtccgaccgtgcctgtctgctgtccccccagctgttccagtggtggattggcaggaccgggtgcctacccggtactccttaccaaaggagcccctggtagtgcccacctagcccaggacaaggagtggaacgggagctgcagctgcagtg

SEQ ID NO: 28250 - DNA, 2300 bp, Homo sapien
gtattttctgtagacacgaggctttgccctgttgcccaagctggtctccaactcctgagctcaagtgatcctcatgcctcagcctcccaacgtgctgggactacaggcatgagccactgtacccagactattgttttttactaaaggagacttactagaaaactgacaaaatccaggctgggcgtggtggtttacgcctgtaatctcagcactttgggaggccagggtgggtggatcacctgaggtcaagagtttgagaccaacctgaccaacatggtgaaaccctgtctctactaaaaatacaaaaattagccgggtttggtggcgcacgcctgtaatcccagctactcgggaggctgaggtaggagaaccacctgaacctgggaggcagaggttgcagtgagctgagatcgtgccattgcactccagcctgggcaacaagagcgaaactcggtcttggaaaacaaacaaacaaaaaaacctgacaaaatatcaaagataattataacccttaggggtcccagatttctcttcctcaggaaatggcaagggggtgcgggagaggggccatccgctttggctggcttagtttcctttccacaaccctttctggagaaacactaaatgccaccattttttggtccttggcctggaaatttccctatctgcaccccctgcgctgtagcttaggctattcagcagagatctgcaggctccagcgggcgtcggacttacagaggcaaatgtgaccatgtaaattcccaggcccacccgtgacagagagcctctgattcagcaggcctcctttgaggctggggattttaaacccgcgtcctgtgattgggatggggattgagggctatattcagcgcctggccaccagagggcgcagcgggctgggttcagcggtacccctttgagatcttgtgtctcaagacaggttgctgtcatcaaggatttgctggttagacaacaggcaaggggtgagctgggtcctcttgggcaggagcctagtaggaagaccgacaacaggaaagaggctcacatctgatactgggcacatggctgggccttggtcctcgtgctcccggacttcagagctcagaggggccagggcctggcctagcctggaatctggatggacctcttctgccctggggcgcgccgtttacccaatcctgacctcagagagcgtctgtcgttctggtgggaaaaccgagacccagacaggaacaagggctcagtggcaaccgctctgcctcccagcccagggctctgtcttgccggggctggggcacagggtggaccccaggaagttctgctatgagtcagcttcgagtgctcaggggaccggacagaggctgctggccggggaaggatgccggccggcggtacctacttccgcagctgtgggtatccctgcctggtgattcagcttccctctgagggtccccagggggcgccgccctggactgggaggctggggaggatgctggggctacggaggggcgatggaggtgccttaagggaccccgtaatccagctctgctggatgctgaggtcccacgagataattgtggccagagatcaggtgggcgtaagactggtcctaggatgggggctgtgggcccctcctcactaccctgcttcttgaagatagcctgggcggctgtgcgggataccccagtgtctccagcaatgcgcgttcatctccatggagggctcgccttggcgctgggtggggagcgacttggtcccccctggcggcgaagagaggctgaccacgccagctcgtgggggggtctactgggcagatgcgcaggccccgggcggaggagggctgatgggggaaatgccaggccgatgggggaggggctgtgagcgggaggcgttggggcggggcaagaccgccctcccggtccgggggcggggcttggcctggggcggggcttggctggggtgctcagcccaattttccgtgtagggagcgggcggcggcgggggaggcagaggcggaggcggagtcaagagcgcaccgccgcgcccgccgtgccgggcctgagctggagccgggcgtgagtcgcagcaggagccgcagccggagtcacagccgcagccagagccgcagccaaagcctcagagagcaggagttggagcgcaggccctgctggatccgcgcctagctcgccgccaggcaccggccggaggacgggccgtggtgtcagctcactgcccgggcgctgtgggaggcagcgagcccgcgaccccccgggccgggcaccgccaggcgcggagcccag

SEQ ID NO: 28251 - DNA, 2300 bp, Homo sapien
gtcccagatttctcttcctcaggaaatggcaagggggtgcgggagaggggccatccgctttggctggcttagtttcctttccacaaccctttctggagaaacactaaatgccaccattttttggtccttggcctggaaatttccctatctgcaccccctgcgctgtagcttaggctattcagcagagatctgcaggctccagcgggcgtcggacttacagaggcaaatgtgaccatgtaaattcccaggcccacccgtgacagagagcctctgattcagcaggcctcctttgaggctggggattttaaacccgcgtcctgtgattgggatggggattgagggctatattcagcgcctggccaccagagggcgcagcgggctgggttcagcggtacccctttgagatcttgtgtctcaagacaggttgctgtcatcaaggatttgctggttagacaacaggcaaggggtgagctgggtcctcttgggcaggagcctagtaggaagaccgacaacaggaaagaggctcacatctgatactgggcacatggctgggccttggtcctcgtgctcccggacttcagagctcagaggggccagggcctggcctagcctggaatctggatggacctcttctgccctggggcgcgccgtttacccaatcctgacctcagagagcgtctgtcgttctggtgggaaaaccgagacccagacaggaacaagggctcagtggcaaccgctctgcctcccagcccagggctctgtcttgccggggctggggcacagggtggaccccaggaagttctgctatgagtcagcttcgagtgctcaggggaccggacagaggctgctggccggggaaggatgccggccggcggtacctacttccgcagctgtgggtatccctgcctggtgattcagcttccctctgagggtccccagggggcgccgccctggactgggaggctggggaggatgctggggctacggaggggcgatggaggtgccttaagggaccccgtaatccagctctgctggatgctgaggtcccacgagataattgtggccagagatcaggtgggcgtaagactggtcctaggatgggggctgtgggcccctcctcactaccctgcttcttgaagatagcctgggcggctgtgcgggataccccagtgtctccagcaatgcgcgttcatctccatggagggctcgccttggcgctgggtggggagcgacttggtcccccctggcggcgaagagaggctgaccacgccagctcgtgggggggtctactgggcagatgcgcaggccccgggcggaggagggctgatgggggaaatgccaggccgatgggggaggggctgtgagcgggaggcgttggggcggggcaagaccgccctcccggtccgggggcggggcttggcctggggcggggcttggctggggtgctcagcccaattttccgtgtagggagcgggcggcggcgggggaggcagaggcggaggcggagtcaagagcgcaccgccgcgcccgccgtgccgggcctgagctggagccgggcgtgagtcgcagcaggagccgcagccggagtcacagccgcagccagagccgcagccaaagcctcagagagcaggagttggagcgcaggccctgctggatccgcgcctagctcgccgccaggcaccggccggaggacgggccgtggtgtcagctcactgcccgggcgctgtgggaggcagcgagcccgcgaccccccgggccgggcaccgccaggcgcggagcccagatcgcccccctgccaggcctggtcacggccagagcacgcaggagttcccagggtctggatctgcgcgcaccctaatgacctggggactgaagagaaaaaaggaacgaggatttcatctaaaagcataacgtgggcactaggcgaggaggaaagtggagaccacctggcacggggcagaggtgcctggagcccacgcttgagcatcggagaccctggcatcctagcagccgcgaccttggctctgccctgtctgagctggaaacacagcttagcttctagacatcgctggcacaggcctggcacaagtaagcagtgtcctcacctgtctgaaacgggacacggggtcggaggaaccaggatctagcctggccccaagcggaactctctggtggcccagaggtcgtcactggggagcccgcctcctgccctagcctcactggtgcggatgtgccgctgcccgccggagcaccatgatggcaggatgacctcagccgaagtaggagcagcagctggtggt

SEQ ID NO: 28252 - DNA, 2300 bp, Homo sapien
agaggttgcagtgagccaagactgtgccactgcactcgggcctgggccacagagctagactctgtctcaaaaaaaaaattgttcatattttctttctaaaatgcggaaacaaaatctacagtatggaagcaattgaataaattttggtatgtcataaaataaaatacatgtaattgtgtatgaaacatagacgggtggtatattagatgggagaaaaaagcaggttactaaaaagtgaacttttgtgatgtatcttttttaagtataagcatgttgtaacatatatatatatatatatatatatatatatgaatggattctgatcaaaatacaccaaaatgttaacagtgattgtccctagccacttatgctgctggcctgtcttgtcttctttttatttcttcgagacggggtctcactctgtcccccaggttggagagtagtggcacaatctcagctcactgcaacctccacatcccaggctcaagtgatcctcccacctcagcctcctgagtaactgggaccacaggtgagccaccaagcccggctaattttttgtatttttggtagagatggggtttcaccctgttgcccaggctggtctcgaactcctgagctcaggtgatccaactgcctcagcgtttcaaagtgaagtggtgggaatacaagcgtgagccaccatgcctgtcctcatttttctataagtgtacactacttttataattgggtcaaaaaagacaactgtagaaggataaaaaatattgaaggactagtttttctaatgcattttcagcctatttggaactggagtgttgtgaatgttttcatatttacaaactagtatgaacaatccaacttctcaatctctcatttacatttttctgacctctatgcatagcctaggtgtgaggtgatggaaaaagctggtttagagatcaagatgctcaaacacaaaagtcccccaaatcctgagagttttttgtttttttaaaaaaatccttaaaacatttaaagacgcataaaactcttcacccactcagtggtgcaaaaaatttaccaatactagaaggggaggaggctggcaacgactggaaatattccctttcaagtaataaataatggttattttgaaccaaattgctttccacctcaagtcctccatggatgggagcctggaggatgcagtgatgggggttatggaatggaaaggagcgtgggtaattgggtttgtgaggattggggccaggcagagggaactgggggcttttccaggaccactggggaacacagaggctgagaaggggagtgtgggatgggttcgagctggggaggacctcggcctcgccaggctctaaggagagtcacagctcaccacctagggcgctgggaccacacgatgtcatgcctgggagactgaagggctaggacagattctgagaaaatgtggactggagatggggattccaggttctcccgggagtccaggcgagggagttccggcttcagggagtcccaagagctagactgggaaggggctggtgcccaggactatgagaaatccagactcccctggggtgtgaaaaagggccgaggtccggctgagggagagcgagtctgaaagagttcgggctcccttgcgggtccgagagtctaacgaaggctctgggcacccaggccgcacctgaagagcaccaacgactgctcggtccgcggcgcgggaaggagatgtgcggctgaacccctacgccgattacttagcggcggccctatcgagagggtggttcgagcccgaggtggcgccggtcccgtaaatcgtggaggatctcaggtcccctgtgaccaagggcgtagtcagctgtgtcatggcggcttccctgttcgagaaacagttggaaactggaggccggttgggagtcatggtcgttgggcgcacggaggccggttggaagccatggtcgttgggcgccaggaggccggttgagagccgtgctcgttggacgcgcgcagacctggagttagtccctgggcggaacctggagccccgcgcggcgcgttgcctgggagacgcataagggggcggggccggggagggagtgtcgcacatgcgcacagagcccgggcggctacggaagcggtgagactgtctctcggctgcagccctggtgcgacccggcccgttgccgtagagatgggcagggctggatggagtggggtgcggtgagctgagctgaccctgcttcgccacggggactgcagtgaccccggcttgccggcagggcgggtaacaggttgagccaggg

SEQ ID NO: 28253 - DNA, 2300 bp, Homo sapien
acctctgggaaatcattaaaatgcatgttctcagctgggcgtggtccctcatgcctgtaatcctcatactttgggaggccgaggtgggtggatcacctgaggtcaggagttcgagaccagcctggccaacatggtgaaaccccgtttctactaaaaatacaaaaattatctgggcctggtggcgcatgcctgtaatcccagctgctcgggaggctgaggcacaagaatcgcttgaacccaggaggcagaggttgcagtgagccgagattgtgccactgcatgccagcctgggcaacagagcaagactccatctcaaagtaaatgaataaataataaaatgcatgttcctggctggacgaggtggctcacacctgtaatcccaacaccttgggaggccaagacaggaggattccctgagccaggatttcaagaccagtctgggcaacatagggagactccatctctacaaaaaaaaatttttttaattagctgggtgtggtggcacatgcctgtagtcccatctaatctggaggccgaggtgggaggaccacttgacccctgaaggccaaggctgcagtgagccatgattgcatcactgcactccagactaggtgacagagtaagacactgtctcaagaaaagaaaaagaaaaaaaaaaaaaaagcatgttcttggattccacctctgacttactggggatggagaagtgaatttctttttcttttttttactaagatggagtctctcactgtcgcccgtgctggagtgcaatgttgcgatctcggctcactgcaacctctgcctcctgggttcacgcaattctcttgccttggcctcccgagtagctgggattacaggcacacaccaccacacccggctaatttttttaatttttagtagagacagggtttcattatgttggccagactggtctcctgacctcgtgatctgcctgcctcggcctcccaaggtgctgggattacaggcatgagccaccgtgcccagctctggaaaagtgtgtttctaataaacctccctggggtgattttaacaattatcatcattattttgaatcggtgaaacatacacacagtgaaacatacacagtaaaacatacaaaaggttcaaagtgtgagtgaaaagcaagcattccacctcatttctcagttgtccagttctgtcccccactacaccccagaggcaatcacttttccttggggggactcaccatgctgaagtttgagggtcaccgtcatacatatgagatagaccaagatggggggctctctgcactccagagctcacagcaaaattgcaggtaagaccaccattcaaagacaagtgcctgaggaaggggtctcaaagtcaccagcaaagatgccagcggctcctgctcagtgcatgtctgcacctcctatttctaggaccttccaatctgcttccttctggggaccacttcacgtaggaagcagtccctacacaggttatcttgtcacaagcaaagatcaggaatggataggtgggtaaggggagagtaagacgtgatggtgagctaagaggagtctgcagagaggtctaagcttgaaaagtctggacagaaacccaatgttcagtctttccatttgtatttctgattatttgtagtaaccatcaactttcgtcatttggatagattcttaagaaaaaaaaaaaatcactgatggctgggcacagtggctcacgcctgtaatcctagcactttgggaggccgaggcgggaggatcctggcctgaggtcaggagttcaagaccagcctgaccaacatggtgaaaccccgtttctactaaaaatacaaaatttagctgggcatggtgcgggccgtggaattccagctactagggaggccaaggcaggagaatcgcttgaacctgggaagcggaggctgcagtgaaccaagatcacgccactgcattccagcctgggctaccgagtgagactcagtctcaaaaaggaaaaaaaaaaaaagcggaaaaaaaaattcgctgatgttttaaccattctggggtcacagcctcctttgttatggacctactctggaaaaatgcacagacaggtaaacctctgcggaagcctcacagactgccagcctacccagggatcccgggaggtccaagttcagaatcccactttgagatgtttcttgtactaaaacgcttggtttacaaaaagtcttcccctatttgtttagagaacccgaacgatgtcgtcactggcagcgaagcgccttggcatgaaccgtaggccagctggctcaggaggtg

SEQ ID NO: 28254 - DNA, 2300 bp, Homo sapien
ttttactaagatggagtctctcactgtcgcccgtgctggagtgcaatgttgcgatctcggctcactgcaacctctgcctcctgggttcacgcaattctcttgccttggcctcccgagtagctgggattacaggcacacaccaccacacccggctaatttttttaatttttagtagagacagggtttcattatgttggccagactggtctcctgacctcgtgatctgcctgcctcggcctcccaaggtgctgggattacaggcatgagccaccgtgcccagctctggaaaagtgtgtttctaataaacctccctggggtgattttaacaattatcatcattattttgaatcggtgaaacatacacacagtgaaacatacacagtaaaacatacaaaaggttcaaagtgtgagtgaaaagcaagcattccacctcatttctcagttgtccagttctgtcccccactacaccccagaggcaatcacttttccttggggggactcaccatgctgaagtttgagggtcaccgtcatacatatgagatagaccaagatggggggctctctgcactccagagctcacagcaaaattgcaggtaagaccaccattcaaagacaagtgcctgaggaaggggtctcaaagtcaccagcaaagatgccagcggctcctgctcagtgcatgtctgcacctcctatttctaggaccttccaatctgcttccttctggggaccacttcacgtaggaagcagtccctacacaggttatcttgtcacaagcaaagatcaggaatggataggtgggtaaggggagagtaagacgtgatggtgagctaagaggagtctgcagagaggtctaagcttgaaaagtctggacagaaacccaatgttcagtctttccatttgtatttctgattatttgtagtaaccatcaactttcgtcatttggatagattcttaagaaaaaaaaaaaatcactgatggctgggcacagtggctcacgcctgtaatcctagcactttgggaggccgaggcgggaggatcctggcctgaggtcaggagttcaagaccagcctgaccaacatggtgaaaccccgtttctactaaaaatacaaaatttagctgggcatggtgcgggccgtggaattccagctactagggaggccaaggcaggagaatcgcttgaacctgggaagcggaggctgcagtgaaccaagatcacgccactgcattccagcctgggctaccgagtgagactcagtctcaaaaaggaaaaaaaaaaaaagcggaaaaaaaaattcgctgatgttttaaccattctggggtcacagcctcctttgttatggacctactctggaaaaatgcacagacaggtaaacctctgcggaagcctcacagactgccagcctacccagggatcccgggaggtccaagttcagaatcccactttgagatgtttcttgtactaaaacgcttggtttacaaaaagtcttcccctatttgtttagagaacccgaacgatgtcgtcactggcagcgaagcgccttggcatgaaccgtaggccagctggctcaggaggtggaggcggtgaggcggccacttggggccaccgcttctggcggccgcaggagcgacccacagacaggtaatggctgccatggggggcggggcgtcgtctttagcctttagcgcccctgtgcttcgtgcgcatttcgtggcctctgggtgccgtacctgcttcccacccggctttcctgggtggcggagagcgaacccaccccagcctgggttgggggagggggcgtcggcgcagggtcccgtgggcagagctgcgctgggagctggcgggctccgcattcatcattgttcctccagcgcctggcacggctgggccgaagcagagaccgtggcctgaagcgcgccatccccttcggagttgaccgaccaccaagctcttccgcccacaggtgttgtcagagctccttccaccggccggacctaggaaggacccagggtccaaacatggcccgaggctggccgagagcacaacagccggcgggcgctgacgggcacggagcgcacgggaccgcggaggaacccgcgcgcgcccccgcctcgcgccgcgcgcacgtgactgcgcccccggccccgcccccggcctgccccccgcccccactggccgctcggccgcgcgcgggtcggccggctctatggggaaagcggcggctccgagccgaggcggcggctgtggcggccgctcccgcgggctctcgtcgctgttcacggttgtcccctgcctgtcgtgc

SEQ ID NO: 28255 - DNA, 2300 bp, Homo sapien
cagaggtttcagtgaaccgagattacactactgcactccagcctgggtgacagagtgagactccatctcaaaaaataaaaaataaaaaataaaataaaaataaaatgcaattttgggccgggcgcggtggctcacgcctgtaatctcagcactttgggaggccaaggcgggtggaccacgaggtcaggagatcgagacatcctggctaacacggtgtaaccctgtctccactgaaaatacaaaaaattagccgggcgtggtggcgggcgcctgtagtcccagctactcgggaggctgaggcagggggtgaacccaggaggcagagcttgcagtgagctgagattgcaccactgcactccagcctgggcaacagagcaagactccgtctccaaaaaaaaaaaatgcaattttgatttatgtctcttctctggctcctcttgcgctctagacccatccagcttctgctgtcttcactggcacaccatcttgctgccagccagcgtgaatgctgtacctcttgttggcaaggtctgttccctagtatccagccccttcccacaccctattttcctcaagtctgtttaccctccagggagaggccattcaggaaagccttctctgagccagcctcctgcctgggccagatgtttgctcccaggtgtttgctccttggctcagcccctcgagcatggtagcgtagcagttagtctgagcatgggcttcctagagcctcagagtccccgcttgtcagtcccctagaagcttcaattctgtgcttcccagggtcccttcaatcaaagatttctaagtcagtggaagcagagatgctggagccagcctgcctgggttcaaatcgtggctcccacacttacccactgtgtgaccttggacaagttgcttgccgtcttttgcatcatttctctcctttgtaaaatgggtttcatgatagaaccaactcttagaggtgctgtgaggattagtttagataatgtgtgaagagatcttggcacacggcttggcaaacactcgactaaagtaagctgcagttattgatagtcactttcgcagctttaaaataatacaggttcccaagaagtcccctgccctgctaaaacagaatgagaatgacttttgggtgcagagggtatttgtattttttttcaaaagctccttgagtgggattggcagattcaaaatatacaaacacaggttggccgggtgcagtggcttacgcctgtaatcccaacactttgggaggctgaagtggacagatcacttgaggtcagaagttcaagaccagcctggccaacatggtgaaacctgtttctactgaaaatacaaaaattatccaggtgtggtggtgcatgcctctaatcccagctacttgggaggctgaggcaggagaattgcttgaacccaggaggtggaggttgcagtgagccgagattgagccactgctctccagcctgggcaacagagtgacagaaaaaaaaaaaaaaacccacaggtcacccagtttaatttgagcttcaaatacaaaacgaataatattttagtataaggatgtctcatgcaatatttgggcagtctatatactaaaatttatttattgtgtgtctgaaattcaaatgtaactgggcatcctgcattttatctacgagcatttaaccctatcctgggggaccttgacccccagcccacttggggtctctgctcccaactccctggtccaaaggcaaacctccaagtcagaaaagagatagtatccttttacttgacacaggggggcgctagaagatggcttgttcgctttcttttctgtaactcagtgtctagggaagcaccagcaggttggctggcttgcaacaaatctctccgtacctgtgagtcattttctgatgttcaggtttgtaagaaaccgatacagagctggccacctccctcttgggccttcacttctggggggctagcctagcgcctcaggggctccccggttctcgcctcccctaggctcgcctaccctccattgatgtcataactctattctgatatcacagcccagcacttggaattatcccaggcagcccaggctctgcccttagagcaactagagcaggcagtagagtggggtgggcggggatgaggagggggttgggtggctggtggccctagaggctggccctaaagaatacctggacagcctgccaccctattgctccaaaatgaaaatcctctaacaggtaggacttggaagaatttcctcctgttcctgttgggtgtgatcccactgaggtggaaat

SEQ ID NO: 28256 - DNA, 2300 bp, Homo sapien
acagcttggctgggccaaagggatccccgggggagcccagcacttccccttgtggctccatgggtccccagtctgggtcttggacacttaagaccagaatcgcagtgcagctccttcctgcctttgtgaggcacctgctgagcttgggtttcatcttgtgtaaagtgaagccaagccaggcatggtggctcatgcctgtaatcccagcactttgagaggccgacgcgggcagattacttgaggtcaggagtttgagaccagcctggccaacatagtgaaaccctgtctctactaaaaatacaaaaattagccaggtgtggtggcaggtgcctgtagtcccagctcctcagaaggctgaggcacgagaatcgcttgagcctgggaggcagaggttgcagtgagctgagatggcaccactgcactccagcctgggcaagagcaagactctgtctcaaaaaaaaaaataggtgaggccagcccgccactcctcaatggcaggggaggcaagatcctgttactccagtgagtcccctggccatgcagaggggttcagggagaccctgactctctgcgatctcaccgctcatcaccttcagaaccccaggctggtgagaggcagggtctgtggcaacaagggatgtgaggatcagcgtggagggtgggtagccttggccctagaaacctggagagcagagggtcctccggccgcccacctgggagcccagagccagagggcagacacgtcagatgcctggcaggtcctggaccagccgcagataagaacacggccctttctcccattatccctgcaccaggggtgctgggacctcctgtgtgtgctaatggctggagccagtttcctagcctggaccatatgggcatttggcccatctccccacctcctccgtgagcccagtggctgcccacgtcaatgcccagcaggcctctggtgcctccctcacatccctgtctagaagggaagtttccaggaagccactgaaggccagacagggtcctggctctgcatgctcccaagagcctgagaggctgccctaggtcacacacaggggacccaggctagctgacctcacaccttgctctcccgcctggcctggggagcagtgagatcactgtcaggattaggattaggattaggaacagcaaaagcgattagagtttgtcctcctcttcctggggtgcatctgggcaaaggtttccaggtcagagatgctcaatgtctgtcccatggggcaccggtgaccagcagcaacccctgctcagacctcacatggcatggcccctgacttggtttcccctgggtgggcagcccttacagccttcttccccaggccagacttctcagtagggagagtccctggtggtcaggcagggcctggactccccaggtggggctgccccagggcggagaccccccttgtctgtcgagctttgtggttctcactctgcttgggggcaactcgacaggctccctgccctccccatggagacaggaccacactgcccaggggctctgcaccccaggccggcccctctgcatctcagagcacccatacccccaacacccctttcaccagaaccctctgtgcagcacttgggggtaggcagaaggggcagggccaggacactggaactctgtccccacgctgaggacaatcaacctgacaggtcacagaatcagggactctgtaggagcccaggagggcgccaggagattacaggcctgtcccaggattgggcagtggggtagcacccatgcagggcccaggtaccacctccagctcccactaggacccctcactctcttccccttaaacaattcaggacacaaatgtgcgggtagggggcttcaggtcagcccgtctctcctcctgctcacagctgagcacgagtctcctggccccaggtagagttgtcacacagcctcagagaaatgagaccacgttcaggcctgggctgggtcagccaggccctccctgggcccctgggaacctccccctgccagtccctctgccgggccccaagcctaatccagcttatcaagcacacagcacacagcccagctcagcattctgagaacagcagggccacgccaggcgcctgcctctccccacagcacagccaggatggggcctggagaaggccggcagcagcagaggagaccctgggagtcagggatggacaccaggtgggtgcatccgggctgggggaggtggacgggctctctgcatccatggggtgaccaggcagctcatgtgctgtgggggtaaaggtcttgggtg

SEQ ID NO: 28257 - DNA, 2300 bp, Homo sapien
agaaagggcaaatccagaggttcctagatttgatctcactgccctccagggacagctgaagcctgagccatcctctccactgtaatgacagggcagaatgaccaacccctgcttcaaaactggtggtggaaccatctgtggacctgggaagctgaaaagattctggatgtctcagtaggccacaagcttgaagggaaaaccttaaaagcagttatgtgattcagactctgatgtagcttggtagaaagtgccagtcccacttctgccagacaagaccaattacctctctgagctggggaggatagcagaacgtggctttccttccttctgtgccacggccagggactggcccagggtagacaagggccagtgacaaacctgaggcctaacactgcagggaggacgtggccgcagaatgctcgggccctaccataatgagcaacagcagccacctcagctccaggctgaaccaaaccagctgctgctggggaggcagcgtgcagacccgtggcacccaggtttgctgttccccaactggcatcctgaccgtgggaggccaaccaaggtgggtgctggttgctgggcgggctctgagaaggccagggttcccacatccccaaggaggccaaagggggcagtaagcatgtttgtgaccatcccagcagagggggcagctagatggcccccagggccttcttcactgcaggtgtcaacaaaaacagactctgcaaaatatttgaagagatttattctcagccaaatatgagtgaccacagccatgacatagctcttgggaggtcctgagaacatgtgcccaaggtggttggggcgcagcttggttttatatattttagggaggcatgaggcagcaatcaaatacatttaagaaatacattggtttggttcagaaaggcgggacagctcaaaagcaaggtggggagggggccttccaggctataggtaaatttaaacattttctggttggcacttggttgagttgtctaaagacctgggatcaatagaaaggaaatgttcaggttaagatgaaagattgtggagaccaaggttctttttaagtcttatagtggctccccttggagacaatagatgacaaatgtttcctaatcagacctttaaaaaggtgctaagactcttacttcatctcttcagggttgggagggcctggaagaaaacgatctagctctgtgaatagagattctttacagatgcacgttttcccccacaaaggacagctttgcagggccacttcaaaatatggcaaagaagcatgttttgggatgaaatactttttcttccttgactcgtaatgttatgccagagtcaggttggaaagtaagtcacgatatatagggctaaataaagcccatctgatgagaatgtatggtttttagggcatgactccccagacgccttagataggaatttgggcaagataaaaaatatcagagcttagtcctcacagggaatggaggtgggggagcagatgtgttataggaaaggggtcctgatccagaccccacgagagggttcttggatctcacacaagaaagaattcaaggcgagtctgctgtgcaaagtgagagcaagtttatcaagaaagtaaaggaataaaagaatggctactccatagatagagcagcccccggggctgcttgttgcccatttttatggttatttcttgctgatatgctaaacaaggggtggattattcatgcctcccctttttagaccatagaggatgacttcctgatgttgccatggcatctgtgaactgtggcgctggtgggagtgtagcagtgaggacgaccagaggtcactctcgtcgccattttggttttgatgggttttggccggctcctttactgcaacctgttttatcagcaaggtctttatgacctgtattttgtatctcatcctgtgacttagaatgccttagctgtctgggaatgcagcccagtaggtttcagcctcatcttacccagctcctgtttaaggtggagttgctctggttcacatgcctctgacagatgggcccctgccagaggccagggtctcataccgccactcctccctccccaggcctgcagggacttcttggaactagcagagatacacagtcggaaatggcagcgggcactgcagtatgagcaggagcagcgcgtgcacttggaggaaaccattgagcagctggcgaagcagcacaacagcctcgagcgggccttccacagtgcccctggccggccggccaacccctccaagagcttcattgagggtgagtg

SEQ ID NO: 28258 - DNA, 2300 bp, Homo sapien
gactctgccccagccagtgacagcagcctgtccccaccaccccttccccacagagatatgccaagacccaggcccaggagcctcagcagtggcagccccatgctgaacctgggcgtcctggttggaaacgaggtgattctgttggtgctggcgttgccctggctcctggcatgagtgtgggatgctggccattcacagaccctgctgctagttgaagaggctgcagctgctgcaaggccccgttaggaggtggctgcagtgacacacgcaggggtgtggtggccagacctgggggaagggggaggccagaacacaggcagcttttgaaggatgagccagctggtttgccgacgctttggatacgggggtggggggcagtcagggtgatcttgggtccttggcctgaaccctggagtgaatgtatttctccacttagcagacattaggtgccctcgacatgccaggtgctgctcagacatggaggtttcagctgggaagtgaacagacacggctctggttctcatggggctgggaaagcaaggcagatactgtggctgcttccagctcttttagaaagggggtggtcagggagcagctttgctgatgcagaaagagtgaggggaggaaaggaaaggagggtgaagaagcagcagctggagggcggtgcaccccgggtggggcctgcctcctgacctgccagaggaaccctccactgcgatggagggagtggcccacagggaagcctggggagatggaggtgggagtggagggggcagatgctggatgcgatttgaaggaagggcaggaagggtttgcttagggttagaggaggagcatgaggagggccagagaggctgcagagcgtttggtgtgagcagctggaagggcaggatgctgaggtataggcgaggaggaggcagagcttcctatgggctccttggggagggatcagctgagctcagggccagctaacccatctcctggggcataggaagcaagtgggcacctcttacagagacaggaagtgaggcgaggcacactgcgggcagcgggatcccggctctgcctgtctgaggggagatgagatgtccaagggcagctggaggccaggggcagggctaggctagggctgctgtcctggggagtgggtagacttaggagagggaagcctgggccccacagccagagcagcatggaataaggaagaacagacaagggaggcttggtggaactgccagcaaggcaggggagggccgggcccggggcagtgcatcgatgtggatgcctgctctggagccaggctggccagaggcagggcccgactgccccttggctaaaatcactctgccagtctgggcccccttggtataacatggcacagcagacacacctggtgtgtggggaggattagatgagaagtggacatggaaccttcggcatagtgtgacaccctttatcagccctcagtgcacctgtcacagacatgtctttgagcatgaggtccaccatcacccctatttcacagcccaggagccaggcactgagaggctcaggacagcacccggatgcttttctgctcaaggcagtgccttcctgggggcctgccttgggtccatggccacctgaggaacagccaggactgctcctatggccacagagctgtgcctgctgaggcagggcaagctgtccctccctggctggggcaagtggaacctgggctcatgtctggcagatgctcacatcctatgggtctggtctcaggtgagccaccaccccccctcagctgcgcactacgtgttctccaagcatggctggagcctctggcaggagatcaccatctccagcaagttccggggaaaatacatctccatcatgccgctaggtgagctggggcccggtgccttcctgggacacagagacattgtgcataagagggaggattctggtgatgcaaaagccagctgggggcttccaagggagacctccctgtaggcctgcctcttcaaccccccagcctagttctcaagacaccaggcctaagggcagactggccagagccctgcatgggggggcatgacctctgacctgtcccctgcctccaggtgccatccacttagaattccaggccagtgggaatcactacgtgtggaggaagagcacctcaactgttcacaacatcatcgtgggcaagctctggatcgaccaggtcaggggcgcccttggggagggggtgcatggcccgggggctggccgctgaccactgccctccttcgccagtcaggggacatcgagattgtgaa

SEQ ID NO: 28259 - DNA, 2300 bp, Homo sapien
cttggcctcccaaagtgttggaattacaggcgtgagccaccgcttcaggcctcctttacaaatattttatacagcattctttcatagctactcaatgtctaattgaaaataaaaacagcagcataaaggagaaaactctatgttttttttttttttatagaaggtgtaaaggcatttgacaaaattcagccagtttccagggggcacagcccacgtttcattctgtgtgactgctgccccctggcgcccaactcaggcaggactggcaactaccggtgagtcccagcagccgcaagacaaactaaaggaaaccccaacattttaaaagccacttgccgaaactctcaccgctcaactctcacatgcggatttccacgcatatcagaaacagcccgggatcattattcaacattgtttcagaggttctaactaaagcaaactgacaaaataaattggtatactggcaaatttgtatctataaaaaacaggcttattaaaactaccagaattcctaagacagaaagtgaattatattaaatcattagcttttctacatattaataatcaatgagtaatacagatggaaaaaagtattccatcacaatagacaaaaaccataaaacacttaggaataattttaaccagaaagttatagaacccgtataaagaatttataaaatcttattggaggacctaaaagaagtcttgagtaaatggaaagccattttttatcctctgggggaggattaatatcacaaaaatgtcaatgctcccaaaacttccatttaaatttaatgcaattataatttaaatcccaatggaacactttcttttaggcagggatgggaacgaactggataatgcgattaaatatttcatgtgagagaatacattctaagactggaaaagcattttttaacaagtgagggagactgatctatttagatgctgatgacgcccaaaattatagtttcagccagaacctcacccctcacatcagactcacttgtgcaactgaccacagatgtctccactggcgtctaagcgggatctcaaactcaacaggtccacacctgttggctcatttagtaagaggctcatttaataagtggggctggaataagttaatttccacctgggggcgggagacgcttgactcttgccttacagcttatactaaaatatattccataaggactataggttgtctagtaaaaaataaataataaacattgcaacaaaatgtaagagaatatcgggggaaggggagaagagagaaggggattgatttccctaagcatgataggaatccccaaaactttaaaacatttacctttcaacaaacaccataaaccaagccaaggacaaacgcatagaaaacggactaatgttaactaagtccaagaggcttcaggcgcttggcctcgggtcaaaagggagacatacaggctggctcttccgggcaagaggaaaaacacgcagcttcctttccaagtgttcttcctttcagagataaaagcgccgaccctaaggacatctgttcaacgaatgtttttccctaatgacccccggaaagttggaaagccggggtagaaaagatttcttctgcactttgacttaattaatgcgcagcagcttgcaggaaaaaaaaaaaatcctcgcttctctgtttcgggtgtgagtgggccattgctctccctgtaaggagctactagagacgctgaggcaggagaatcgcttgaaccctggaggcggaggttgcagtgaggcgagatggcgccactgcactccagcctgggcgacagagcgaaactgtctcaaaaaaaaaaaaaaaaaaaaagtaggggattagagctggccacggcttccccagaaacctgcagttactggagtaggaagaggcctcggagaatccctggaagcatctacctaaaagacgcgaggaaacccccaaaggccacaggcacctgcaccaaaccctgagtgccgcaggaagctcgcgaggcttccaaagcgcatgcgcaggtcacggtacgggcacgtgcggcgcgccagcaaaaccacgcaggcgtcttgtcgcttccgcctcgagcgtgtggcgggattgcggaagccctccacagttcataaccgttggctggttatgaaccgttcataacgggcgttaataaccataccctgttagactaagcatggtccacccgcgaatcctctacagagatggccaagcgctggggtcgtggctgcgtcctctaggccaggtgagaatttacaacccaccctcggccactgttgtgctg

SEQ ID NO: 28260 - DNA, 2300 bp, Homo sapien
cgggtgtggcggcttatggctgtaatcccagcactttgggaggccgaggcgggcggatcacctgaggttgggagttcaagaccagcctgaccaacatggagaaaccccgtctctactaaaaatacaaaaaaattagccgggcatggtggcctatgcttgtaataccagctactcaggaggctgaagcaggagaattgcttgaacccgggaggcggaggttgcagtgagcggagattgcgccattgcactccagcctgggcaacaagaggaaaaactccgtctcaaaataaataaataaataaataaatctgtcttttccctgtagtataattaattagattttacccagaagaatttgaactctatttcctaggtaaattgatgataaaatttcttttggttataacatatttgtcgtgctgcctttggattagcagcacatatattcactgatcttgttgggggaaaggtcttcctataattccaccaagtgatagtttaattcaaaatttgcatttgtaggccgtgtgtggtggctcaggtctgtaatctcagcactttgggagtccaaggcaggcagatcacctgaggtcaggagtttgagaccagcctggccaacatggtgaaacctcctctctactaaaaatacaaaattagccgggtgtggtggcgcatgcctgtaatcccagctattctggaggccaaggcaggagaatcacttgaacccaggaggtggaggttgcagtgagccaagattgtgccatcgcactccagcctgggcgacaagagcgaaactctgtctcaaaaacaaaacaaaacaaaaaaattgcatttgtaaaaatttggagttacttgaggaagaaaaaacaatattcctggagagtttagttatggatatttatttaataaatgttttacattttgtttgcaatatggtaagcgatcagagatcctagatgctggttatttactattgatatatttcatttaaaaattcttactttaactgaaaattggctgaaactttttactttggctgaaactctatgcaaaaaagtcagagtaacatggatatttttgaaaaattgatggtcatgtattatgtgggttaatattgtatttaatcagaagtcaagtgttttttttttaggtggttctatgtggacacatcctaatttgatatctcatgaggactattgtggaaaagagcacaaattaaacagtgtaaattgcacatgctcaatgtataacttgttagcattttgttttaccaatacttgtgcgtcatctaccagtgaagaaaggaaactcatacacttttgtgtaatttataagcaaaaatatcccatttgaaagagaaggtaaagagaataactcattttatgactttctcagattttggctaaaaccagaactttccctccattaaagaaagtaatcgaagaccttttccaacaattccttctaggatgacaagagcttgcttggtgtggttgcctagggcccctgttaacattaaccccttcaaggaggggaaccagtggtcatctcctctgggaggctgctcaaagtttggattgagtaaatacacagttatcatgttattcaaaacttactatactccagtccgagtgacaagaatgagaacctgtctcaaagaaaaaacaaaaaacaaagttcaatatttatgcataagatatatccttaaaattcttgctctgagatatgcagaaactgaccactggttaaggcaatgaaaaataaaatatacaggcatttttctaggcaggatatgaatagtgaaaaacacttttagcagttactacacataggactctttcaatgcttcagggtgggtttcccaactcaaaataggaagaataatcatttctgaatagatggcaggacttgttaaagattaacaattgaggggagttggggagctctggaaagccttgagtagtataaaaacaatgcaaatggtggttttaagatttttttcaaaaaacttaaatattttataaccatggctttttattaggaattataacttcaataattcttttgctgacttttagtatttatcatttcagaaccactcacgaattcttgtttggtgcccttgctgaactggttgataatgcaaggtatgtagtcttcaggcatacaatctgtgcttgaagtggaaacactttaggtagctgtgacctttgctctctgaagacttgagaggaagacatttctgtagaatgtagacattctgtaactcctaggatgcctcttactaaaaataatatttt

SEQ ID NO: 28261 - DNA, 2300 bp, Homo sapien
agtttcctctctgtagcatgaagaaattgtgattcttaactcttctgggtcacagcccccttggaaaacttgctagcgatggatcatcattcccctaaaacgcacattcccacaaattcccatcattcccccaaaccgcacattcccacaatttcaggaagtttggggatccccaactccaatccaaggttcccaggttcaaaacccaaggattggggaactgctaagttttcttacaactcaaaaaaaattataaacaataaccatcctttacgtacacccacgctttatagtttacaaagcgatttcaaccccacacacattgataggcagaggaggaaactgaggcgcagacaaattacagagtgactcgcctaaggtcactccgccaactggtggctaggcccggaagaaaacccagctcttccgactccggagctcgtctccccaccccggggctgccgccagagctcccgcccctcactaaggcggcataaggaggaaaaggcaaagtagaaatcccacaaccaaccatcctccggccccctcctgcccccccaactgggtccttgcaggccccgaagggtggcgccaggcctccaagccggccccggccacccccgcctccccggccgctccaaatcccgcggccgctgccgccgccgcctcccccggagcggggcggagcagctgcccgccgccgccgaccacccggacgactcctcgtcgaatcgcaaacgcataggccgccgcccgagttctgcgtacgagaagaaagacgcggcgcgagcgccaacggccaccgggcgcgcgccgcggcggccgggcctgcgccccaagagctggatgccagagcaggagaaagagccgccaaccgatcgctcgatcgaccgcacgcccgttccttcgccctaccagacccgggagggggggagggcgcgccagggcttcttcgatttaggggcctgactccccggcgacgagacaagatggctcctccggtccgcaccgcagctaccgtcccggctgcgtcgctcggcccgcccccggtactgtttctttaaatggcggagagggtcaggaaagcaggaagagaggcgcacgctgtcacgtgacaggggcgggaccggccaaccaagatccggtcacatggggacacgcagcccgccaatcaggaggctgtacatcagggcgggggcgggaggagctgcagctttgtgattggctgaatgctccgcggaggcctcgggggcttggggcgtcggggagtgtgcgaggtggccggggctgtgtgcactatcggagacaaagcggtggctgtggtgtctgtgacggcggcggcagagcagctctaaacgccgaatttcgtgttgctgaatcctgtcaccatctcaactagcgcggcgcgcgggcggcgcgcgggcggcggcggaggcagcggcggcggcggcggaggcggcagcagcacatggttccaagagcgctctgcggctgttgggttccaattccgcggggagggacaaaggcagttgtgagatccgggtagtgcccggtcaggtggtgcgctcgccactgccctcgatccggtccttggaagccgggagtagctcctcttcgtggggaggcggccacgggaccgaggcccgggaagggcctgggaggctgaggctgttgtctgagggacgtgggggcggggcgcggcctgcccgaggtgctgtgggcgggtcatttgtgaggtgtttatgtgggccaagtgtgaggtaatctgaccaccaccctgaactgggtttggtccggctttgaaaaaagaaatcgtgagtgcctaggagctttttcacttgggaggtggtgaagctgcaacttgcgccatataacactccgtcgacatcttggtctccggtcttgggcctgtttaagaatcctggcatcacgtgtggcgaagacatggctgatcagttttctgacagaagtgggtaaatttccgcgttggtaaatttcctgacaggaaatttcggggaaccaaaaaaggctggaagaacatgaagatggagcagtcataaaccacccactcaaggaccatctccttcaggaccatccacacgagactcagattgtctgaattgagctatcgcaacttaatgctaaaagctccttaaagctacagatttatgacatagttccttccaaaatattacatcataaatcattgagaagattaaaaaaaaacacttgaagaaattgtagttttaaacatctctgcatatattttggatagctactaggttactttaactgtcatt

SEQ ID NO: 28262 - DNA, 2300 bp, Homo sapien
cccgcccacagcacctcgggcaggccgcgccccgcccccacgtccctcagacaacagcctcagcctcccaggcccttcccgggcctcggtcccgtggccgcctccccacgaagaggagctactcccggcttccaaggaccggatcgagggcagtggcgagcgcaccacctgaccgggcactacccggatctcacaactgcctttgtccctccccgcggaattggaacccaacagccgcagagcgctcttggaaccatgtgctgctgccgcctccgccgccgccgccgctgcctccgccgccgcccgcgcgccgcccgcgcgccgcgctagttgagatggtgacaggattcagcaacacgaaattcggcgtttagagctgctctgccgccgccgtcacagacaccacagccaccgctttgtctccgatagtgcacacagccccggccacctcgcacactccccgacgccccaagcccccgaggcctccgcggagcattcagccaatcacaaagctgcagctcctcccgcccccgccctgatgtacagcctcctgattggcgggctgcgtgtccccatgtgaccggatcttggttggccggtcccgcccctgtcacgtgacagcgtgcgcctctcttcctgctttcctgaccctctccgccatttaaagaaacagtaccgggggcgggccgagcgacgcagccgggacggtagctgcggtgcggaccggaggagccatcttgtctcgtcgccggggagtcaggcccctaaatcgaagaagccctggcgcgccctccccccctcccgggtctggtagggcgaaggaacgggcgtgcggtcgatcgagcgatcggttggcggctctttctcctgctctggcatccagctcttggggcgcaggcccggccgccgcggcgcgcgcccggtggccgttggcgctcgcgccgcgtctttcttctcgtacgcagaactcgggcggcggcctatgcgtttgcgattcgacgaggagtcgtccgggtggtcggcggcggcgggcagctgctccgccccgctccgggggaggcggcggcggcagcggccgcgggatttggagcggccggggaggcgggggtggccggggccggcttggaggcctggcgccacccttcggggcctgcaaggacccagttgggggggcaggagggggccggaggatggttggttgtgggatttctactttgccttttcctccttatgccgccttagtgaggggcgggagctctggcggcagccccggggtggggagacgagctccggagtcggaagagctgggttttcttccgggcctagccaccagttggcggagtgaccttaggcgagtcactctgtaatttgtctgcgcctcagtttcctcctctgcctatcaatgtgtgtggggttgaaatcgctttgtaaactataaagcgtgggtgtacgtaaaggatggttattgtttataattttttttgagttgtaagaaaacttagcagttccccaatccttgggttttgaacctgggaaccttggattggagttggggatccccaaacttcctgaaattgtgggaatgtgcggtttgggggaatgatgggaatttgtgggaatgtgcgttttaggggaatgatgatccatcgctagcaagttttccaagggggctgtgacccagaagagttaagaatcacaatttcttcatgctacagagaggaaactgaggcctagatgtcatttgggacccttcacaaccattttgaagccctgtttgagtccctgggatatgtgagctgtttctatgcataatggatattcggggttaacaacagtcccctgcttggcttctattctgaatccttttctttcaccatggggtgcctgaagggtggctgatgcatatggtacaatggcacccagtgtaaagcagctacaattaggagtggatgtgttctgtagcatcctatttaaataagcctattttatcctttggcccgtcaactctgttatctgctgcttgtactggtgcctgtacttttctgactctcattgaccatattccacgaccatggttgtcatccattacttgatcctactttacatgtctaggctgtgtggttggtggtgaataggcttctttttacatggtgctgccagcccagctaattaatggtgcacgtggacttttagcaagcgggctcactggaagagactgaacctggcatggaattcctgaagatgtttggggtttttttctttcttaatcgaaagttaacattgtctgaaaagttttgtta

SEQ ID NO: 28263 - DNA, 2300 bp, Homo sapien
ctgatgtacagcctcctgattggcgggctgcgtgtccccatgtgaccggatcttggttggccggtcccgcccctgtcacgtgacagcgtgcgcctctcttcctgctttcctgaccctctccgccatttaaagaaacagtaccgggggcgggccgagcgacgcagccgggacggtagctgcggtgcggaccggaggagccatcttgtctcgtcgccggggagtcaggcccctaaatcgaagaagccctggcgcgccctccccccctcccgggtctggtagggcgaaggaacgggcgtgcggtcgatcgagcgatcggttggcggctctttctcctgctctggcatccagctcttggggcgcaggcccggccgccgcggcgcgcgcccggtggccgttggcgctcgcgccgcgtctttcttctcgtacgcagaactcgggcggcggcctatgcgtttgcgattcgacgaggagtcgtccgggtggtcggcggcggcgggcagctgctccgccccgctccgggggaggcggcggcggcagcggccgcgggatttggagcggccggggaggcgggggtggccggggccggcttggaggcctggcgccacccttcggggcctgcaaggacccagttgggggggcaggagggggccggaggatggttggttgtgggatttctactttgccttttcctccttatgccgccttagtgaggggcgggagctctggcggcagccccggggtggggagacgagctccggagtcggaagagctgggttttcttccgggcctagccaccagttggcggagtgaccttaggcgagtcactctgtaatttgtctgcgcctcagtttcctcctctgcctatcaatgtgtgtggggttgaaatcgctttgtaaactataaagcgtgggtgtacgtaaaggatggttattgtttataattttttttgagttgtaagaaaacttagcagttccccaatccttgggttttgaacctgggaaccttggattggagttggggatccccaaacttcctgaaattgtgggaatgtgcggtttgggggaatgatgggaatttgtgggaatgtgcgttttaggggaatgatgatccatcgctagcaagttttccaagggggctgtgacccagaagagttaagaatcacaatttcttcatgctacagagaggaaactgaggcctagatgtcatttgggacccttcacaaccattttgaagccctgtttgagtccctgggatatgtgagctgtttctatgcataatggatattcggggttaacaacagtcccctgcttggcttctattctgaatccttttctttcaccatggggtgcctgaagggtggctgatgcatatggtacaatggcacccagtgtaaagcagctacaattaggagtggatgtgttctgtagcatcctatttaaataagcctattttatcctttggcccgtcaactctgttatctgctgcttgtactggtgcctgtacttttctgactctcattgaccatattccacgaccatggttgtcatccattacttgatcctactttacatgtctaggctgtgtggttggtggtgaataggcttctttttacatggtgctgccagcccagctaattaatggtgcacgtggacttttagcaagcgggctcactggaagagactgaacctggcatggaattcctgaagatgtttggggtttttttctttcttaatcgaaagttaacattgtctgaaaagttttgttagaactactgcggaacctcaaaatcagtagatttggaagtgattcaaagctaaactttttccttggccctccttgtgttctaattgcttgcaagtgtaatactaggatgtccaagatgccagtttttgcttctttgttagttgtcagctgcttttatcaaatttcaggccattatccaacaaacactataaaaatgtttgaacaattggatttcaaacattttcgttttgtggagtggtgctcaccaagtggtacagccctaagcaagtgaacacaaacacatttaagtgtattttgtctgattagatgttagccagttatgctatttcattcaaatgtctgaaaaaatcaattgactattcccttttcctaaagggcagagacagataatctcacttccagagaaatgacttggagaaaaaaaagtgttggtctttttgctcttttgtaattaaatccggatgtacctcaaaagacttaagactgtggtgataagatgctttcctcagcagaaaggagggaaaaaaaacaactgg

SEQ ID NO: 28264 - DNA, 2300 bp, Homo sapien
gcggtttgggggaatgatgggaatttgtgggaatgtgcgttttaggggaatgatgatccatcgctagcaagttttccaagggggctgtgacccagaagagttaagaatcacaatttcttcatgctacagagaggaaactgaggcctagatgtcatttgggacccttcacaaccattttgaagccctgtttgagtccctgggatatgtgagctgtttctatgcataatggatattcggggttaacaacagtcccctgcttggcttctattctgaatccttttctttcaccatggggtgcctgaagggtggctgatgcatatggtacaatggcacccagtgtaaagcagctacaattaggagtggatgtgttctgtagcatcctatttaaataagcctattttatcctttggcccgtcaactctgttatctgctgcttgtactggtgcctgtacttttctgactctcattgaccatattccacgaccatggttgtcatccattacttgatcctactttacatgtctaggctgtgtggttggtggtgaataggcttctttttacatggtgctgccagcccagctaattaatggtgcacgtggacttttagcaagcgggctcactggaagagactgaacctggcatggaattcctgaagatgtttggggtttttttctttcttaatcgaaagttaacattgtctgaaaagttttgttagaactactgcggaacctcaaaatcagtagatttggaagtgattcaaagctaaactttttccttggccctccttgtgttctaattgcttgcaagtgtaatactaggatgtccaagatgccagtttttgcttctttgttagttgtcagctgcttttatcaaatttcaggccattatccaacaaacactataaaaatgtttgaacaattggatttcaaacattttcgttttgtggagtggtgctcaccaagtggtacagccctaagcaagtgaacacaaacacatttaagtgtattttgtctgattagatgttagccagttatgctatttcattcaaatgtctgaaaaaatcaattgactattcccttttcctaaagggcagagacagataatctcacttccagagaaatgacttggagaaaaaaaagtgttggtctttttgctcttttgtaattaaatccggatgtacctcaaaagacttaagactgtggtgataagatgctttcctcagcagaaaggagggaaaaaaaacaactggaactcaaagcttgaaattctgtggcaaaacatgagatgtccaggattggaggttgaaaagatttcactacagtgttctgcaatagttggagcagataactttcagtgtagccacagccatggactccagatttccagattttcaagacctggacctggaacccgaaagagcttgtcacgatgcggcaggaacactggaggtagatttttttttatttttgaattttgggactgttgaccttgctgtgagaaaagagacaacgactgagcaagcactaccaccagcactgttactgggaattagaagacctgagtttctgtccagaccctcagtgcaaactgaggatgctccatccaaagtgaattatggtacttgccattttccaaaatgccttatcctttaccatctctgcacttttgttcatactctcattctactttggaactgctgctctgtggcttttcatctgtcaaaactgccattttctcagtatccaactcttatgccctcttttccatgagtctcctaactagccagaatagagctttaaagttttatgacatttcgttatgtatcctctatctgtatacaaaatcctgtaaaatagttacttgcctgcatttactgtctttgcagatagcagactccttgaaagcagggtccttgtttagtgcatctttgcccacatacaccacaacatatcaagatgcatttattaggaaggaggagtttagagagcaggctatcagaataaccactcagtaagtgttttcttaattgctatgtgataacttacattactcttaatgaggagaaaagtcgctagatatggatcatgtttatgttttaatgttttttaattctaaattttgatctagggagccctcagacataaggagaaaccaatatgttgaatgatggggtattacatacagaaggaccaagaccttattttctcctacttaagatggaatcttgttaagatgaaaggacagctttttaaaaggagaaggtcataagacagtttgaggaaggcattggaagaggaaga

SEQ ID NO: 28265 - DNA, 2300 bp, Homo sapien
atacttctgtatccctagaattgtatcataactttagttcaaggacattgcatctcaggtgggttaaggaggttgggaaggggagaaaagggatgaggagatattttcttgagatttatctccttgagataatgcttgagaagtcatccagccatggacttcttggagtaatacttacaaagaattggatgcattttgcatccttaggcaaaaaccccagtgctgttacaactgaaaatcattagccttgttctctgatagatacttacaagcccaactgcaggcaatcaaaatttatagcagatgagttctaactccatcaacctgtaatgtggtccatcttagggaaagaataggaaaacaccttggtttaccacaggctttgcttacagtttctgctttctgtgacctattttttgtatttcagcattttgtgaccgacttattcttagatcattggttttccaaaggctttgtggccatgaagccctttgagtgaaaactgtgcagaagcccagagtaaaagtgaagctgctctggatgaagtagtgaagcaagagtaggggcctgaatcctgctacaactatcttcctttaccaccgtggtgacacctaaggggacttccttacaacaccttgaactcttccgaacacagtttgaaaaccactgccccagacagcaatatgtttgacctgaatggcattccaatcttttctgtacctccactcagcacagttcatgttcagtagatgctgaacattcttagaaatactgtgtgtgaacttagaaaagtgcaagaagacaggcatgtctttgaccccaggaatgatcatttgctgaagatggtgtcaagtgaacctagattaacagccctccactccagatggatatccagtgattcctagaatgggatatagccagagaacaattctatgcaccctacactgacagactcccttaagcaacaccagatgctctactggtacttgaagtacatgactttgaagtcttgaccctccatgaatacctgaattatcagcaagcgggttttgaagctggtgcctcattgaggccatattagagcaacttgtacatttgacctcttgttatcagccatggtactctacttcgtgtgcaagagataactatgaaagccaaattcaaatactggcaacatttcctaaaggggctcaatatctatcattcgtcttcttttccaaactacacatcactgtatgactcaaccagtagcagttatattgccccttggtttttattcagtttaactactgtttccaagataaatgagctaataagctttaaaaaaaaaaaaaaaaaaggctgaattcttttttcttcatcactggcatatctgcctattctccagaattattatgactattcagctcactttaacagttgaacttcaagcgacaatctttgaacaccccttctcatgtgatttaaaatgaaaccatttggaaaagtttcttctagccagtaatagattttttttttaattgctctgccttgtgccgagagatgttcttttaagatgaatcttttgatgtctgataccaccaaatataggtggtagggagagttggaggctggccctttgagcaggccattagcttacttgctgggcatttccgatagcttattgcctacctttttgctggaaacaaactgatttgaaaaacaaaatctatgaagactgcagctaaggattttatcggtagacttaagagcttttgtccttgtggatattttagtggaaccacatcagtctcaatactgtcattttacactgactcagagcagctgacttcattccttgccatgatatatatttaaggcaggcattgtaacagacataaagacaacttatctgtttcagcaggaaggattcagtttatgaactctcagaccagatcatgttgaacaaggagactttgatgtgtgtcatgagaaaactcattctttacttcccagtcaatttaaaggccagctatcctgagctactcgaatgaatgcactggttaaacattggaaatagtttgtttatatccttgtctctctctaggccaattgtgattacatgactcgactctacatctcgtcaaacaaggcctaggtctggttgctgtagactgctcgccctcaacaaataaaatctggttgactagcctccttgtatatacaactattatttgttaagaagaaattatcgtcaattttctactaccttccaattgtcagctctttttttcctctctggtttttcctatactttacag

SEQ ID NO: 28266 - DNA, 2300 bp, Homo sapien
gctgatctgaagtaagacaactagccttctacatcaaataattctgtgaggcaatttgagtcagctgtaaattttaagtacagtggaaacttttcttcttttgctaggttgaactggtacagttctgtgtgtactggtgaatcggactcatttctgcactactgaaggagagaaatggacgcggctttcgaactgctgtattccttccagacccgatagatgaggttccaggtgctgaaaatgaacaattacatacaggaatagaggcctactctgcacttaaaaatatcttcaaaaaagttgctggtcaaggagtatgcagcaatggtccttcctgttgtgaacattgagtcctagtgggtgaggtgtgggttgttactattaaaaatccttgttgtattgggcacaagatagactgaaattgactgtagtcctcacggtgagtctaattgcagcaacatgtgaaaaaggcaggcaagagctgagtcaggaaaatagacaagcagggtaccttcagaaaggccagccataccaatagccagaatatgatctggaagaaccagcagatcaataaggaagttctgtaaattagtttttactctgggtactcaggggttaatccatagggcttattctggatacagttttctgatcttacagagccagtcaggtacatcagctttcagtttcttgctcatctgccaaagaactttcagctcaggagaaggccttatcctcaatcagacttgaggttctgtttaggagtctatgctacatctgggagtgacagggtcagcagagccagatttgtcaaagttggccctactttctttggtaatcaagtcgtcatcttttttaactcagccgatctctgagaatcatcttacaagcaagtcaaggcctcagattggttgaatggtgctgttcaaagatttagatgagatctgaggcatggagacatggagacagtatacagactcctagatttaagttttaggttttttgcttttctaatcaccaattcttatatacaatgtatattttagactcgagcagatgatcatcttcatcttaagtcattccttttgactgagtatggcaggattagagggaatggcagtatagatcaatgtctttttctgtaaagtataggaaaaaccagagaggaaaaaaagagctgacaattggaaggtagtagaaaattgacgataatttcttcttaacaaataatagttgtatatacaaggaggctagtcaaccagattttatttgttgagggcgagcagtctacagcaaccagacctaggccttgtttgacgagatgtagagtcgagtcatgtaatcacaattggcctagagagagacaaggatataaacaaactatttccaatgtttaaccagtgcattcattcgagtagctcaggatagctggcctttaaattgactgggaagtaaagaatgagttttctcatgacacacatcaaagtctccttgttcaacatgatctggtctgagagttcataaactgaatccttcctgctgaaacagataagttgtctttatgtctgttacaatgcctgccttaaatatatatcatggcaaggaatgaagtcagctgctctgagtcagtgtaaaatgacagtattgagactgatgtggttccactaaaatatccacaaggacaaaagctcttaagtctaccgataaaatccttagctgcagtcttcatagattttgtttttcaaatcagtttgtttccagcaaaaaggtaggcaataagctatcggaaatgcccagcaagtaagctaatggcctgctcaaagggccagcctccaactctccctaccacctatatttggtggtatcagacatcaaaagattcatcttaaaagaacatctctcggcacaaggcagagcaattaaaaaaaaaatctattactggctagaagaaacttttccaaatggtttcattttaaatcacatgagaaggggtgttcaaagattgtcgcttgaagttcaactgttaaagtgagctgaatagtcataataattctggagaataggcagatatgccagtgatgaagaaaaaagaattcagccttttttttttttttttttaaagcttattagctcatttatcttggaaacagtagttaaactgaataaaaaccaaggggcaatataactgctactggttgagtcatacagtgatgtgtagtttggaaaagaagacgaatgatagatattgagcccctttaggaaatgttgccagtatttgaatttggctttcatagttatct

SEQ ID NO: 28267 - DNA, 2300 bp, Homo sapien
cttccctagcactgtaccggactgccctttgatctctagatcacccccactcccttgcagagaggaagacagaggcaggcgggtatgtctggaggtggacccaggcactaagggcttgaaggggcaggacccacacatcccttccatagggccaagggctagtgagcgcatgtgccagacagtaaatccaagcatggaggaactcacctgtaccattcctcctagcctacagtagggcagggagaaaggagggcattagcacaaagcaggccattcattggagctggtgaccgccattcaggcaggccctgaaaatcagaggtggcctaggtgtgccctgcatgaaggggaggtcccaagggacgcgtgaattttgaagtattcagaattggtcttagagggcgcctgaccctcgttctggataataacatggcatctcgcccaggtagagaaagcctaggaccttgaaatatgtcctccgaagtgagctctgtttgcctctcctgctgtgtagcattgacaagtcgctttcttctgtgccttgattttcttttttctttttttgagacagaatcttgctctgtcgcttaggctggagtgcagtggcacaatctcggctcactgcaacctctgcctccaggttcaagtgattctactgcctcagcctcccaagtagctgggattacaggtgcatgccacttgcccgactaatttttgtatttttagtagagacggggtttttgccgtgttggccaggctggtctcgaactcctgaccttgggtgatccacctgccttggcatcccaaagtgctgggattacaggcatgagccaccgcacctggcccgtgccttggttttctgatgtgtaaaatgggaccacttctcaggggtgtggggatgaaatgaaatgacacatggaaaagactctcagtgtggagactgggcctttccttagatgggggctggggggtgtcacagaggacctgaaccggggctcttctgggttaacaggctgaaaccacctccccagaatcccacattatagtggttaaaagcagggtctggactcagaaggtgctgggtatgaatcacagctttactacttatcagctgttgtcctcatctgtaaaatggggcaatagtcatggtctcatgtgcttgttatgggcattatatgcctggtacatggcaagtacaaaataaatgatttgttattgtttttatttgacaggactccagaccccatcctcccaactccacccactttagtctccatggagacccaagggcggctttagggcctctggcactgaagatggaatagctttgccttgtggatctgacctcctgggtaccctggctgattccttgtttggtcttggacatgtcagctctctctgggcctcaatttcccccttttgctgaatgacagcctggactccatattccctatttaggactccagcgctcctaaaggcagactctcagggcttggaaggtagaagcatgctacaagaaggcaatgtctgttcaaaggtgtgtgggctgggggaggcgtgctgtgtgattgattctgctccacctgagatggtcccggcactccaacacagggtcaaggtgctgccagtcactcagtccctgctctgaggtggctcagaccaggtgtcccgaaagcagcctagggacggcggccaagcttaaacactgacgcgagaaaggggtggagtcgagggaggggacgtggtctcaggaacaaagaggagggcggagaggggctgtcctgaaggctctgagactcctacgaccccaggaaacttacctcggctcggggcgccccccccgacttggcgcagagcctgcgtccccctgccgatgcccacccgactcgctaaagccaccgaggcagacgaccccaagactcccaatttccgacctccctggcccgcgaggggcggggccttcctctcggggcgtggccgtcaaattgaattttcccaatggggcacgagagtgggaggtacccaatcgagggttggctggcgcgtcggggcagggcggggccagccgggctgctggcgcggctggacgggcagctctccgcagaatccaggggacggttgctgagcgggcctgggacagcgggtcgcggcacctccggcctgcgcgtgtctaatccgtctgtcgggtcccgaaagagctaagccgagcctgcgccggacgggtgggctggactgagaggtgggtgtgcggacctcgggggggatcctggtgctgccccaacgtgtccgggggtggaacc

SEQ ID NO: 28268 - DNA, 2300 bp, Homo sapien
ctccctgttttgaggtttagacaggatgagagtccatcccaggccacacagcagactggcggccaagctggcagggctggaaccagagaccccctaccctgggtttggtgagttttccagcaaaccaccctagggcagagggcagcttccagccaggagccacattataggatgggacagtaatggacgctcctaggttagagagggaaagtaaggcacagagcctaagtgcctgtggtttctggaagccccagcatgcctgattcatgtctgtcccctgcagaattctctgagctggtgacaggtgccacaggcactggggatctcaccagaaaggaaccgacggagctaggggccagcgagatggcggacgaggccttagctgggctggatgagggagcccttcggaagctggtaagtggccccatcacccactgtggggacaggaaagccaagccagagaggcagggtcaatccagggtacctctcagctgacaggaagaagtgatgggggaaaggtcaggaggagggggacatgggaacaggggtaggccagttccatgtggctgatgcagaggcccttgtggcatgtgcctgtccatgcctggtactgaagcctagtccctcccaaccctccacagccaccacctgtttaaacagtaactgctgtagactcgcccgtatgcagccacaggtgtggggaggctggatatgcctctccagagcaatagctcgggcaatgcccacccctggaagctggcccagtgataatggtagcagcaatgattaataatgccaaggcctggcagggggcaggctgggtactgggtataccatgtcacagaataatcacagcagctctgaaagcctgggcactgcgactcaagagagttaaaatcacctgctcaaggacacccatctaagaaggagctgtgccaaaatcccaaccccatagtgggccacgggggaccagagtcctgggaaagtcaaggctggacgaggccataagagagagacaggttttgtgggcccttatggattctgtggcttctcatctcatttttctactcttgagtctcagttcctctacctgtaaaatgaagggagggagggagatgtgtttgcacacaagctctaggtcctagagttggcatggggacagaatgaggcatggacccagatctcaggtggaggaaagatgagcccactccatcccctttcttgttcctcttcctgagagccctgtctacctccatgcacagaggccgtagggcaacccagtggggcagggctccttccccaaccccaaaggccaggcagcctgacctggaggaggggccagaggagctccatctcctcagtccctgacccttgtccatgggggtaaattaaagatttactttacctagaagacaagtgacccaccccactctcataccttcccccgcaggcagaggctggaaccaaccagcgtagcccagccactgggcagtgcccagctgctgccatgacctccccaaggcactctgcctgtatgttctcggaccagcgcattagactctctgggtgtctgcctctccactatcaccgcaggatgtgtgcagcctggaggggatgaggttaggtttccaaaggtgcccgccagtcagttcgaccttccctcaggaagtccaagtcccagtgggggtcgtagaggcagcacagtccaaaaagagggaatgccaggcctggttcccgcacatcctcatctcaaggtatccacaggcaggctcagggttcttcagccgccacctccctctcttaagcgaggctcgggcggcgctggaaaagagttttggagagaagctggagcagtggttgaatctctgggaaaggacagatgagaacctgccccggtctcgggatcggtgcctctcgaagtctttccgaccccgggagcggctcctccagcacccggcgcccgccattactgcgccccgcgcgccggcccggcccccgctggcctcgtggcaagaacgggggcgtcccgagccgggctcctccccgcggggccgggccatataaggaaaagctaggcccgctccgcccgccctgcgccccagcgtctggccgatttggggacgcgggcagtcgcttccggccccggctcccgcacattcttgaggattgggccggggatgggaggaatggggacgcctggggacttgcacgccgcgtgcccctccaccacccgccgggacgccctctgcctcggtcccgagttcgagttcgacctccgccactcagctgggtgtcctggg

SEQ ID NO: 28269 - DNA, 2300 bp, Homo sapien
aggaggagggccccagggggcggggcttggctgctaggccccttgaaaacagagcaggggggcctgtggcacgttcagaggagcctggtgccccgctgcccgtggccgtcggcactgccgagccagggggcagtatgaagaccacattcaccatcgagatcaaggacggccgtggccaggcctccacaggccgggtgctgctgcccacaggcaaccagagggcaggtaggcgccccccactgcctccccaatggggatgagtgcctgcaaccgcacttctgcatgcaggacaggtgctgcggccaggactcagggtgtctccaaagggtgtgctgggagcgagggcattatcaaccttgtctggcactgccctcactccacctgatcctcctgacagccacctttctccccactcagaactgacactggggctgcgggcgcccccgaccctactcagcaccagtagtgggggcaagagcaccatcacccgtgtcaacagccctgggaccctggctcggctgggcagtgtcactcatgtcaccagcttcagccatgccccccccagtagccgaggaggctgcagcatcaaggtgagcccctcctcaccccaccagcctcaccatccgtcagcctcacatacactgcttcagggtgtagggctagcagggttcctctgctcctcccctactgcacacacagagaaaccgaggcccagagagggaaggtggctgctcacagaccacagccagtcggtggcagagctaaggccagaccctagcatatcagtccctaagtgtgtcggaagcttactctgtactggcgttaagcttcctggatgctgatctctgatccttagttcgaaattggttggttcattcctggtgaacagatggggaaactgaggctcagagagggtggtaagggcttgctcccctcttcctgtggcagccccagtgcccctgcgcccacccacactggacatcagccccgaggtatagagcagctcatctgctcatccaagatcagcctggcccattaggagattggagattagtgattagcatctgcgtcaacctccctgtgggggttgggcagaagctctgaggggggacagacaggcagaggggcgccaatcaggtgaggcagcagcctagcaggtgccttgggaactgaatacgcagcacccttccattattcattcccaagcccaggatccactagccgggagctcagccgggaaagggatccccaagcgggccacccggctgcccaggtaatgccctctgtgctaaaccagggactgaatgggactttggctgaggtgagatggctagaccagctttgggccttctcaggggagacagggagagagtgagggaaataaagcacccttcctttccaaaaaagcaggatccagctgccctctgacaagggattgtgtggggtggggtggggggacccgctgaggcccttgaggtggatgggaggtgccacagtgagacctgggtctgacaccaccaacttgcctcagtttacccatctggaaccaaaggggacaggtgatgtacccataatgtgcttgctcaaagtctgtggttggacgtgagcaccatgggcaggccagagggcatttatgtaagaccaagacactttttatagcagatcactcaaagtcctgcctccctgtgcctccatttcccccatctgttccagctgtctaaaacagctggagttagggtaaagggtaaaggagtacaggctgtggagtccagcagactgattctcacagctaatgtacatggtggctaggccaggtccattccctgttccctgcctcagtttccccacctgtgaggcatggggccccgatctcagtgatcttcagaacccatgcagtcttactgtgctgcaggcctatgatttctgtagggctatagccaggcctggcgatccgcctgcttgggcaggccccccctcccccactgccccttccacggaggagcccagaataggtttctatttgggctgcagctccagctggctggtggcgggctgggaggcaggggcggggcaggcccgctgcccttgcctttgccctcggaccagctgcaaagactcagacactcagccagagacagcagcccctgccactgccccaccattaccccccatagagtccccaccagcaccatgccgggggtaccagggcctgggcctgagctggccgcagcccttgaggagcagttgggccgggcactggaggagctgcgggcggtggctgaagcaggccgggtggcagt

SEQ ID NO: 28270 - DNA, 2300 bp, Homo sapien
ggagtgatgggatggccttctgtgccctggtgcacaacttcttccctgaggccttcgactatgggcagcttagccctcagaaccgacgccagaacttcgaggtggccttctcatctgcggagtaagtgtgggccctggccctgctaatgttgctgcacatctggggctggacatcgggaccaggcccagttgccctgagaacccctggagcgggccagccacattgtcagtcagcggctgagacccccttccccagagagtccccgtccttctccatccccacccccccgctgctgagcgtgccaggtgcccgccggaacgaaggagccgcaggccggcctaccagcccgggccaaagcccaccaggtggccctgtccatatcccctccatcctccctctgcccccttctccctctctctccctttctctgtcctgctctcctcccactatcaccagagcttcctgctcccacgggatcccggctggagattccaaaaggaggctcctggcccgggcaccgtgcccgcccagcctatatagtgctgccagaggcttatataggacctcagcaagccctccactttggaatcgttgccccgtctgctcacctcaccctcagcacccttctccatctgtcttcccttctttccccttctctttctggtttccctcaaatttcttcctcctcctccttctcctcttcctcctccccccacctcctctcacgcctccctcaccccctctccccggggcacagccctcctctccaaccttggtgccaacgccatcgcccccaccccgcgttcccgcttgcccctagagttctctgcacctgtgactggtttggcccccacccttgtctgcattgcacaccattagtgatgggtagtgagcggcacgtccacagtggggaggaggcatgcggggggctggcagactgcagcactggaatcgtaattgaactcatgtctctgtgtgtgtgtgtgtatgtgtgtgtgtctctgtttcctcccctctctcttctctgcctcttccctctcttccccacccggggccctggcctcctgcccccgtcccccaccccttcccggccccctaccctccccaggacccatgcggactgcccgcagctcctggatacagaggacatggtgcggcttcgagagcctgactggaagtgcgtgtacacgtacatccaggaattctaccgctgtctggtccagaaggggctggtaaaaaccaaaaagtcctaacccctgctcggggccccacggtgagaaacgccgcctctaccacctgccccgtttcaccagaatctgctcagcaaggccagagagggtccagggaggcgggtgggggaagtaaggggggcatttagtcaagccagaggagccagacatagccctgtcttctggcagttcagggcccagcaggtgagaccattctaaatgggcagtgatgacccaggtgggcagcactgtgatgggggaagcccaggggagatgcctgacccaggctgcaggtctgggccccccatctgaaaaaagtgcaaactaagctgggatctgaacaagttcaggctaaaggagggagagggagttccaggcagaggaatcagcctaggcttagcagggcaagagagctggagagcacagcacatcaggaagggaagaaacttgagtctggatatgagggaggagggggccacagttagaagtttgaccttctggccgagcacggtggctcatgcctgtaatcccagcactttgggaggccaaggtgggcagatcacgaggtcatgagttcgagaccagcctgaccaacatggtgaaaccccatctctactaaaaatacaaaaattagccaggcgtgtggcgcacacctgtaatcctagcgactcaggaggctgaggtaggagaatcacttgaacccaggaggcgaaggttgcaatgagctgaaatcatgccactgcactccagcctgggtgacagagcgagactccatctcaaaaaaaaaaaaaaaaaaaaaaaagtttgaccttcctcctgaggacaacaggagttataaagggtttccaaacagagaagggatggatatagcattctaggaccttcctcggatgaggcttggatgagagatgggatggactagatgactggaatagcttaagagctagagagacaggcttcccaatagatctggtttggagagggagagggaaggtcaagaagtctgccaggctcctgtgtgggcactggggagttggtggtgccatactccaaagtggggagctcaggag

SEQ ID NO: 28271 - DNA, 2300 bp, Homo sapien
agagaatcgcttgaacctgggaggcagaggttgcagtgagtccggatcatgccactggacatgagagtgtccagcctggacaatgagagtgaaactccgtctcaaaaaaaaaaaaaaaaaatcagctgggcatgatggtgcatgcctgtagtcccagctactcaggaggctgaggtgggaggattgcttgagcctgggaggttcaggctgtgattgagccactgcactccagcctgggcaacagagcaagactctgtctcaaaaaaaaaaaaaaaatagccagcccagcagctcacacctgtaatcccaggactttgggaggccaaggcgggtggatgacttgaggttaggagttcgagaccagcctggccaagatgatgaaacccccatatttactaaaaatacaaaattagctgggcgtggtggtgggcacctgtaatcccagctacttgggaggctgaggcagaagaatcgcttgaacctgggaggtggaggttgcagtgagctgagatcgtgccactgcactccagcctggctgacagagcaagactctgtctcaaaaaaacaaacaaacaaaaaaacaaaaaaaaatgggccaggcgcagtggctcacacctgttatcccagcactttgggaggctgagacgggcggatcatgagatcaggagatcaagaacatcctggctaacacagtgaaaccccatctctactaaaaatacaaaaaaattagctgggcgtggtggcgcgtgcctgtagtcccagctactcgggaggctgaggcaggagaattgcttgaacccgggaggcggaggttgcagtgagccgagatcaggccactgaactccagcctgggcaacagagcgagactccgtctcaaaaaaaaaaagaaagaaagaaagaacaaagctagaggaccaacacacaaccagatgtcaagtctgactataaagctatagttaataagacagcgtagttagacaaacccactgaaggactagaatagggtatgatattcagaagtagactcccatatatttatatggttacctatttatttatttatttatttttgagacagtctctgtcgcccaggctggagtgcagtggtaggatgtcggctcattgcaaactctgcctcccaggttgaagtgattctcctgcctcagcctcccaagtagctaggattacaggcgcccacaccacgcccagctaatttttgtatttttagtagcgatggggtttcaccatgttggccaggctggcctcgaacttctgacctcaagtgatctacccacctcggcctcccaaagtgctgggattacaggtgtgagccaccacgcccggccgtggttgcctatttatatataacagaggtaacgcggcagagtagcaatgaaaaagacaagatttttaattgaattggatagccacattaaaaaaaaaagtaaatcctgactccataaatttaacccagctgatttaagaccctgttgtggcctatcagctgtaaccctccttgcattttcccacctttgaatagcaaattcctttcctcaccccaggtcagaaagtctgctcagcagtagctgtggatggtaagaagacacgctggtaggtctcagtggctcccagaagccgcaccccctccaccgaacctcactcctcatctcccacgctccaaagcgaggagtcctcagaaagccagtttcccttatttattcttctttctttctttcctttttttttcttggatgtcctaccagtttccctatcttaaagtcgcaggttcggctcagaaactccagtgtccctcagcgtctcgccggcaccctctgccggcgtgaggtggcgctgcctggccgcatcctgggggagcgtccacatcctcggtcgacaaaaggagcgtcgacactctcggacctgggaaagtgacggcccaaacgccagggaggagccaggacctcgccctgagctagcgggaggtaacggcggggagtcctggggcggagaccgagcgctgggggcgtggtctccagcgggactgggcctctagcgggagtgggggcgggggcgggggcggggccagcctgggggcccagacgtggcgcagcgactcggaggttcgcctccagcttgcgcatcatctgcggccgggtcccgatgagcctcctgttgcctccgctggcgctgctgctgcttctcgcggcgcttgtggccccagccacagccgccactgcctaccggccggactggaaccgtctgagcggcctaacccgcgcccgggtagaggtgagtacgcc

SEQ ID NO: 28272 - DNA, 2300 bp, Homo sapien
agggcccagcagtggggtaacagactgacaagagagttacaaacaggcctgagaattgctacagccaggacccagcccaggacatggtccccaacaggcctacgggagtgtttgttgaatgaataaatgaattagaagagtgaatgggtgatgagggtcagattgggctgggatggctgtgggatctgtttctcatggcttagagaggagtgatcccacccactttaggcagaaagtgttcagagttgtgtgtgcagagctccctgttaaccaacatggagcatctgcatgggcctgtgcagtctcctacatgaaggcagatgcctcactttcctctcctgaaggcacttcctacctctgcttgactgtcagtaggtctagtctgtattctcaggccagcatctctgctggaatttgcaggggcagagactcaggccatattagagtgttggggtagaaaggtctttggacagcgatagtggagatggtgacagtggtgacggggaaggcgactgtggtgatggatgtgatgatgtatgtaactgtgatgatggaagtagggggctagcagtggttgtggtgaaggtggtggaggtgatggtgatggcaaaggtagaggtgatgatgataccaatactgatgatggtgttgtgtcaatgaaagaggtagtgttggagttggaggtgacagtcagggaggatgtgagagtagacctggtggtgatgctcaggttaccagaaaaaggaagattcgaactcatcctgtcttatcctctgtctcctgttttacaaataagaaaatgggagcccccgggctgggggagtactggcaaagtgcgggtaatcccagcactttgggaggctgaggtgggcagatcacctgaggtcaggagttcgagaccagcctggtcaacatggcgaaaccccatctccactaaaaatataaaaatgagccgggtgtggtggtacatgcctgtagtctcagcgacttgggaggctgagacaggagaattgtttgaacctgggaggtggaggtggaggttgcaatgagccaagatcgtaccactgcactccagcctgggtgacagagagaggccctgtctcaaaaaaaaaaaaaaaaagaaagaaagaaaagaaaaaagaaaaagaaaatgggagcccccaagactacccagcttttcatgcaatcctagagggaatgatgggcagatccaggcctctgggaccagtcctaaggctcagccatctagggctgggacaggggcatcagtgccctttggaagccaggcaaatgtcatgcaaatgtgtctgcagagggctcctctgcctcaggagggcaacccaggatttcccaccacccgctccctgagctcagaccctgcaggggactttgtttctggccctgccactgacttacttgaggaggtcactctgattcccaatttgtgtaagggagattaaaacagcagacacctcctaagtttgctggtgaagattcaacaggataatatatatgaaatgtttagcatagagcctgcctggcacagcaagctctccataaaggtggctgctctgtatttatcatcatcatcatcaccaccattgacttcagcctgcccatgtggtggatgctgaaacaggctgagggtggttactctcctgggaggacaaggaaggggctctgagacccaagcctggtcttgtcaggagaagggggtagggggcggaccccagctgaaaagggagtgagttggagctatatttgagctcctggtgtgatgactaaggaggttgataacaggctctggggctcagggcggcaggctgggggcagctgtcagggagaaccgcccccctggagacggctgtctctggaggccctttctggctccctccttgccctcactcttggtgggggaggggggtgggcgtactgaggcagggtccagggctcatccagcccactcctggaaactcagtgctgtccttcaggctgtgtgggtcagggataggaaggcaggatgccagtgatagatggagtatcccagttactctccatagtaaccctgtgaggttggtaatgaggcccccattggacagaggaagaaaccgaggcccagggattacacagccagtagagagaggacagagcatggagctcctggagaggcagtggataattcttcccgacagaggagctgactgttgaaccccttctttgaaggagagtccgtgctgccaaatcgaagaagagaaacgccctggctggaaagcagagagaacagcaggtacaaagcatgg

SEQ ID NO: 28273 - DNA, 2300 bp, Homo sapien
catttgcatgacatttgcctggcttccaaagggcactgatgcccctgtcccagccctagatggctgagccttaggactggtcccagaggcctggatctgcccatcattccctctaggattgcatgaaaagctgggtagtcttgggggctcccattttctttttcttttttcttttctttctttctttttttttttttttttgagacagggcctctctctgtcacccaggctggagtgcagtggtacgatcttggctcattgcaacctccacctccacctcccaggttcaaacaattctcctgtctcagcctcccaagtcgctgagactacaggcatgtaccaccacacccggctcatttttatatttttagtggagatggggtttcgccatgttgaccaggctggtctcgaactcctgacctcaggtgatctgcccacctcagcctcccaaagtgctgggattacccgcactttgccagtactcccccagcccgggggctcccattttcttatttgtaaaacaggagacagaggataagacaggatgagttcgaatcttcctttttctggtaacctgagcatcaccaccaggtctactctcacatcctccctgactgtcacctccaactccaacactacctctttcattgacacaacaccatcatcagtattggtatcatcatcacctctacctttgccatcaccatcacctccaccaccttcaccacaaccactgctagccccctacttccatcatcacagttacatacatcatcacatccatcaccacagtcgccttccccgtcaccactgtcaccatctccactatcgctgtccaaagacctttctaccccaacactctaatatggcctgagtctctgcccctgcaaattccagcagagatgctggcctgagaatacagactagacctactgacagtcaagcagaggtaggaagtgccttcaggagaggaaagtgaggcatctgccttcatgtaggagactgcacaggcccatgcagatgctccatgttggttaacagggagctctgcacacacaactctgaacactttctgcctaaagtgggtgggatcactcctctctaagccatgagaaacagatcccacagccatcccagcccaatctgaccctcatcacccattcactcttctaattcatttattcattcaacaaacactcccgtaggcctgttggggaccatgtcctgggctgggtcctggctgtagcaattctcaggcctgtttgtaactctcttgtcagtctgttaccccactgctgggcccttctccacccaagttcccttcccccagatagctcgaagggcttgtgctcatcctaggtcactaagttttctcactgaaacacaggagaccttctcagttcaccaggtgaccttgagcaagttcccctcccaaaccacacccagtgaatactggagagaagaaagctgacagaagccgggctgggttaggcctggctgtggggacatctgagggcagctaggtgtctgcagaagaggaggggctggtgctgaggcctgagatgggaaaagactgcagtggctggagcctgagtgtctggttctgggttgggaagaatagagcctgggactggcagtaggagtggagagggtggcaccaagacctgaaaatggggcaagggtgggggccggggcaagctctgagctggcagggagccaggaaggtcacaggatcagggcaagaactcagttgtctctgaggccctggagagggtgcagacctctgaaccacctgtcctaccttaaggcaggtgtgttaatgcccctccctggagcaaagggctgaccaggcctacggcagaaaggtgaaggtagacagacagcctccttcctgctgccagttgggacctgggccaggcagatgggtacactctcccctccccactccatggctgttccagcctcagcagccagtttgaaggattcccagggggtagccaccttgcttcggcctcttccaggctgggaagtgggagcctgtgcctttaaattctcagcaggttgaaatggctgatgacatcactggttcccgggagcggtagagctggagccggagccaagggagtccaggctgccgggggctgcagacatggagggccagagcagcaggggcagcaggaggccagggacccgggctggcctgggttccctgcccatgccccagggtgttgcccaaactggggcaccctccaaggtaagacccctgagacccagtgccccccgctttcctgatccctggt

SEQ ID NO: 28274 - DNA, 2300 bp, Homo sapien
atgcaccctgcctcacccagacaggtggagggccagagaaaagcctcagaccctcttccgtctgcaggacccaggccttcctgtctcgctggtttggcccctctgctccagggcctctgagggacaccctggtggaaggcaggactctgagcctgtcttgtggctgactgacttgtttttgggtggagtctggacagaaagctcagtgacaccctccctcgaggcctgggcaagccccagcctgatgttctttgagacccagactggaaaagacctcaaagttcaactccactgtacttctcactgtacagtgggggaaactgagtcccagaaagggacagggacaagcctggagtgacccaggcaggtagtgtcctggccactgttcccacagttgccatctagcccgagctctcagatatcacagatgctgtggccccaaaatcttgggacttgctttctcctgagtaaactgcttcctggccaggggtatcctgaggctttagtgatggtgttttgggtgccaggaactgtgctgggaatcttacccaacatcctgtggagtgactactgtgattatgcccatgatacagatgaggaaactaagactcagagaagttaagatttccaagcctagggtctgtgtggaaacctaagctggacctgtctgacctcgaaagcttggctcctcgtatcctacctcccagcctccccaggtgatgggcagggaagggctcagcaatgtggaaaagggggcagaggtgggtggcagttcctatgatgggaggaagtctcagcatgatgatttttcaaacatcacaactcttcacagaaggactcacctttgttcagctacatccttgcccttggggaccccaggtctacctcctctgccaccactcgctgtattccacaccccctttctcaacctctggcaagaaggcgcttggtccctggactagccctaccctctttcccttctcttcattgttcccagctatgatgctttgagccacaggcccaggctggttctgaagctacagagatggacctgcccaccctgcagcccccttccccctctgccacacagtgagctctccttccccagctctgcccctggctttacctcactggggctcatcccctggaagagactcagatggagcctggggcagggggaggctggagaagcagcaggctaatgggcagatggaagacagacaagtcactgtcctggccagccctgactcccatccagatccccaagcgctgcattcccatcctctaagccctccccagctggagcctgtcacctgaggttttcccaccctcactgagcctcagtttcttcatctgcactatgggtgtaagcaccctggcctcactagatggttggaagctgggctttgggatccaggaacaatacctgggtatagccccttcctgatggagagattcctgtctcatgaggcacacatgatgcctgctgtgtccccccaggtggccagggatggaggtggccacagacatacaccctgggccactctctgccactctagggaccatagttctttcaaatccagagcatcagccctgccctgtgtggctctcaaggcctgttcccgctgcgtctcccccagttatcagaccaggagggttgctgcaaggccaggcccatgcttggagtcctaggaagcggggagccctggggctctgtcccctgagtatgccgagagcctttctaagaaccaggacttggcaggggagcaccccaggtggcactccctttcccagaagccttgggaactcccagggtggtagcttcagagccccagcccttccttcacccagccctggcagaggcccatggccccctgccagcctgatggaggtggatgtggcagccaccgctgtggtaagggtgagaagggtgggttctaagggactcctccaagctcctgaacccttttccttcccttcaaggagatgtgaaagccccagcctggtccccatcccacagcttagggctttggctcccatagtcccaatctaggcagggctggcagcaggtgactggatggtgctgagaaggcaggcagaatgggggcgtgggccctggcaagtgcactcctcagccaatcagcgtcctgcccggctggtggattcggttacaagcccaagatcaccccatactccagcctctttcctcctcctcccgcagctccattcattggtcccgccgcaccgggcctgctgggctccgcttccgttccactgctcagctgccgcctggtggggcc

SEQ ID NO: 28275 - DNA, 2300 bp, Homo sapien
tagttcgaacaatgctcatgttttgtctgggtttagacatgattcaagtggttttgttattgtcttgatccatcatggtcacatagtggctttgtttgatgttgatgttctgtgaagtttttatgttcaataagagaacacaccaaggtctatttgtgagtgccagaccatctcctggatgtcaggggctgtttttctcttagcgcttggtttcaaatccaggtttgtgtgactggaaacatcccttgtattacttcttgatcacaggaacttgcaaaggtggctggcagactaggactttcatctatgagcttatttcatctactattttttatttttttttctgagatggagtttcactcttgtcgcccaggctggagtgcaatggcacgatcttggctcactataacctctgtctcctgggttcaggcaattctccagcctcagcctcccaagtagccgggattacaggtgcccgccaccacgcctggctaatttttgtatttttagtagagatgagtttcaccatgttggccaggctggtctcgaactcctaacctcaggtgatctgcctgcctcgacctcccaaagtgctggtattataggcgtgagccaccgcgccggcctttatctactatgttcacctcctactcaggtccgatccctaaccgttcctgggataactgtaggtacttaataaatgcttgttgaatgaatgaagatggctgtcaagaactccaatgactgcttgagtgcaaatcacaagctccatcacctatcagtatgtgatttgatacaatatgtattaacagctaatccacaatccatattcaaatttcattacttgtcccaatattgtccattacaactattccaccaccaccactaccccagtccagggtcctatttagaatcacacaccacattttgttgtcatgcttctttagtctcctttaaactggaacagttcctcagcttttctctgtttttcatgacaatgagttattttgtagacagtgtccttcatttggggttctctagcacttcctcatgagatgtgtacggtgcacttttgacagaaataccacagatgtgttctcagtgcattttattaggaggcccttgatctgacccattaactagtggtgttaactttgatcactttgatctgtttgttctgctaggttaaacctctgtaacatcaccattttccctttgtaatcaatagctaatttatgggagacacttttgctgttgtaaacatcccgtttctctagttttaccacacattattgatttcctaattccaccatgtttattagctagcattctactaaaaggaagactttcccttcacccattaatatgctcacttctttatgtttgtaaagactcatggattactattttattcaattagttatactctattactatcactccatattttgattctgaaattgccctgacttggccagtaagatctccttaaagacagctcctgtgttctttgacacattcccatgattcttattaccatcatccttatattctggtgtaacaagatgttccaagtttatctggtactttccggaatgagttagttctttctctctctcttttttttttttttttttgacggagtctcactctgacgcccaggctagagtgcagtggtgcgatctcagctcactgcaacctccgcctcccgggttcaagcgattatcctgcctcagcctcccgagtagctgggattacaggtgtgcgccaccacgaccggctactttttgtattttgagtacagaggggtttcaccattttggccaggctggtctcgaactcctgacctcaagtgatccatccgccgcggcctcccaaactgctggaattacaggtgggagccaccgcgcccggccggaatcagtttttttcttttaggagccccgaacccaaagctctttgaaaagctgccgaagctccaaggttcctccgcttcctgcccgcaggcggaaccttagagcttcagccatggaaattaacctcttccggttggggccggaagtccctccgagaggggcggctccgcgtcatgtgactggagtccgcgtaggaggggtcggaggtcttacccaacagattgacgcggcgttagtattggccgtgtacccgaaaaactgattgactgggctggcgttaactgtgcggaggcaggtatgtgaggggctggggttggggcgggggcgccaaagtttagggacgggggcgggagacccgggtccgccttcccaggacacacgggc

SEQ ID NO: 28276 - DNA, 2300 bp, Homo sapien
ctcttttcagaggaattacttgtagctctggcatgttgggaaggctgaggctgggccagatttgtaacctcagcaacatcttccatctcacactacaccctgctactaaggaaccttagggagggacacaccttctgctcgagagagaggacttggctgacagcccacctgccctgttactaaacagatggagagacgctgacagtgagtaacctgattgttctaaaggctctgataagtgacaagctaagctctattgtggcagcttgtcacttacgaagctcaggaatgccatgtacttgtcaggactggggctgcctgtcagacaggttttatattgggcaaggctgtgtatgaagccaggcctccagcctacatttatcatctctaattatcaatagtcgtttaaagactttctttccttttttttaagagacagtctcgctttgtcacccaggctggagttcagtggcatgatcatagctcaatgcagccttgaaactcagggctcaagcaatcctcttgcctcagcctccagagtaactaggactacaggcataagtcatgcccagcttctttgaagactttcgttctcagtgtgacattacggaggatgcacaggagcctccaggagggcataccagtgtgactactccccacccactcgccctccacaacacagacaagaagtccaagctcatagtaatgtaaaaccatttgtttaattctaaatcaaatcactttcacaacagtgaaaattagtgactggttaaggtgtgccactgtacatatcatcattttctgactggggtcaggacctggtcctagtccacaagggtggcaggaggagggtggaggctaagaacacagaaaacacacaaaagaaaggaaagctgccttggcagaaggatgaggtggtgagcttgccgagggatggtgggaagggggctccctgttggggccgagccaggagtcccaagtcagctctcctgccttacttagctcctggcagagggtgagtggggacctacgaggttcaaaatcaaatggcatttggccagcctggctttactaacaggttcccagagtgcctctgttggctgagctctcctgggctcactccatttcattgaagagtccaaatgattcattttcctacccacaacttttcattattcttctggaaacccatttctgttgagtccatctgacttaagtcctctctccctccactagttggggccactgcactgaggggggtcccaccaattctctctagagaagagacactccagaggcccctgcaactttgcggatttccagaaggtgataaaaagagcactcttgagtgggtgcccaggaatgtttaaaatctatcaggcacactataaagctggtggtttcttcctaccaagtggattcggcatatgaaccacctactcaatactttatattttgtctgtttaaacactgaactctggtgttgacaggtacaaaggagaagagatggggactgtgaagaggggagggcttccctcatcttcctcaagatctttgtttccataaactatgcagtcataattgagaaaaagcaatagatggggcttcctaccatttgttggttattgctggggttagccaggagcagtgtggatggcaaagtaggagagaggcccagaggaaagcccatctccctccagctttggggtctccagaaagaggctggatttctgggatgaagcctagaaggcagagcaagaactgttccaccaggtgaacagtcctacctgcttggtaccatagtccctcaataagattcagaggaagaagcttatgaaactgaaaatcaaatcaaggtattgggaagaataatttcccctcgattccacaggagggaagaccacacaatatcattgtgctggggctccccaaggccctgccacctggctttacaaatcatcaggggttgcctgcttggcagtcacatgcttccctggttttagcacacatacaaggagttttcagggaactctatcaagccataccaaaatcagggtcacatgtgggtttcccctttccttgcctcttcataaaagacaacttggcttctgaggatggtggtcttttgcatgcagttgggctgacctgacaaagcccccagtttcctgtggcaggttctgggagaggatgcattcaagcttctgcagcctaggggacagggctgcttgttcagttattactgcctcggagctccaaatcccaccaaagtcctgactccaggtctttcctaatgcacagta

SEQ ID NO: 28277 - DNA, 2300 bp, Homo sapien
ttgagttgtttttcaaggtccaggtttcaggatcctaggctcagagagttgactgtgaggcggctggcaggatctggccctagggactgaccaagctatggccagtgaaacaaactgtggacaggtaacctgggtgctattgaaactcagttggtctactccctgcccaggctttctctaccctccagaagtcccccttgagttcacaagtgatttctggaatgttctttgggtccatattaaaaatatatctcttggctatagcatttctatagaaagctattcccttccattacattttcaacttgtgtttctcagagtcgcctgaacttccctgggaggaacttgggggacttggctattccccagctccctgctggtgaagaccatgaggctggaggtaggaggaagtggaatgtgagagagaatgaggagggagaagagatagacctgggtgccttggtgtggaacggagggagagggaagacacccaggaggttttggttcccaggatgccagtgctttgttgcctgggaaaatacagtgttacatctttctgtaggaaggatggggaaagtccctgtcccctgtttgctagccatgaggcagcttgtcaggagagtctctggattcctgtcactttaattcaatacacaatcttgtgtttactataatgatttcctcagaaactacaaaactgagtactgaaaagagttcccaggaattaacggaaatgggacagagccctcctccccagcactttgtgcacactcaggacatcgtgagccacctgccacacccagaagagaaaaatctgaccggcatccggtttgaattagagcaggaaggaagagaattgtgctcgcctttgtctttgcctttgcctttgcttacccaactgctgggaccagaggcagctgggttgaactttgtctttggtcaggggtgggggtggaggggacagaatccatttccctgggctccatcctctttctggtcatttggacatgtttcctgtgatctaaatctgatgtaaggaaatgacaattgtgaaagacccagcgtgagagaatctgatgggagggtgggtcatcagggaccagctggcctggctgatgatgtattaatatcttaatcacacagaggaccccaatctccttccaaacctaatgagcggaagtggttctcaaagctactcagccagctagcagctgccataacccagtcagctgtcctaactcttagtcctgtaatccctcctcctcatagaagattgtaaactggcagcccacagggcaaatctagtggccaggtgtgtttcatttggtctacatggcattttaagaactttttgatgctatcaacattttttaaaagtggcaaatttcacctaaatatctggatttttggcatgttttgaaaggttggaagacctgggaatggtaggcccatgttcctgcaggggagtgctcgtcttccaatgcggcgcacaagctccagcgtcctgcgctaaacctaattggcctggctgaggatctgctcctggaatgctggttggtcgcctccaactgtctttgacttagagattatttactgtcagcttactcatagtggcgcagagaagtggtttctctgagctagaagcttctaagaaaagtccatcctcaaagctgtttgtgggatagacctggctcctccattgtaatattcctgattccaaacactactggaaagagctctgaactggcagttagcaggcctgggctcccatcccggctctcctcctaatgagcgacgccatttcaatgtagtcgaacttagcctctgatccttaactttccctatctgtaaatgagggcgactagatgggtgcggactgtcatccgtgttgagacttccggcccccgcagaatcaaccttaccggcgggagcacctcgaggggacgccgctcgcactagggggcgccagggccgctgcagagcccgagccagagccagggggcggggccgcgtctcgggagcgaggcctgagagcggcggggcggggcgtcggcgggcagtcccctgtgccaggtgtggtttggtcctcccagggcgccgtaggcggtgcatcccgttcgcgcctggggctgtggtcttcccgcgcctgaggcggcggcggcaggagctgaggggagttgtagggaactgaggggagctgctgtgtcccccgcctcctcctccccatttccgcgctcccgggaccatgtccgcgctggcgggtaaggaagggctgctccgccctgtcccgctgttatctc

SEQ ID NO: 28278 - DNA, 2300 bp, Homo sapien
tacaatgaaccatgtttataccactgcactttagccagggcaacagtgtgagactgaatctcaaaagaaaaaaaaaaaaaagaaaaaaatctttccataagtaaatatctgttggaacatagccatgtcccttagtttatgttttatatatggctgcttttgccctataatgacacaattgagtggccacgacagtctgtatggcctgcagagcctaagatatttgctctctggccctttacagaaaaagtgccttgacctgtgctctagagccatatgtaccaggtttgaaactcagcctcacagctgggtgtgatggcacgcatctgtagtcccagctactctggaggctgaggtgagaggatcacttgagtccagaaggtcgaggtcaagattgtagtgagccatgatggcatcaccgcactccagcctgagtgacagagagagaccctgactcaaaaaaaaaaaaacaaaaaaaaaaaacaccctcaccacttatcagctatttgtcttgagaatagtgacataacccctcagaacctatttcctaatctgttaaatgaggctgatgacgtttcctccttttactggcaatttaaacatgatggataataaatgctaagcacttaacacagggcctagaagatattaactgctcaataaatggtagcttcttaacagtattcaaacccatgtgctcttatcacatgcattgttgtccctgtgtccagttggtggaatgggaaaaggctcccttgtaaccccatctaccatctttatcagactttcctgccatggttcacagtaagagatagaagctgcacggtgacttctggctctttacaatggtgagcggtgtgtgcctggtaagggagagctgatgtcactgccccaaatccagtagtgagatctgagtgttctggtttcctccagcagccttgctttttcctttacaatcctgcaggcagggagacaagggctttctacatggtaggctctggtttggtcatcgtcacaactgggggctgttcaggtgggctcccattccagatacctaggcttatcaatcccttttggcaccccaggcctttttctccctcatgccccatttttcagtttgaaaagcatggttatcacaggacaagtagaagaagctccactgtccactgaggccaatggatggtgttctgcatgtgaacactcagtgaatagtgagtgaatgagagtaacctgggctccatcctatttgcagagagctttggaaaagatttttctccttaaagagccagaatgaagcctggtagtgggagagctccagctctagagtcacatgagcctacatttaaattccagccctgccactgactccctttttgaccttgagtgagttacctaatctctctgtacctcacttttcttgtctgtagagtgggaataattcctgtctcagagaaataaaagagtgcatatagtgtttgccacatggagacacatcaggtgtaggttaatactctgggccttgtttccttatttgcaacacagccctgccctggagtggaagtggcacctcccattggtcagctcttgaggctgtccccaggacaggcagagggagggaatgaatgggagccctagtgccaggacagaacagatggcagctcagagctaggatggctctctggacctgtctctcctaccagaggtccccccgtctggtgtggctcttcctggacctggcatcctctgctttttttttttttccacctccaagcagaattactgtcctgtaggcagctcctctgcttgaggacatctggggccagatatgttcacactctatcctgccttgcccttccctgagctcaggatggacgctcaattggtcccagttattgtctgcagcgcctgcctgcagcctcgatccagcccagctccaccccttgcctgcaaggtctgtttcctaacagctgctccaaccacacacctcggttctgcgggagcccctcctcttcctccctccctccctcattcaggggtgggactgaagaagaaggctaacttgacagcagcgcttctttcttagctagtcaccggcccctgctcaagaatgccagtgtgtgtgtagcctccacagagaggtcgttttctcggagtccagaggggccgcctgagcttctgagaactagggaggagccatcccagccatgagcccctgtgggaatctgctgggggccaagtggcctggagtcctcaggctcccgcagctgctccggagggagaggtgagctcagggcagcctg

SEQ ID NO: 28279 - DNA, 2300 bp, Homo sapien
tactccactccccaccagaaactcttattttttcccccctatgtggtcatgaattcctcctgggtgcatagctccctaagttgttctgtgttttagtgcttataatttcccacatcccatgatgccccttgatagaattattttttctgtactcacacaaatggaaacagaagagatgaaaaaccctggggatgcggcctcgcaggtctcaaactgatcggctgctaagcacaacctgcatatctcttggctgagttcctttcttggctcagttagattttgcatgacctaggaggcttaggacccagggggcgcctttcagctgaaaaacagctcgcgctgcagcaagctagctgggaagctcccagttctaaagagaggctgtttaccagaacagcataacaagggcaggtctgactgcaaggctgggactgggaggcagagccgccgccaagggggcctcggttaaacactggtcgttcaatcacctgcaagacgaaggaggcaaggatgctgttggcctgggtacaagcattcctcgtcagcaacatgctcctagcagaagcctatggatctggaggtgagattacaatctttcctttccgcagcaacttcatgaaacagaaggggtaaagccccctatttcccaaacagggccaggatgacaggaaacgaagcgtttagccggtttctgttgtcccgtgaaagcttttccacccctcctttccttgtcaggggcttgcagctccatctttgccattaagaacaaaggcaagaagccactttctctctgcctttccttgctcatgagtggatggagcttgggggttcatctcccctactccccaagtcctgttctttctaagccctttgcatggtgtggtcctccttccccagcctccttctgtggttctcctgcagaggggagtgggagcttggagtctcatccagtcagcgatgaggccggtttcctccgtttgaggctgtcttgaatcttttgcctgacggagtcaaggctcctggagaattctcctgggagggagtatttgccttttaaacgggcagaaggtggccgtatccgtgaaggaggaaacaccggagtttatgtaacgtggccattacaacacagggacaaatgtcacgtctgggcgccccccgtcccaaaactcccagctcctcaaagggaccctaagccaggcctcctcctctccatctcctcctccaaagtggtcacaagttcaagagtaacaacgctttgcacttctgcagcgctttccaggtttcaaaaataaataaaacctaacagtctctgagcgttgactgggggacaggcacaggctgggggcttcacaccctgaggtgtgcgtggagttggggggggggggtgcgtggggcgtgggggtgttgccacgagaggagagggaggcccagcagggcccggggtcccctaaccaggctgaggttcagcccgggtggtcccggctcccctgtccgccacgctgggcgtcttccgttcgctgcccgctattctgtgtccgggggcttcttttcctcacaggctgtttctgggacaacggccacctgtaccgggaggaccagacctcccccgcgccgggcctccgctgcctcaactggctggacgcgcagagcgggctggcctcggcccccgtgtcgggtaagtgtcctccgggggacggccccggggctggcgggcggcggccgcgttcccggtgccagccccggcacacatttccttctctcctctcttaggggccggcaatcacagttactgccgaaacccggacgaggacccgcgcgggccctggtgctacgtcagtggcgaggccggcgtccctgagaaacggccttgcgaggacctgcgctgtccaggtacctgcccgggaccccgggaatccccgctcctggcgctgacaggaagcggctgagacactcgtggcgcacgtgcggccgcgcgatgccggccggccccgctccgcctccgcgccgtccgattggccagggctgtctccaggccgcggggctcaaagcctattggccgccgccgccactcgtatgagctcatccgccgcgagcgcttgtaaacaactgcgcggggcgaggctggggtgaggctaggtctctccgccgcgcgtcctgaggagtggcttttggcccctcagcgtttattgaccgtttgcggagcgtctgcagtgtgctagacccacactgctcacaaccccagctccccaacctcccctgacacacaccgcgggaagaagtcgtttgaggcatctgagctt

SEQ ID NO: 28280 - DNA, 2300 bp, Homo sapien
ccaccttggcctcccaagtgctgggatttacaagtgtgagccactatacctggccaaattttaaaatgctaccgtatctgtgtatgaatatgtgtgaataaatttacagactctagggtgtaattcacagggtagaccaagtcaagagtcagaggatcagaagcttgggtggggagataggagagtgattgcaaaaacaaagcaatctatcttattaaatggacgaaagggatcaaacattatcagtaaactattttaaagagtgaattaaatgtatctctctatcctttctatgagtgtagtgaattcagattcacctcagattagttgaattgacactagttttcttccctgataaagcttttaaaatttatttagtaaagtggccaggcatggtggctcacacctgtaatcccagaactttgggaggccaaggtgggtggatcacctgaggtcaggagtttgagaccagcctggccaacatggtgaaaccccatctctactaaaaaaatacaaaaaaaaatttagccaggcgtggtggcgcacacctttaatcccagctacttgggaggctgaggcaggagaattgcttgaacctgggaggtggaggttgcagtaagccgagatggtgccactgcactccagcctgggagacagagactctgtcccccccacccaaaaaaaaattagttgttttcctccttaaattacagcctgcaagattgaaacagagtttccccatttctattttgggatctgactgagtcacaaggtagtcttgacgaatcactctgctctatctctcagtttactgaggctgcctgggaacttgagctgtcagccaaacaggaagaagggcccttctgcctactccaaaaggcctcagtcaaatggatatggtgagatttaatgatggatataaattacagcaaatggatttcctatagggtgagggaaaaaaaaaaaagcaaacattttacttaaattcctctatacaatttagggctggcagaaagggtagactattacaatgtagctgagcaaatttttccatgtttgcataacatgtgttttcaactaaagatactccttctatagtcctactatatacaacaccccaaaaaacctcaaatgtaagaaaaagcaatgtgacagatttgaccctggccaagttacactgtttttttttttttttttttttttttttttttttaagtgtcagtgttcataaaggccctttttctttttcaaggatgggtataaagtgttactcggccgaacgcggtggctcacacctgtaattccaacactttgggaggccgaggcaggtggattacgaggtcaggagttcaagaccagtctggccaacacagtgaaacccccgtctctattaaaaatacaaaaaattagctgggttgtggtggtgtgcccctgtcacaaggtagtcttgacgaatcactctgctctctctctcagtttactgaggctgcctgggagctgtcagccaaacaggaagaagggcccttctgcctaactccaaaaggcctaagtcaaatggatatggtgagatttaatgatggatataaattacagcaaatggatttcctatagagtgagggaaaaaaaaaatccagctactccggagactgaggcagaattgcgagaacccggcaggtggttgcagtgagccgagattgtgccattgcactccagcccgggcgacagtgtgaaactctgtctcaaaaagaaaagaaaagaaaaaaaaaaaaactattactccactccccaccagaaactcttattttttcccccctatgtggtcatgaattcctcctgggtgcatagctccctaagttgttctgtgttttagtgcttataatttcccacatcccatgatgccccttgatagaattattttttctgtactcacacaaatggaaacagaagagatgaaaaaccctggggatgcggcctcgcaggtctcaaactgatcggctgctaagcacaacctgcatatctcttggctgagttcctttcttggctcagttagattttgcatgacctaggaggcttaggacccagggggcgcctttcagctgaaaaacagctcgcgctgcagcaagctagctgggaagctcccagttctaaagagaggctgtttaccagaacagcataacaagggcaggtctgactgcaaggctgggactgggaggcagagccgccgccaagggggcctcggttaaacactggtcgttcaatcacctgcaagacgaaggaggcaaggatgctgttggcctggg

SEQ ID NO: 28281 - DNA, 2300 bp, Homo sapien
acgtctgctgcgccccgcttctcgctgctgaggggaagggagggggcgggcaggtgcagcggccgggctagtgggagggggcggcggccatggagcgggtgaacgacgcttcgtgcggcccgtctggctgctacacataccaggtgagcagacacagcacggagatgctgcacaacctgaaccagcagcgcaaaaacggcgggcgcttctgcgacgtgctcttgcgggtaggcgacgagagcttcccagcgcaccgcgccgtgctggccgcctgcagcgagtactttgagtcggtgttcagcgcccagttgggcgacggcggagctgcggacgggggtccggctgatgtagggggcgcgacggcagcaccaggcggcggggccgggggcagccgggagctggagatgcacactatcagctccaaggtatttggggacattctggacttcgcctacacttcccgcatcgtggtgcgcttggagagctttcccgaactcatgacggccgccaagttcctgctgatgaggtcggttatcgagatctgccaggaagtcatcaaacagtccaacgtacagatcctggtaccccctgcccgcgccgatataatgctctttcgcccccctgggacctcggacttgggcttccctttggacatgaccaacggggcagccttggcagccaacagcaatggcatcgccggcagcatgcagccagaggaggaggcagctcgggcggctggtgcagccattgcaggccaagcctctttgcctgtgttacctggggtggaccgcttgcccatggtggctggacccctatccccccaactgctgacttccccattccccagtgtggcatccagtgcccctcccctgactggcaagcgaggccggggccgcccaaggaaggccaacctgctggactcaatgtttgggtccccagggggcctgagggaggcaggcatccttccatgcggtctatgtggtaaggtgttcactgatgccaaccggctccggcagcacgaggcccagcacggtgtcaccagcctccagctgggctacatcgaccttcctcctccgaggctgggtgagaatgggctacccatctctgaagaccccgacggcccccgaaagaggagccggaccaggaagcaggtggcttgtgagatctgcggcaagatcttccgtgatgtgtatcatcttaaccggcacaagctgtcccactctggggagaagccctactcctgccctgtgtgtgggttgcggttcaagagaaaagaccgcatgtcctaccatgtgcggtcccatgatgggtccgtgggcaagccttacatctgccagagctgtgggaaaggcttctccaggtgaggaaaggccccctcttcctcccctgccacacgttatcttagtcctgaaaaggctcctgccaagatctgggggtgtgggatttgtgggggtcatttgaccttatagaaccatgccaggtttgggtagagtgtttttaagggcccttattttgagatggtatgcctgagacctgctttccattccctcagggaagtttttttgacgctaagtgtgccctactgtctctcctcctggggccggattcctcaggccagagccaccggacctcaccattcttcccccagggctccctttgtgtttccggcaccaggcgtggggccccctctgggggcgggagactgggctcctccagcgacttccccgcttgaatggctgccgagggaggtactggaacaagtgcatctgggactccctacactcttgaggcaccagattccccaacacagaacactggccatcctgatcagtagactccagctgtgcctctcacaccaccctgggatcatgggacacagagctggtcacccagagctgctgcttaacaccaaaagctttgatctgctctgacctggtagctctagagcctaatgggacccacgagcccctttatgttttcaggacagaaaggaatggggacaggatctctatgtaggttcactttctagttagcctgttggggaactgaggacttgtctgggagcagagggtgattttgtttttctcctaaaaggccggttttaacctggattgtaggaccttgtgtgtgtgaacacagggatggagaactccctcagagggccccgaccaggaaccagtcttaccggtcaggcagcccctgcccacctgctcaggcgggcatctggcttaccagcccagctggggacttaaggctccactgctggcctctggggactgaattccatccgggtggcattc

SEQ ID NO: 28282 - DNA, 2300 bp, Homo sapien
tgccggagccggttggcatcagtgaacaccttaccacatagaccgcatggaaggatgcctgcctccctcaggccccctggggacccaaacattgagtccagcaggttggccttccttgggcggccccggcctcgcttgccagtcaggggaggggcactggatgccacactggggaatggggaagtcagcagttggggggataggggtccagccaccatgggcaagcggtccaccccaggtaacacaggcaaagaggcttggcctgcaatggctgcaccagccgcccgagctgcctcctcctctggctgcatgctgccggcgatgccattgctgttggctgccaaggctgccccgttggtcatgtccaaagggaagcccaagtccgaggtcccaggggggcgaaagagcattatatcggcgcgggcagggggtaccaggatctgtacgttggactgtttgatgacttcctggcagatctcgataaccgacctcatcagcaggaacttggcggccgtcatgagttcgggaaagctctccaagcgcaccacgatgcgggaagtgtaggcgaagtccagaatgtccccaaataccttggagctgatagtgtgcatctccagctcccggctgcccccggccccgccgcctggtgctgccgtcgcgccccctacatcagccggacccccgtccgcagctccgccgtcgcccaactgggcgctgaacaccgactcaaagtactcgctgcaggcggccagcacggcgcggtgcgctgggaagctctcgtcgcctacccgcaagagcacgtcgcagaagcgcccgccgtttttgcgctgctggttcaggttgtgcagcatctccgtgctgtgtctgctcacctggtatgtgtagcagccagacgggccgcacgaagcgtcgttcacccgctccatggccgccgccccctcccactagcccggccgctgcacctgcccgccccctcccttcccctcagcagcgagaagcggggcgcagcagacgtgtccacactccccacacgtgccggcccgaggctctgtagtctcgcaggtgcgccgagtgtacacgcccccagcccggatcagactgtctagactgcggggtgcaccaccccccacatagccaacccccgccctcgctggactgcgcgccactctctcctctccgcccgcccgcctccccttcccggtctaccttccgggggggtgcgcgagcgaagaggtgcgcccctcctgcaaacgcgcctgccacctcccctcccgcccgccaggcggcgccggcgcgcagccaagaagggcacgcgcacgcggggaggagaaggaggggtccgccgcgcaggcgcgcgcgcgcgccgcggcttttcccgggcccgctgggggcgcgcgctgcgtcccctgcaaagcgcgagccggggcgggggcgccggagcggaggaaacaaaaggcgaaggcgaaggcggcggcggcggggcgcgcacgggggcggtggcgcgggccgggtcccggagcctggagggcggtggcggcggcggcggcggctggagcgggcgggcggcggcggcggcagagtaggcccttcctcaggccgggagaaggcggcggcggagcggcggctgtgcggccccgggctccgtgtgttcggagcggaggaaagatggcagcggctgcacttcctcttgcactttcacccctggggggaggagaaggagggggcgataccaacaacaccccccctctcgcttgcagaaaaaaaagaaacggcgagctcagagtgggggccccggcgtccccggccttgcacgtgcgcgcccggatgcctagcccgggccgcctggcgctgcaaactttacactttctttgtgccgagcgcccccccctcaccaagacgaggatgcacgtccccccttccctatttatacaccccccccccgcagtccgctccccccgcttcctgccccccctccccattccccagatccgccaatgctagagcagcctgagcccccgtccggcccccgcctccccaccccgcccgcggggccgggggctgcagtctcagcccccccggaccaatgcaaacgaagcgccgagccagcaaaccagctcccactgcccctcccctgcccgctgagagtggcggctagcagggtgggggggcaggaactgaggggtgcggatccgggccccccagcctgcgaagcgcactcgcaggtcgagcgggcgtcgtccacccttcggagccccgctttcatgcgtgaaattcccagaagtcgcctgcgaccgcctccc

SEQ ID NO: 28283 - DNA, 2300 bp, Homo sapien
tctctccaacaggagtttggcatgtactatgccctagagcggaggtgtgcaggacaggtgctgctgtccctgtgcacaggttaagaaacagtttaactgaatctcagggaggccaagtgactaagcaccaggacacgaaaccagaaggcagaggtctcgattttgaactcggatcatccgccagggcaacgcccggaagcctcagggcgcgcgtggctgggcgcgagctcggcgcgcagcggtgggaatcccgagcggagttggaagccgggcccgttcatttgcatgctaatacccagaatgcttttcccccgcacaccgcttctcttaatggaagcgctcagtttggaaccgtggaaagtttggaacacatacttcgctgcctctttgcaactgtgggaacttcccgcccgcacacgcggcgcctgcagcctggggctccgcgccaggcggcccaaaggcagccgccagcgcttcctgggaagacaaaccttggtgtacaactctagcgtggtagcatccccgggcgggccggggacaaagcgccgaggcctggcggcagggcccattaccagagcacccggcgtctcacagggctgcgggcgctggggatgctccgggcttggagaggcctgagggtgtccccgactcctccggcacccccacttccctgaggattgctggggcttccgggggtccctgccccgtccatcgccctcatattgtcgcctcccggagctggtgacttcacgctccccggggacaaagctcggcgtgctgtggtttgggggagaagctggacgctggcttcatctctccagctcttccgggcgcgcagcccatcagatcgatcaatgtaccgggtgcagaagcagctccggaggttcggcctgtctccggccaggaccccgggccctctctggtgtttgaagcagggaggcggtcgcaggcgacttctgggaatttcacgcatgaaagcggggctccgaagggtggacgacgcccgctcgacctgcgagtgcgcttcgcaggctggggggcccggatccgcacccctcagttcctgcccccccaccctgctagccgccactctcagcgggcaggggaggggcagtgggagctggtttgctggctcggcgcttcgtttgcattggtccgggggggctgagactgcagcccccggccccgcgggcggggtggggaggcgggggccggacgggggctcaggctgctctagcattggcggatctggggaatggggagggggggcaggaagcggggggagcggactgcggggggggggtgtataaatagggaaggggggacgtgcatcctcgtcttggtgaggggggggcgctcggcacaaagaaagtgtaaagtttgcagcgccaggcggcccgggctaggcatccgggcgcgcacgtgcaaggccggggacgccggggcccccactctgagctcgccgtttcttttttttctgcaagcgagagggggggtgttgttggtatcgccccctccttctcctccccccaggggtgaaagtgcaagaggaagtgcagccgctgccatctttcctccgctccgaacacacggagcccggggccgcacagccgccgctccgccgccgccttctcccggcctgaggaagggcctactctgccgccgccgccgcccgcccgctccagccgccgccgccgccgccaccgccctccaggctccgggacccggcccgcgccaccgcccccgtgcgcgccccgccgccgccgccttcgccttcgccttttgtttcctccgctccggcgcccccgccccggctcgcgctttgcaggggacgcagcgcgcgcccccagcgggcccgggaaaagccgcggcgcgcgcgcgcgcctgcgcggcggacccctccttctcctccccgcgtgcgcgtgcccttcttggctgcgcgccggcgccgcctggcgggcgggaggggaggtggcaggcgcgtttgcaggaggggcgcacctcttcgctcgcgcacccccccggaaggtagaccgggaaggggaggcgggcgggcggagaggagagagtggcgcgcagtccagcgagggcgggggttggctatgtggggggtggtgcaccccgcagtctagacagtctgatccgggctgggggcgtgtacactcggcgcacctgcgagactacagagcctcgggccggcacgtgtggggagtgtggacacgtctgctgcgccccgcttctcgctgctgaggggaagggagggggcgggcaggtgcagcggccgggctagtgggaggggg

SEQ ID NO: 28284 - DNA, 2300 bp, Homo sapien
caacctccgcctcccaggttcaagcgattctcctgcctcagcctctctagtagctgagattacaggcatgtgccaccacgcccggctaattttgtatttttagtagagacggggtttctccatgttggtcaggctggtctagaactcccgacctcaggtgatccgcctgcctcgacctcccaaagtgctgggattacaggcatgagccactgcgcccggcctagttttgtatttttagtagagatggggtttctccgtgttggtcagactggtctcgaactcccgacctcaggtgatccgcccgcctcagcctcccaaagtgctgggataacaggcgtgagccaccgcgcccggcccctttctctttctctgtggatgttcccagcagctctctcaaaaataaaacgtgccagttcccaaaatccgcccaagaaagctgtggctcagagagggaggcactagcctaaggtgacagtgagtctgggcttagaacacagatctcctggcttcgtgtccagggaactttcttcatgcctctaattcattctctccaacaggagtttggcatgtactatgccctagagcggaggtgtgcaggacaggtgctgctgtccctgtgcacaggttaagaaacagtttaactgaatctcagggaggccaagtgactaagcaccaggacacgaaaccagaaggcagaggtctcgattttgaactcggatcatccgccagggcaacgcccggaagcctcagggcgcgcgtggctgggcgcgagctcggcgcgcagcggtgggaatcccgagcggagttggaagccgggcccgttcatttgcatgctaatacccagaatgcttttcccccgcacaccgcttctcttaatggaagcgctcagtttggaaccgtggaaagtttggaacacatacttcgctgcctctttgcaactgtgggaacttcccgcccgcacacgcggcgcctgcagcctggggctccgcgccaggcggcccaaaggcagccgccagcgcttcctgggaagacaaaccttggtgtacaactctagcgtggtagcatccccgggcgggccggggacaaagcgccgaggcctggcggcagggcccattaccagagcacccggcgtctcacagggctgcgggcgctggggatgctccgggcttggagaggcctgagggtgtccccgactcctccggcacccccacttccctgaggattgctggggcttccgggggtccctgccccgtccatcgccctcatattgtcgcctcccggagctggtgacttcacgctccccggggacaaagctcggcgtgctgtggtttgggggagaagctggacgctggcttcatctctccagctcttccgggcgcgcagcccatcagatcgatcaatgtaccgggtgcagaagcagctccggaggttcggcctgtctccggccaggaccccgggccctctctggtgtttgaagcagggaggcggtcgcaggcgacttctgggaatttcacgcatgaaagcggggctccgaagggtggacgacgcccgctcgacctgcgagtgcgcttcgcaggctggggggcccggatccgcacccctcagttcctgcccccccaccctgctagccgccactctcagcgggcaggggaggggcagtgggagctggtttgctggctcggcgcttcgtttgcattggtccgggggggctgagactgcagcccccggccccgcgggcggggtggggaggcgggggccggacgggggctcaggctgctctagcattggcggatctggggaatggggagggggggcaggaagcggggggagcggactgcggggggggggtgtataaatagggaaggggggacgtgcatcctcgtcttggtgaggggggggcgctcggcacaaagaaagtgtaaagtttgcagcgccaggcggcccgggctaggcatccgggcgcgcacgtgcaaggccggggacgccggggcccccactctgagctcgccgtttcttttttttctgcaagcgagagggggggtgttgttggtatcgccccctccttctcctccccccaggggtgaaagtgcaagaggaagtgcagccgctgccatctttcctccgctccgaacacacggagcccggggccgcacagccgccgctccgccgccgccttctcccggcctgaggaagggcctactctgccgccgccgccgcccgcccgctccagccgccgccgccgccgccaccgccctccaggctccgggacccggcccgcgccaccgcccccgtgcgcgccc

SEQ ID NO: 28285 - DNA, 2300 bp, Homo sapien
gtgctgggattacaggggtgagccactgtgcccagccccagcctggatactttttttttttgagactgagtctccctctgtcgccaggctggagtgcagtggcacattcttggttcactgcaacctccgcctcccgggttcaagggattttcctgcctcagcttcctgagtagctgggactacaggtgcatgccatcatgcctggctaattttttgtatttttagtagacaccgggtttcaccgtattagccaggatggtctcgatctcctgacctcgtgatctgccacccacctcggcctcccaaagtgctgggattacaggcatgagccaccgcgcccggcctaaatacttgttatgtgcaggaacatatctgattcactctctactctgtccccagtgttgtcacagtgccaggcagcagttggagctctgtaaataacgattgcatgaacaggatggccacccaggactcgggaaaatgagtattactctttggtgcctattgacagttcagggccccaaggtgggtcccagggtgtctttgagcagtaagtgttaacttatctgcaggcctcatataatagatttgctaaggagcacctactcacagagcagtgatgcccttgatattgtcagccaattaattccttaagtacttcaagttaggataggcctgctgatttgattttatctgtcttttaagattgatctttgatcatgtcccattccagctggacctcctcatcttccctcctccattgctaatagtgtgggatctaattacctcatcatcccttaatttatttatgaaaaaggctgaggttaaagaaaagaaagaagaaactctctttggccctttggggaccttctgtaaaagctttcccttctgtttctccctctttatgcacaagaaaacctcccttttttgtctctgggaagttagaatagttcttgtttacaaatttaactaaattaaacttccctcccagggctgggtggaggccagccctgtgggttaagcctggcctgtcgactgtgggttaagcctggcctgtcgactcccgctggaataatcaatctatcaaaacaacccattgatcctgaggcaaaccgctttcaaaaccaccacatagttcctggacgtcctggcttcctcatgacacttggggaagaggagtcttttgaaattttaaattttattattacacaagtaatacatggatacattcgtcttgtaaaaatttaacttcaaaattctgtggaataaaatgtgaaaggccttttctttgcatcccatcccacagttaagagcttctgatgtatttttctgtttaggcctttaaactgcacgttcatacacgtacacctatataaatgtacatttaattttaaaaataacataaatggtatcactacgtaggtgcccttctgctagttgttttcccatttaacatgtcctgggtagccagtcagaccacagatctacgttttaacggctgtaatcatatttcaaaaacaggatagaggcattattcatttatccattttcctactgatgggtgttaatatagatttcaattttttggtattacaaactatgttgcaagcagcagttctctgggaattatccattcaagtatgcacttattttgggctccccatgtgctctactcggggttcggagtaaacaaaaccgacctaaaaataattttgaatgatagaaagggggcattttctttatccaagggggtgaggcaggctgaagatgggtctctactccctccaagaccatggagggcgtcggggtgtcaccccagctgtgaaaaagggacccaggacccgcagatgctggcgaggaacaggggtgcggagcatgagtcggctttgcaccacgccctggggtctccagcactgaagcgttcagtaccatgcagagcagctgggagcgggtcccgctgggcggggccgagctgcgcgcgaccctcggcgcgctcggggaggcccagacaggggtggcctctctggcctccgctcccgcgggctctatgacaccgcactggctcgcgggacggggcggggtcgggtgagggggaggagacagccccacgctttgcgactcgcggtgacccctacgcggaactctctcgcggtaattcgaagtaccgcgcctgcgtgctgcagtagcgcctggtggcggtggcagtttgcccgcgggtgtgtgaagggagacagtgtggaggccacagggtactcgccacgatgagcagcaccttagctaagatcgcggagatagaagca

SEQ ID NO: 28286 - DNA, 2300 bp, Homo sapien
aggctggagtgcagtggcgcgatcttggctcactgcaacctccgcctcccaggttcaagcgattctcctgcctcagcctcccaagtagctgggactataggtgcgcgctaccacgcccagctaatttttttgtatttttagtagagatggggtttcaccatgttggccaggatggtctcgatctcttgacctcatgatccgcccgcctgggcctcccaaatgctggaattacaggtgtgagccaccacgcctggcctaatttttgtatttttagtagagacagggtttcaccatattagccatgctggtctcgaactcctgacctcgtgatccgcccgcctcagcctcccaaagtgctggaattagaggcatgagccaccgtgcccggcctggaatatagattttttaaagaggttttgactcaatgataatataacaacaatatggccaccttttttactcttggtacatagttcttagtctctgtgaggcaggtctcggtgtcttattcaccagttttcatctctagcacaacatattcttaagtttggaggcccatggatataaattaccttcacatattccagtaaatcgggaggacatatcaattacagtttctggttagggaggaagattttcctggcatggctgaagagggaggccctaatttcttgtcagtacccactgatggtttcaggaaacccagcaaaaacaggtattctctaacagtctataagtgatattgtatctgtaagaatcagtctgaaattttcagggtatttctctatgaagattaaagacggatttttttttttttttttgaggcggagtttcgctcgttgcccaacctggagtgcaacggcatgatcttggctcactgcaacctccgcctcccgggttcaagccattcttctgcctcagcctcccgagtagttgggattacaggcacccgccaccatgcccagctaatttttgtatttttagtggagacggggtttcaccatgttggccaggcttttcttgaacgcctgatctcaggtgatccgcacccttcggcctcccaaagtggtgggattacaggcatgagcccctgcgcccggcccagagtatttctctataacaaatccatgctttcttttaattttaaactaggctctttatactaaacatgttttttgtctttgactttctgcaataagaggaaccacacaacttccagaagtctttaccggcttttatgttaaggcttcagtgtctcatgctgctagggaagataaagcttttgtaggtctatggttcttaagggtatgatactaaatctgagcagaagggtggcatccaggcaaatagggcagaagctaggttattatttacactgactgttctttttcccttccatgcagtgctctggtctggggtctctctgtgaaacacaatcctcagaaagtgggtaaagaccatacgttggaggatgaggatgtcattcaaattgtgaagaagtgaaacctttcccttttcccatctgccggacgaaccacaacagcgttccccatgatcaagcaccctaccccagttctttctggttttggcagtcactggatcaggatccaggggagggagatggaggcacccaaactggaacttcatttgtcttaccttggtgtcaccttgtatgtcgaactgcataaaagatctggtaggctggtcagctacatgcagctcatgtgtcattgtcagaatttgttttgggatgggctgaatgaggaagggtatatacggtgaagcagctacagaagggatccttgggaacttcatcttgagtgtgaaatggataaaaatatgacatgctgcatcttacttgatgtttacttatgggaaccccttccaaactagatatggctttcagtcctttcaagtagtctttcccacatgatactggagagaggaaggactttatgtaagttaattgatcactccccgcaaggctaacctattttgggagatcatgtaattaagtactccgaccaggcagatcagggtttgaaattgcaggtccacctctagttagctgtggagccctgaacaaattacccaacctttatgagcctcagtttcctcatgtaacatggggatagtaatagcacttactttctgcggtggtgattgttagtaatggagggagatggtacttatatgtcaaatactgtgctaagcaatttgtaagtactcaatgactcttggcttttgttgcaccgagccttttactgggctgtctgccctatgcagagcacagctgtaca

SEQ ID NO: 28287 - DNA, 2300 bp, Homo sapien
cttatatgtcaaatactgtgctaagcaatttgtaagtactcaatgactcttggcttttgttgcaccgagccttttactgggctgtctgccctatgcagagcacagctgtacatcatcagtgttgggttgaatgttgagctgaactatgttgccacctgggccactaaaatgcttttttctttttctttttctttttttttttttgagatggagtttcgctcttgctgcccaggctggagtgcaatggcatgatctcggctcaccgcaacctccgcctcccgggttcaagcgattctcctgtgtcagcctcctgattagctgggattacaggcaggtaccaccatgccccgctaattttgtatttttagtagagatggggtttctccatgttggtcaggctggtcttgaattcctgacctcaggtgatccgcctgcctcagcctcccagagtgctgggattacaggtgtgagccaccgtgcccggccaactaaatgccttctttcccataacccagactttctgcttgaatccccatgaaagtcctggcttcagccaataacttgggcgaaggtgcattgcaagtgaggcaactggtgtgatcaaagcaggtttgtgtgttcacatatgtgtatatatggaggtgggcggtttaggaggaggcttggtgtcaggactacttgagaggatgctaaggacataatcagatatttgggggactaggaatataggaatttaaggggattgctctgattatgtgaaactggttgatgaaaatcttggtgtggtgggtaacaatatggacggagggggctgggcccagtagctcacacctgtaatcccagcactttgggaggtcaaggcaggaagatcgcctgagctcaggagttcgagaccagcctggacaacatagcgaggcccaatctctacaaaaaaatttaaaaaattaggtgggcatggtggtgcatgcctgcagtcccagctgttcgggaggctgaggtgaggactgcttgagcctgggaggtccaggctgcagtgagctaagatgggccactgcactccagcctgggtgacagagtgagaccctgtctccaagaaataaaaattaaataattaaagaatatgggcagaagggagggtatggacatgtaagtatgggggagaaatcttaaacttgttaactaacttgctcttgggaagaagtcaaacattatttcagtatggatggagtagtccctgagaaaatcaggaagaataggtttgcagcaagacagaatttgattatttcttcaaatgaggcaagccagagcttttagcaggtcatgagtgatcacagtgtgggattattcacatactcagcctctctccagtgcttgtttctcctgctgccctaatagcagttgtttccctttgatagtcttcctggagcttgggcttgtcactgtccccagacctggaaggtaagctcctgaagcctggtatgctagttacttttcagaatatcggccttgataccactggtgcattcatgatagaggccgtggtctagagcctgccccaaccctgcaggggaacagggaaacattggctttctgagctacgggatttccaggaaggtttgttctccagccagaacatattgggtttctggggactcttcttgccaaaattcactttcattgagcaagcatttagcactgccagaatgttggggagagaaggttgctgaaatccagttcatcctaaggcctcaggatgttctgtgaataggctttgtgtccatcatttagcaccctccccatggcttggtccagggacccctggtctccttgaggagagaattaccctacctttccctttctcctctgggcttagacttagcagttctgggagaggggtatgtttggtattgggaatgctgcctagggtatggccactgtggaggtacagctaaaggctttctcctcattaactctaagactttactggtttggctgtcatagcatgatttgaatttcctgtgcttttacatattccatgtttctttcctgactttattacaagtaaacagatccattgttctgtgccatttaactagttagaacacgtttagctgcatttagcagaaagtgctaacttaagcggctgaaatggaagggaacttggtcttacctttttgggaagctgttttccagaagccacccagtttgttgtctcgtggcctaaaattgggtcacatgtctatttttgaatcaattgttggtaaagggaatagaattattgaagaaccagaatttaaccc

SEQ ID NO: 28288 - DNA, 2300 bp, Homo sapien
aaacaaatgtgtagcttattataaggcaaacttccttgttaactactcagagggcctccatgtgccctgtgccagtaataccccttttcctcctcagaactctccactgtccagcctttaaaagtaatcactaccttaattaaaaataatttatcaccaaaatgcacatccctgaacactatagtttagtctacctttaaaatactcggtacttaatgttttgatgtgattcttaaagttactaccacagtgcctcagtgttttgcttcagctggttttacctgttaaccctttcagaagatactgagaccaggagatagccttacacaagcacatcctatttatagcacccttccaccgaaacagagagctccagactggtctgctgaacccctctcacgtgctttctgtctatagcataatgcagttacctagtattcattgatgtgatttgtgactttcacagtacttttaacttttttttttttttggagacaatctcttgatctgttgcccaggatggagtgcagtggcacaatcttggctcactgcaacctcctcctcctgggttcaagcagttctcatgcctcagcctcccgagtagctaggattacaggagtgtgccaccacacccggctagttttttgtatttttagtagagatggggtttcgctatgttggccagacttgaattcctggcctcaagtgattcacctgcttcggtccccaaagtgctgggattacaggcatgagccaccgcacctggcccagaattttatatgatcttcatatcaaccctgtgaggtagatggggggggggggcggtacgtaactgcattttacagatacagaaaacaggtttttaaaacatggcttactcaaaactagcaagcatatttgagtcatttcagtctagccttcatgttttggatcagcatcagcctcttaggtcctccctgtgtacagttgtgtccctccaacaaacatgcctttccccttaccttgcttttttaaattgtattcatcactgtctagcatattatttattgtttgtctccctgcctgtagtaaccccactccatcctgcagccccaagaatgtaacctccatgaggccagagattatttttcttttattcactgctgtattccaagaacctggaacagtgtctgtagcaggtgctcaaatatgtttaccagaaggaatgataggtcatgtgggaccctcaagtttggggttcattttttagtcactcagaatagtactgatctgtctgcccatgttgtcatacacacagtcacagcatggcagcaatggggtactaactagaaagaagccatgaatttaggttttccatctatctgtgattcagagaacttcaggtcagtgactatacttgggccttgacctttgaggcctgaggtcaatcttgtgtagaccaagagtggtcctaaaatagctgaaactcttgattctgtatttgatttgaacgagtgtcacacacagcatcagttctgtgccaggcactgtgctaattattgccgctccctgcccagtgaagcacaggcagcccaagaatgaaggccctccctagcgcacctcactggtgtagtctgcagtaaactatacaccagctctggataaccctacaactcccaagttcctgtacctattctgtctacctgaactgttgttctctagcttcttcttgatcgcacccaatggaatgcagcttcttccccaggaagcatccctgcagtgccttgttatttcttctaacccctccattttcccattgtactttgttggtgcctaatatctacatgccttggtttgctctaggtgattgtctcccccgctagactgagagctcttacaagactgggactgtgtttcattttccttttgtcttccctcagagcttagcatgtgcttttgtgtatgttaggcctaaatgcttgggaaattgaattggataagggaaaggggatgttaaaacttctaggctggtcttgagtattatatggttttaagacttgaagttaagcagattggggttcatgctgataattggtttgttcacaggcaacagcgagtgaccaagtcaccagcacccgtgcatcgagggaattcctcttcccctgcccctgctgcctccatcacaagcatggtcagtgacctttagtaactgtgaaggactttaaggcttctccctgtttggttgtgcatggattgtaccactgtgtgccctaaatgtccttgagttccttccacggaaataactgacctagtagtttttc

SEQ ID NO: 28289 - DNA, 2300 bp, Homo sapien
aggataattacattctgtcaatttactaatggaaaaagttgtggctccaagttaaaaacaaaacttgtaggcatgaagttaggttacaaggtgacacaactgcatatcaccttgtaaatgcaaatgtttataatatactggttctttgtcctaacaattttgagagggtagttcttacccatagcctatgtgttaatatcactatctcttgatacaaactaatgtggaagcagggtagatatgaataataaaaacataaacatggacttattctagttgctaagttatagcaaatttaccaaattgagttttctctctttttttcctgttccctgcttgcctgggaacttaccagttagccaagatgcaagtagcaatagctgtttgaatcattatgtcttataccaaaagaaagcaactgacttttagcattccttatctgaccaataggacagacagaggttccattattccttagtgccaggactgacctacacttgaaaggaggcacctcagataggtagactgacttctttgtatctgaccacaccataccagttgcaggagaatgtccctgtaaaactgctttagagttacttttatacaaagaattattagatacaaatgctttcaaatgaagatcagactgaaagatggtagactatcctattttcctttctcgttacatttgtgtcttggtgattgggtgctgactgcaatggtgtggttcatatcttataattagcttctttcttttggtgtgagcaactaaaaatatggaagggggcattcagcagtttacctgatgtttttccacattttattgcagatatgattctaggatttgatattaacacaatttactcgagttgtaagggcagttggtttgatgttggggttttagcactcagaagtgtatctggttttagctgagcaaatgagcctcaaacacctgccaaacggatggatgacacattcaagtggctaggcaaaggctaagacaaactcagctagcaggaaagaatacaacaaggaaagtaatggagtaagaatagcaggtgttatctcaaaatattgctcaatttgcatgttgttaagtcatggtttactttttgaattcggtgtctttaattactactgctgtgtatgttttgtatactatttctgatctgcctccatccatttaggttgtcatattggttcatccaaaaataatacatgctggttcaatctaaattctgttttaaattatagattctatcctccaagtataataagccatgcagtataaagttgtctatttgtttttattagatggaagtaaatgactcttaaagagattacttataaaatcatctgcctttagtcccagttccaaaatcaacaataaaatacttgggtattcttgagctatttgtcatgcctagacactgctttggactttgacagctccatctagtggaagggaaactacaccagagaaagcacttcacacagagctaaatgggcatagggatgtcctgaaatgcaggaggggactccaggttggatgcacaaaatgtaaccactggccaggcctggtggtgtacacctatagttcgagctacgtgggaggccaaggtgggagggttgcttgaacccagaagttcaaggccagcctggagaacatagacctgtcccaaaaaaaaaaaaaaaagtaaccactactgctttaagagtggaggatttgaattttgccctgtatgtgatacccattttggaacagctcgtttaaaaaataataaagttgccgggtgcggtggctcatgcctgtaatcccagtactttgggaggccgaggcgggcagatcacgaggtcaggagatcgagaccatcctggccaacatggtgaaaccccgtctctactgaaaaaaaaaaaaaattagctgggcgtggtggcatgtgcctgtagtcccagttactcaggaggctgaggcaggagaattgcttgaaccctggaggcagaggttgcagtgagccaagatcgtgccattgcactctagcctggtgacagagcaagactctgtctcaaaaaataaaataataaagcttaaatttcctgaaatatgaaactctgaaatataacaattttggccaaacctgcatgttgtttactaggattttaaaaccatatgtgtaggcagggtgtggtgggtcacgtctataatttagccagcactttgggaggccaaggccagaggattgcttgagcccaggagttcaagaccagcctgggcaacgtggcaaaaccccatctctaca

SEQ ID NO: 28290 - DNA, 2300 bp, Homo sapien
gtcttggtctcccaaagtgctgggattacaggcgtgagccaccgcacctggctttttaaagttatttttagaattcctgtttatcactaagatgcttatattttggatacactccccaatttttcacagtgatgtatcatgcttatcttatattttaattaatacaaaattagtgcacttaaaagtcagcattatttaaggtatgagcatctacaggtggaatgtgattgaaattgtctagataattcctctgaaaatagaaattctggaaacaataattagggtcttgaattaaaatcccttcaaaagaagtatattgtggcttaatttgggtatggattatgaaaacattcttccagataagaacaaagaataaatctaagcttcccctgcttaactttggaaactgtgggttccagatttcaaataaaacagtcactaattctgtcatccatgtaccagtttttgaaaaagcatgttttctgtttatcagtgggattgacgtgaaagtatatgacttattttcaaggatatgtctgatttttggatagatgtttgctctatcttgtcttttctaaatattgataagaatactgcaaaaaatcaatttggatatttgactgaatttatggtatgatttgaattgaaaaattttttaaatgcttaaatctagtttttaagaaagattggcactatttcataatttctaccaaagcaatttattgttcatagtgtgttatttaattgtccttattaaatgtaaactatggaggttggatttggaaacagaaaacacctgaaaactctctattaatctcaaacagaaattagagatcagttgaaatttcatcttccacaatcatactttttctaaactttgacttggaattacagtctttatgagctctgcttttttagcctttggcttctgaaactctcaagattgaatttcataatgttcattacaaccttgaaaccactaagtttgaagcaatggttttctttcatcagttccccatacttgatatttagttgaaggtcactcatcagcttgtcagtggaatgctgtggcattgacactgttctctgagaacatttggtagtacgtggatttactcctgaggcaaaggatagaaacccaaaaacctttttgtagcatagaggctttgctttatattcttagaaagtagtggtggttcatgcctgtaatcccagcactttgggaggccaaggcaggtggatcatttgaggtcagaagttcgagacaagcctggccaacatggtaaaaacccatctctactaaaaataaaattaaaaatagccaggcatatggtggcgtatgcctgtagtcccagctactcgagagcctgaggcataagaatcacttgaacctgggaggcagaggttgcagtgagccaagattgcacccctgcacttcagcctgggcaacagagcgagactgtcttaaaaaaatagtagaccgggtgtggtggctcatgcttgtaatcccagcactttgggaggccaaggcgggcggatcacaaggtcaggagatcgagaccatcctggctaacacggtaaaaccccgtctctactaaaaatacaaaaaattagccgggcgtggtggcaggcgcctgtagtcccagctactcaggaggctgaggcaggagaatggtgtgaacccgggaggcggagcttgcagtgagccgagatcgtgccactgcactccagcctgggtgacagagcgagactctgtctcaaaaaaaaaaaaaaaaaagtaataaaaaataaaaaaggaaagtaagtagatggttatactcaagtttgggttattcagaaattacccaggatggaggaagaaaaaggtgttcaaattcctaggttctgagagtatttatcttcaggtcacgagcatgaaaggaagtttcaaagtaagtgaccctttcataagatttaaaccttcttgtcctttttcatctagaaactattagtttttattgtctttttcttcagatgatagaagatgttttgggagaagggtcagtctctgccagtcggttcagtaggtggttctctaacccgagcagatcaggaagccgatccagcagtcttgggtcaacaccacatgaagagctagagagacttgcaggtaaaatggcttcagattctgcccttgaaggtaaacctgggtttttccctgatatggttcattttatcttcattagtcaggagtcaattagggtcaaagggtctctggacaactgaaaagccttcaatttgtgtccttttaatattgttga

SEQ ID NO: 28291 - DNA, 2300 bp, Homo sapien
attgctttccagcctggatgacagagcaagacttcatcacccccaaaataaaataaccagagcagtgtttttaatgttatctttaattccctctgcaagcctaaaaagtaggtatactgcgatccctttcggaaaaatgaggaaagggagatccaggtggtgaaatgcctggctcaggtttcacactaattggcagggtcaggatttagcagcttcaaagaacgggccttctccactactccagggagtctccaagacactaaaggggattagacctgtttcccacagctttaggaagaatttggattccaaaaacagcttgattgttaaaataataacatctgtattatcacctgcaacgtgtctctgtataggcttaaaaaggctcagcagctttatgggttatatatggttttttacccaccttatcctgtttaatcttaactgccccatgagcaggttatatcatcttcgcaatttcacaggtaaaactaagaatcaatagactaactctccatagcttgtaggaggtggcagagatgagaatgcaaactcaggcctgatgtgcaagtgtttccctctgcctcttgcctgtaaaaaaacagtttgtaagaaacacactttattcagtaatacaaacgaaaagttttctgttgccaagattcacaagaagggagctgagttagtggtcactcactgcccaacaccctaatttcacaagtgaagtgaagttccaacaaagtaggcctcttggaagaaatgtagacgttgctgtcctttaaccaggaaaattgcgttctcgggacttcacgcctatgtatcgcttcacaccaacgctgcgcagtaccacagggcagaaatgggtgcttgtggtattccagcacataggacttcctccccaggatgcagttacccacactgctcacatatttgcatttctgtggccccctgtcagcctgagtctgcactacgtggtaagcacttgacattcgccgtctcatttccccaactccactcgcacttcccctttctgtgcaggctaaggacagattcaggttaccggagggaaacaacatttcaatgaatttgttagtcgcctttatcgctatcaaagccaatcgtgacaagtttgtcttttaatgcagcaaccagtactcgcgcataagcctcatagatttacagaggccattttagaaacacgaccgaaacttaggttaagtcagctttgcctaagatcacgccactcgcaaaacagctgaggttcgaacccgcactgggaaggctcggaagaccccaatctcctatctcaaattcccactgccgaagccccacggttctctgcctatgcgaaccatgcaaatacagcggtcgtcgcgccacaggccgtgctagccgccagcccagccccatctagccaccgcctccgggagagtggcgtgccgcgagtcgcgggtcccaagtgccgtccgctctgccctgcagcgcgcgtgggaacgcggcggcggtggcctctgggctgcccacggcgaccgcctgcgcgcacgggagcgggtttccgctatccccaccgtggcctcctcctcgccgccaccaccttcccaccccccggcccgcgcaggggctggcgtccgggaagcgcgcggcgatgcttctttttcgcccggcaccgctgcagccacctcacatccgggcgcgcggcggggaaggcggcgccggggccagggtgcgtggagggagttattaagggggagggggccgaagaggaggggcggagggccgggctgcagttacggcggctgaagagagacagcccaagccggtcggggtgggggcgcgagagcgaaggctgcggggagcggcgctgggaccggtgcgggcagcggggaggggagcggcggccgaggcaaagggccgccgagcggcggaggcaccgagtaagggtcggcggcggtggcggctgggtccggggcaccgcgcgcccggtgctcccgggtgtagaaggggcgcgggcgcattgctcccggggtcgcgtgcgtgagcgcgggcgccggggcgcccgcagggggtgggcaggggcgcgaggcccgcaaggcggccggcgggtagccggcgggctggctggcggggaccgagccgccgggccggggaggacggctgcgggcctgcgctagctccagcttgaagcgcccgggccgggagattcggcctccctcctccctgcggccggccgcccctcagtgagtacggtctccgcccttcctccgaaggaggccgctgggcccgggcctgcgtgaggggct

SEQ ID NO: 28292 - DNA, 2300 bp, Homo sapien
attctggggtggtttgttacgtaacagtaggtaaccagaaatccataatttccgggtttctagtattttctttttcaagaaagctcaggtgtggtggctcatgcctgtaatcccagtgcttttggaggctgaggcaggaggatcacttgaggccaggaatttgagaccagcctgagcaacatagcaagatcccgtctctgcaaaaaatcgttaaaaattagcctgctgtagtggcaggagcctgtagtcccagctatttgggaggctgaggctggagcagtgagctatgattgtgccattgctttccagcctggatgacagagcaagacttcatcacccccaaaataaaataaccagagcagtgtttttaatgttatctttaattccctctgcaagcctaaaaagtaggtatactgcgatccctttcggaaaaatgaggaaagggagatccaggtggtgaaatgcctggctcaggtttcacactaattggcagggtcaggatttagcagcttcaaagaacgggccttctccactactccagggagtctccaagacactaaaggggattagacctgtttcccacagctttaggaagaatttggattccaaaaacagcttgattgttaaaataataacatctgtattatcacctgcaacgtgtctctgtataggcttaaaaaggctcagcagctttatgggttatatatggttttttacccaccttatcctgtttaatcttaactgccccatgagcaggttatatcatcttcgcaatttcacaggtaaaactaagaatcaatagactaactctccatagcttgtaggaggtggcagagatgagaatgcaaactcaggcctgatgtgcaagtgtttccctctgcctcttgcctgtaaaaaaacagtttgtaagaaacacactttattcagtaatacaaacgaaaagttttctgttgccaagattcacaagaagggagctgagttagtggtcactcactgcccaacaccctaatttcacaagtgaagtgaagttccaacaaagtaggcctcttggaagaaatgtagacgttgctgtcctttaaccaggaaaattgcgttctcgggacttcacgcctatgtatcgcttcacaccaacgctgcgcagtaccacagggcagaaatgggtgcttgtggtattccagcacataggacttcctccccaggatgcagttacccacactgctcacatatttgcatttctgtggccccctgtcagcctgagtctgcactacgtggtaagcacttgacattcgccgtctcatttccccaactccactcgcacttcccctttctgtgcaggctaaggacagattcaggttaccggagggaaacaacatttcaatgaatttgttagtcgcctttatcgctatcaaagccaatcgtgacaagtttgtcttttaatgcagcaaccagtactcgcgcataagcctcatagatttacagaggccattttagaaacacgaccgaaacttaggttaagtcagctttgcctaagatcacgccactcgcaaaacagctgaggttcgaacccgcactgggaaggctcggaagaccccaatctcctatctcaaattcccactgccgaagccccacggttctctgcctatgcgaaccatgcaaatacagcggtcgtcgcgccacaggccgtgctagccgccagcccagccccatctagccaccgcctccgggagagtggcgtgccgcgagtcgcgggtcccaagtgccgtccgctctgccctgcagcgcgcgtgggaacgcggcggcggtggcctctgggctgcccacggcgaccgcctgcgcgcacgggagcgggtttccgctatccccaccgtggcctcctcctcgccgccaccaccttcccaccccccggcccgcgcaggggctggcgtccgggaagcgcgcggcgatgcttctttttcgcccggcaccgctgcagccacctcacatccgggcgcgcggcggggaaggcggcgccggggccagggtgcgtggagggagttattaagggggagggggccgaagaggaggggcggagggccgggctgcagttacggcggctgaagagagacagcccaagccggtcggggtgggggcgcgagagcgaaggctgcggggagcggcgctgggaccggtgcgggcagcggggaggggagcggcggccgaggcaaagggccgccgagcggcggaggcaccgagtaagggtcggcggcggtggcggctgggtccggggcaccgcgcgcccggtgctcccgggtgtagaaggg

SEQ ID NO: 28293 - DNA, 2300 bp, Homo sapien
gaaattatgagagcacctgtgagagagtttaatgccaggccatgacctttcagcagcctcatcacagaaggctggattgcacctctctaaatgggctttttcctactcagtttttcttgctccaagagtaacccttagatttttttttttttcgagacagagtctcgctctgtcacccaggctggagtgcagtggcaggatcttggcttactgcaaccgcccccaccaggttcaagcgattctcctgccccaaccccccgagtagccgggattacaggctcgtgactccacgcctggctaatttttctatttttagtagtagagatggggtttcaccgtgttggccaggctggtctcaaactcctgacctcaagtgatcacccaccttggcctctcaaagtgctgggattataggcgtgagccaccgcgcctggtcaaattttttatattttgtagagatgggcactatgttgcccaggctgttcttgaactactgggctcaggcaattctcctggctcagccttccaaaatgctcagattacaggtgtgagccaccgtgcccagcctctaagatgtccttgtcctagctattattatgtactattatcttctaatctttcccaacaggactattttcattgtaactcaaatggaaatgcctttcatccctcctaaatttgtcaaagctgaggatggtaaatgcacataacaggaagaaagcattaggaaattagctcaaatcatctagaaagaagtgcttattgacttatcctaaatatataatttatataaatttacataattacataaaagtacttaggctaaattacagtaaatatatttttgttatactgttaattacaaccttgaagcttactaaattattttaaaactacttggccacattaagttcagataaaagttgtccctaaaacattagcattgatgtccgctaaagtagaactccctttaaattattattattattattattgagacagttttgctcttgttgcccaggcaaatgcaaatacacgatctcggcccactgcaacatttgcctcctgggttcaagcgattctcctgcctcagcctccccagtagctgggattacaggtgcccactaccacccccggctaattttttaaattttatttttagtagagacgaggtttcaccatataaaacataatttagggccaggcgcggtggctcatgcctgtaatcacagcactttgggaggccgaggcgggcggatcatctgaggtcaggagttcgagacacacctggccaacatggtaaaaaccgtctctatcaaaaaaacaaaaaaaaattagccgggcgtggtggcgtgcgcctgggaggctgaggcaggagaaacacttgaacccgggaggtggaggtggaagtgagcccagatcacgccactgcactgcagcctgggctacagagggagactccttctcaaaaaataaataataaatgttttaattgcaaaaattagcatgtagaaaatagggcaaaaatacaaattgtctgtgatgctaagcccgagacacccaacaagttaattttcctgtttttagcgtaaaatctttcaaataaataactactgcttttagtctctgcaccaggaatctcacgtgctttcaaatgttttacaaagcacgtaaaaaagtatttgaaaagtcccacttacccctcccactcctatttttaagattattaggatcggcccaaatttaaaaatttaacaaaaagagtgcttattaattacattttaaaatgaagggttacaaaaagagatgagcctggcatttctaattcgggggccttgggacctctcccctccaagtgcaagttgtagcaacctgccgggtccacgcatgggcgggtcatactccacgggttccggtttccactccctgtgaaccaaaagccagagaggcccacgcacgagtccggaagtgagggagggaggactttcgtacgcagccgcctcccagctggaacctcatctttagtgctcggccgcgggcggcgtaactcggggttccgcctcggaatacctcccacttctcttgtctaagaggagcagtagcaagctgagctcagagcgaagctggcgagccaaggagataaagaaccctcggtggggatgcccagagggtgcatgctccacgcccctcgaaaccgattctcattgctgctgctgcaaagcaacccgaagtgcgccacctacccgactgaggctgcgcaagccccggggtctgggcggggtggtcctcgtgcgcgccgc

SEQ ID NO: 28294 - DNA, 2300 bp, Homo sapien
tgaggagcttgaaacagaaagaaccaaagtgttagctggatggcacaatgcggtctagagtctagagaggggtgttgctttgtttgtttaagaatcactggtttattcctttcagaaagtatttttgtgatggcagtctttccccaacaactttttattactgacaaacaccaaatcatagaaaaggtggatactgtctgtgtttcacctagtttaaccgattgtggttttttggtttggtttggtttggtttttttgagacagggtctcactctgttgcccagactagagtgcagtggtatgatcactgctcactgcagcctcaacctaccaggctcaagcgatcctcccacctcagcctcccaagtagctgggactacaggtacacaccaccatgcctggctaatttttttttttttttggtagagacagagtttcgccatgtttcccaggctgggctcaaactcctgaggtcaagcaatcctcctgccttgggctcccaaagtgctgagattacaggtgtgagccaccccgccccaccaacccattgttaacatcttgccacatttgctttctttaagtatataaatacatttattttgtctgagctgctctaaaattgtagacacaaagtttatcttaaagtgtatatctcctaaaaaggatggtctcccacataaccataatatcattattatattccaagaaatttaatattgatataatatataacatgcagttcatattaaaactgtatattgttgctattttcatttccatagtctaattaaaggtcacccattgcttttagttgttacatcttgaagatttttttttttaggataggaaaaataatagcacattgatatgctgatttcaaaaatctatagagagtgaaaactgatgattcgtaagaggggaactgccaaggcagtaaactcgggaaggtgagagatagccagagctggacagggttgggaggggactgacgttggtgggagcatgggcggttcatccagagtagcaggaaagagagaagacagagcccgtgggcaggtgggtagttaaacatggtggaccttaaggaaatttccttttgattgcttttattttcttagtgaaatgggaacgatggtattcagttgagaggagggaaaggagaggtgcgacaggctgaagaaaagatatgaagtctttgtctaagtcgtcttcagattaggacatgcattatcactgatctaagggtgtgcatttatagacccttgtagacccttagcttctatatataggcatccctggaactaatctgcctgaaaaaggactactttacagtaggcttcctctgactttggaagaaaaggcagaccctcacttatcccaaatctgaattaattatatcacccctcggattgtttctgctccttgtctgcttgtttttgtttttgttttgagttggtcgctcttgtcgcccaggctggagtgcagtggtgtgatctcagctcactgcaacctccacgtcctgggttcaagtgattctcctgcctcagcctcctgagtagctgggattataggcacccaccatcacgcccagctaattttttgtatttttagtagagacggggttttgccatgttgggcaggctggtctcaaactcctaacctcaggtgatctgccctcctcggcctcccaaagtgctgggattacaggcgagagccactgcaccagccatctgctttctgcttgttgattttattcttcttttttttaatccaggaaaaaattacttttgaaagcagaatgtccctcttaaagacccttttaccccacggtcccatagcttatcatcctgctaggggattgccacttccttgtttctaatttcagcctttccagcgtgtgtgcctttctcttttccctctccacctgtacttcaccctgttttcctgcctctcctttgactgttgcctcttctctggttttcaggcttggtcacagtggcgggaacagctcctgtatgtccagaaggagaaacaaaaggttgtctctgcagtgaaacatcatcagcactggcaaaaacggagatttctaaaggcctggcttgaatacctgcaagtccgcagagtgaagagacagcagaatggtgagtaggaagctccaggctctcgagatagaggatctggtcacagtttcactctcctgctgccagtggtactgtactaagaagtaatataatggtgctactccagaaattttggtaaaaggagattaaggaggaaaatacatcatccttgagtcacat

SEQ ID NO: 28295 - DNA, 2300 bp, Homo sapien
tattttctctctggaggcagaagatgtttcagcatcgagaaaaccgcctggcagagagaatggtaaatggctgtccctgaggagatgtgtggaggggcaggatctgattcaagccattgcactcacggcctcccctcctcaggaagttgctcggacctcactggagggcccctgcctgtgactgttgaggcagggcaggctctggggcatctgtcctttctcagtggagcctacagacagcttctgggctggaccacgtcctgacatccattccttttgccttagtcattatttgtggcctgtaaattctttcctggcttctgtgcctctctcctacttgatttattctgttctctccttcctgtcctgcctcaggccatccttcacgcagagcgacagcttctgtataggtcttggttcatgtggcaccagcaggcagcagcacgtcaccaggagcaggagtggcaaacagtggcctgtgcccaccaccgccacgggcggctcaagaaagctttctgcctctggagggaaagtgcccaagggctcagaacagagtgagtggccagttctgccttacaagcctttccatcacaggccagctttgcttgttctagcagcaccatgagctccaagtgcctgtctggaggactgcattaccccagactctggttgtaagttctggaagttcaacctaaaagagtcttaagtaaaactaggttggccgggcacagtggctcacgcctgtaatcccagcactttgggaggctgaggcgggcagatcaccagaggtcaggagttcgagaccagcctgaccaacatggagaaaaccctctctattaataatacaaaaattagccaggcgtggtggcgcaagcatgtaatcccagttactcaggagagtgaagcacggaaattggcatgaacccgggaagtgaaggttgcagtgaaccgagatggcaccgctacactccagcctgtgcaacagagcgagactctgcctcaaacgaacaaaagtgaccatagccagggaataaactgatgggcccatattgtgatagctgactgctgcagataagggatagggacagcagctgtggccagtgggtgggttgtggcagtttttaaccacaccacgtagttaagagagaggaggggaggcagcccagtcactatagagactgtcctgctttggggcctttcagtgtccactgtgtgttctgaggatctcactccctgtcgcacactgaccatgtttaaccagtttctcagttgggggcttcacacctgcacatgtgagcttcaatggcacctgaagccctgggaagttgtaggccaaaatttgatcataggtgcttttttctgagactgcaagttctttggcagctcttcagagagggtcttggctcccccaaaaacttaaccaggtagggctatggactatgaggaggaacccatagagggtgccctcactgggtgggggctgcagcactgagctctgccatctccccacaggaggacgggcagggtgcgggcagcagaattccacatggcccagctcctgcgttgggcctggagccagtggagggaggtaaggctttggtgcgaggtgccacccgtgtatgacttttggacaggtgggctgtgtgtcagcaggactcacaggcaacatatgggccacaccacctacctctgagctgaaggaggagaacaggcagcatagaaagtgttaactcagttttatgagctgatttggctcaaaattttgtgttctttcagatcctaggctgttcttatttgaacttactgcatctaaaattcctgatctaaccatttacaggagtcctacgtcctactgagtgtaaaacatgtttaaactcacattaattgagcttttaccgcaaatcaagcacttacctcatcaaatcatcacagaacccctaagaagcacgtatttatagatgaggccagagaggttaatttacactcacacagatgatgtataaaatggaggcaaagcaggaagccacccccaactcagaccccagcccacggtagctgctttctcctctgtctgcagtgcctggccctgcggggagcggagcggcagaagctgatgcgagcagacctgcaccaccagcacagcgtgctgcacagggcgctgcaggcatgggtggtaggaactgctgcttccctcctgatcttgctgtggggacaggggaggtttctggagactttgttttccttccttgttcttcctgtccgtcccagaacagagtcacgtgacacacctcaaaccaagc

SEQ ID NO: 28296 - DNA, 2300 bp, Homo sapien
cagtgttgtattaaaaaatacatcagtggaggccgggcgcagtggctcacgcctgtaatcccagcactttgggaggccgaggcaggcggatcatgaggtcaggagatcgagaccatcctggctaacacggtgaaaccccgtctctactaaaaatacaaaaaaaatcagccaggcgtggtggtgggcgcctgtagtcccagctactcgggaggctgaggcaggagaatggcgtgaacctgggaggcagagcttgcagtgagctgagatagcaccactgcactccagcccgggcaacagagcgagactctgtctaaaaaaaaaaaaaaaaaaaaatatatatatatatatatatatatatataatcagtgggccgggcatgatggctcacgcctataatcccaggattttgggaggccgaggcaggaggatcacttgagcccagaagttcaagaccagcctgggcaacatagtgagaccccatctctacaaaaacaaaacagaaaaattagctgggtgtaggcagtgcacacctgtggtcccaactactcgggaggctgaggcgggaggattgcttgagcccgggaggtcaaggttgcagtgagctgtgatcatgccactgcacttcagcctggatgagagtgagattccatctcaaaaagaaaaatcagcataatatcttaaaaattaacatgaaatgtgttttaaggctttgctgggatcttgctttttaaaaagccaagagggatcacacagagcagcatccacacgtccccagctccctcttcccgttctgttgtcctgttttcaccattccccggacctcaggccgctgcctccacgcatccccctgcaggagccctttgccaccttctttcatgaaggtcattcctcaggccacagatggagcgtgtgttgagcatctcaccgccaggcacaaggctggcccttcctagtggaggaagtgggagcctcgactagagagggagccaagagggacgagctgggcagggccccgtgatcaccacggcctccttgaaggggctatagggaaatgatctggtctttctggccctagctggcagccaggaggcaggagcagcgggcgacagtgcgggccctgtggttctgggccttctcgctgcaggcaaaggtaattggggctctgcatcctaccatccctgcctctccctcaggccttagccctgccttgggtggagggagggcacctggtctgtgggggagctctaagcagggagacctgggcctcacctcctgccctccctggaggtgtgggccacgtggctggcctttgtactggaaaggaggagaaagaaggcgcggctgcagtgggcgctccaggcctaccaggggcagctcctccaggagggtgccacgcggctcctgcgctttgcagccagcatgaaggcctcccggcagcagctgcaggcccagcagcaggtccaggtaggcccagggccccttcctgtggggagcaggcagggtgtggcatgagctgaccagaggctgtgttgtaggcggctcacagtctccatcgtgccgtccgccgctgtgccacgctctggaaacagaaagtgctgggccggggcgggaagcctcagcccctggcagccatcgcacccagcaggaaagtgacgtttgagggtccccttctcaaccgcattgctgctggggctggggatggcacccttgagaccaagaggccacaggcttctcggcctctgggagctctgggccgcctggctgctgaggagccccacgccctggagctgtgagtagcctgtgctcaccttgtcctcgcttccaccctgggcaaaaggttggatggcatagcagggaggaaaacagccctgacgggatgggacgggctggtcacggccttgtcacagctgagctgctgggaaccccctcttctccagccagatcccatccctcccacggcaagagggagagaatggagtgggatttccaaaccctctctcctttgcctgccaaagctcaggaaataggtgtcccctcctctgcaacaccttcctaccctctctcccgtcctgctgacacgatcttttccggagtcatacacgtagttgacaaagggaacaagctcagctcctacccgtgcctgccggcctctcttctgctccatcacagccaagacactggctttttgtcagaagcccctctttcttgtgtgagctggcacctgtccctctgcccacccctactatggtctcctcaaaccctaacctgccctgccccatgctgatgaagctggtggctcc

SEQ ID NO: 28297 - DNA, 2300 bp, Homo sapien
caggttgaccccaaggaggaaaccctgttcctgggcctttgacagtcacatgggtgtcatcagagctcaggggcactgaggcaccctggacattagcccaggctcccacctgtgcctgggaagggcctgggctcacatagcccttctgtgtgactgggcatcagctggaagggataagagcagctctctgggagcttaccttaccttggagaggtgttgaaagttggaatgaaatcagttttacaccttggggagttggtgtcttggttgtgtttagagaagcagcagccaccaattacaggcagcttctacagtggcagcagcacctgaagtttaagaggctgccccttcctgggtacctggccctgccggagagctctgggaccatctagtgggacccagtgcttgtccccaggccatcgtctgtcttaggtgctccaggcttccctgaaggaagagagaacagaggggcctgaggggatgacttctctttgcctcctgggaggaaccccaggtgcagatggctttatggcctggctcagtcacagtagaacgttgaacacaagtcctgccgtggggccaaggtggggctcagcagggctgggcttctcagactggctgcatccaggccctcaagagtgctggctggacctgtgggggctgcagaccctgtgtctgcagctcaggcccaggtgacagtgacatcgcagacctgcatctgaaaatccctgttggtgctcagggtatcctccttcttcctgttaagacagagggacacactttgggctgtagacttgttccatgcacttgggagcctcctcctttggtggtctgggatatgggcagtgaccacgggcaagatgcccaccacctctccacacactgtgatattggggtcaccgtggctagggtcacacactgtggttaggatcagatccgtttccgacccccactttaagaagtaagactgctgggcgtctcccgttctgggactggagcagttgctatttgacttttgcatgaaatgatgaaatccactggagttgtatgtaaatccagcactccgtgtggcaggtgcagtctggttcccagtgagaaacagccacatcacaaaagcagcgtggggcacctgggccctggtgtcctccgtggggtgcagattctcccctgaagtgagagctgggctaatgacactacttgggctctctggagctggggcagtgtggtcaactcagccccttgccctgtggcctgcaggtggctttgtacaagtcagtgccaacgcgcttgctgtcacgggcctggggtcgcctcaatcaggtggagctgccacactggctgcgcaggcccgtctacagcctgtacatctggacgtttggggtgaacatgaaagaggccgctgtggaggacctgcatcactaccgcaacctcagcgagttcttccggcgcaagctgaagccgcaggcccggcctgtctgtggcctgcacagcgtggtgaggcctgaccctttcctcctgcaggaaacaggactttttcctgcctccccagcacagcccccctggtctccagcgtatctggaaggggcaggatgacaaggggaggtgggggctgtctcctggggggaggagaccctgctctccctggcagcaagcctctcctgcccttccagattagcccatcggatggaaggatcctcaactttgggcaggtgaagaactgtgaggtggagcaggtaaagggggtcacctactccctggagtcgttcctgggcccgcgtatgtgcacagaggacctgcccttcccaccaggtgggtcactgcacaggcggggctaggcagccctgctgctgtgtggctggaccgggagggaggggaatgctggggaaggaactgaggctggcatgtggggcctccctgagaatccatgtgcagaccacactcgggctccgtgctgggtgctcactgtgttggtggcccccacgtctgctcctactccacagccgcgtcgtgtgactccttcaagaaccagctggtcacccgggaagggaatgagctctatcactgtgtcatctacctggcccctggggactaccactgcttccactcccccaccgactggactgtgtcccaccggcgccacttcccaggtcagcccggggccagcgtggggggagctgcctctgtgggcttcatatagaggctctcagcttcttggtgttgggggaccaggctccagatcagggtcattgaggccaggagttgactgctttatgcaggctggttgtgggcaggggaccgtg

SEQ ID NO: 28298 - DNA, 2300 bp, Homo sapien
ttcttgggatcttcacctttaagcaaaacatagaatgaaaccagttttaccataggctgattgatagaagcaagaattaagttcctatggatgtttctgaccacaaaaacatcaccgaacttttaaagaccccaaacatttctaatattaaccattgaaatgtgagctatacatgcatttatgaatgattaataaaaagttagataattatttacctaattactccatttcagggttgcaggtggtcccctatccgatgggcagctcagggcacaaggcggaaaccagtcctggatgggatgtcttcccatggcagggtgcacccacacccacactcactcagactgggaccatttagacacaccagtgagcctaatgtgcatggctttgggatgtggaggaaactagggtactcagagaacacccatgcagacatggggagaacgtgcacactccacacagacagtagccctggctggaatagattttttttctcatcagtgttatgatgacactatttgaggacctcccgtagtgatgtctggacaggagaatattaggagcagctttgtataaggtatctgccacccctgtaccacatgctgaggcccttaggggtggcactgtgccttgttcacccctgcctccctgttcccatgggtgcattgtaggtatggaagaacatggaaatccatggaggaggaccctatctgtcttcttccccctgccgcatcccagggctgtggcttgtcatgtggcacttgcttgggctggatccaggtaaggacgacaggtgtatggggctgtgactgtacacccttatgtcctattccaggcgtggcccccacaccatttctccgcaagccctacagaccctctcctcctgttccaaaccttaattctttctttctttttggtttaaaaaaagaggtctcactatgttgtccaggctggtctcaaactcctgagcttaagtgatcctcccaccttggcctcccaaagtgctaggatcacaggcatgagccttcatgccttagttgctttagaaacaaagatctcagtggtgagaagccgctggaattgtatcctgttcagtggctcagaatgaggagactgagacttctagggccaactcaccattgaatagggaatgggcgtgctcagttgctcccacagatgtgaacaaggctacttaatgccacaccttttctttggttgaatggtgatccctctcagacccttcccctcccctaaaagcattaagctgattggtctgatcccatgtgggctgagtgcttgtcggatgcctggcaccatgtgggtacggggtggactgccaagccgcagactagggccctccgatctagcggggtgggaagacagcatgcatcatccatcccatgggctctgcatcctagtagtgaagcagggaggcctgtgtgctctaggctggggcggtcggaccttgtttctggctgcccttgttcgctggtctacatcagttttggagtcagggcattctgtttgtcagggttttgcgtgcctggagggcagaaggttggggtgggagcagccttgtagcttcaagatgggatgcgggaaggatcaaggatttcgcattctctggagcttcctagggctagcaggggtggctttctgttcagtccagtgaagaagctggtcctcagtgaggtcagcagcacgtggggtcctgagtctgcctagtgttgggtcgcgggtggtggaggggaggcagctgctttgggaggccagccacgggctgcagacaggcggctcacagaccagcggacagactgaggacagacaggaggcatcccttgggagcagccgggcccaccttgctggttgagtggggtcctcccgtgacagtgaccaagcagagctggtgtctgctgcccttccccttctccctggccttggcccttcctcttaaaggggccctcgggttgggcggacggcccagcaggactggggctcagagggggcggcagctttaagggtggctggggtcggcctcctgcccccgcccctggtagtctgagtggctggagcccgagccccgcccactcgccccaaggcttcccggctccgggagcgcccctagggagtcggagcccggaagctggagccacctgcgggtgagtgagcggagccggcgccccggccctgccgggagccccaggtgacttctcagggaggcgccccaccctgcccgctcagagggccagtgccgggtgggggtgcccttctagggccttcggtcgcaggtgggctctccc

SEQ ID NO: 28299 - DNA, 2300 bp, Homo sapien
atatgaggtcttgctctgttgcccaggctggtctcaaactcctgggctcaagcgaccctcctgcctcagcctcccaaagtgctgggattacaggtgtgagccactgtaccggccactcctggattttcaagtgggactccaacacttcattttatgagggggaaatggtctggacttggagttgacattggagtttgagtatcccttatccaaaatgcttgggactggaagtgttttggatttttttttggatttttcaatatttgtatatatatatatactgagataacttggggatgtgacccaagtctgaacacaaaatttatttattttattttatttgttttgtttttcttttctttttttttttttttagatggagtctcactctgttgcccaggctggaaggcaatggcgcaatcttggctcactgcaacctccgcctccccggttcaagcgtctcccacctcagccttcccagtagatgggattacaggcacctgccgttatgcccagctaatttttatatttttgtagagacagggtttcactggccgggcgcggtggctcatgtctataatcccagcactttgggaggctgaggcgggtggatcacctgaggtcaggagttcgagacaagcctggccaacatggtgaaaccccgcctctactaaaactaaaaaaaaaaaaagagacagggtttcaccatgttggccaggctgctctcgaactcctgacctcaggtgatccgcccacctcggcctcccaaagtgtgtggattataggtgtgcgccactgcgcccggccaatttatttatttatttgaggcagggccttgctctgtcacctagggctggagtacagtggcatgatcacggctcactgcatccctgacctcctaggctcaagccatcctcccacctcagccttctggagtagctgggaatataagcgtgtaccatcctacctggctaatttgtttgaatttttgtggaaacaggggtctcatttatgttttagatataccttctacacatagcctgcgggtaactttatataatactttaaataattttcttcatgaaacaaagtttttttcttttttttttgagacggagtctcactctgtcacccaggctggaatgcagtggcatgatctcggctcactgcaagctccacccttgggttcaagcgattctcctgcctcagcctcccaagtagctgggattacaggtgcctattactgcgccagctaatttttgtatttttagtagagacaggggttcaccctcttggccaggctggtcttgaacttgtgacctcatgatccacccgcctcggcctccgaaagtgctaggattacaggcgtgagccaccatgcccggccaaaacaaagttttgactgtgacctgtcacatgacatcagatgtggaattttccacttgttggtgtcatgtcagcactcaaaaagtctctgattttggatgttcagattagggatactcaactatatacgttttcaggaatggcaacaggttaagaagggagagtgttgaatggctgtctggggcctggtcctaatcccacctctggttccacctaatcactgtcatcacaaatgaaaaatgtgagattttccaaatgtagctgatatcagaattgttggggagctttaaaaattatgaatttgaggctgggcgtggtggctcatgcctgtaatcccagcactttgggaggccgaggcgggcggatcacgaggtcaggagatcgagaccatcctggttaacatggtgaaaccccatctctactaaaaatacaaaaaattagccaggcatggtggcgggcgcctgtaatcccagctacttgggaggctgaggcaggagaatggcgtgaacccgggaggtggaggttgcagtgagctgagatcatgccactgcactccagcctgggtgacagagtgaagactccatctcaaaaaaaaaaaaaagaaaaaattatgaatttgaattccttaactcctagaaatctacaaagtttgggctaggtgcaagatctgtgttttccaggagccctgtaggtgattctgatgataagccagcttgaagaaccaaaggcagatgagccctacctaatgttcccttcagggctacagttttttgtttttgtttttgtttttttttttgagacggagactcgccctgtcacccaggctggagtgcagtggcgcaatctcggctcactgcaacctctgcctcttgggttcaagccattctcctgcctcagcctcctgagtagctggg

SEQ ID NO: 28300 - DNA, 2300 bp, Homo sapien
cactgcaacctccccctcccgggttcaagcaattctcgtacctcagcctctggagtagctgggattacaggcaggcgccactatgcccagctaatttttgtatttttaatagagatggggtttcaccatgttggccaggctggtctcgaactcctgacctcaggtgatccgcccgccttggcctcccaaagtgctgggatcatagggtgagccacggtgcccagcctcttaaaaaaaaaaaaaaagagatggagtctcactatgttgtccaggctggtctcttttttacttcctttttttttttttttttttttttgagacggagtctcactctgtcacccaggctggagtgcaatggcgcgatctcggctcgctgcaagtccgcctcccgggttcacgccatcctcctgcctcagcctccagagtagctgggactacaggcgcccgccaccacgcccggctaattttttttgtatttttagtagagatggggtttcatcgtgttagccaggatggtctcaatctcttgacctcgtgatccgcccacctcggcctcccaaagtgctgagattacaggcgtgagccaccgcgcccggcccaggctggtctcaactccttggctcaagctatcctcccacctcagcctcccagtgagtggggattgcaggcgtgagccactgcgcccggccaaaaccaattctatacatttgtttttttcttttccgacttttgaaaaccatgacaaagggaggtttcttccccccaataccaaacctggtgccttttaagctctctgtaggagctgagtatgccctagttgaacttaagccaactacacagaaatacctgcagggaccagggagcatattcctcctcctgtcaaatgcctggtgaaggcaactgtgattatcagcttagcagatgaaaaagtagggctgcattccttcagttgttggacccaaattctgccagattctgacaaagggcttaaaaggaagaatgtttaggccaggtgcggtggctcacgcttgtaatcccagcattttgagaagccgaggcgggcggatcacgaggtcaggagatcgagaccatcctggctaacatggtgaaaccccgtctctacgaaaaatatatataaaaaaattagccgggcgttgtggcgggcgcctgtagtcccagctactcgggaggctgaggcaggagaatggcgtcaacccgggaggcggagcttgcagtgaatcgagatcgcgccactgcactccagcctgggcgacaatgagagactctgtctcaaaaaaaaaaaaaaaagaagaagatgtttaggacatggtttttggagtcagagacgtatgttcaaattctggcttcactattttatagtctttgggcatatgccctttatgtacccttgaagatgttgcttaaccttcctgagcctcaggtacctcatctttaaaatggggataatgtctcgggcctagctgcgagtctctagtcagtgctcagtaaaaagtagcagacatgattgaaaactcgttttcctcttacaattgaagataggaaccttttcaagagcaagcaccaggcaccgaatttaacgactggttgcatttctaggtgatccaagaccgtttgcccccggtctccctggcagcacagcggtaggagataagaatgatatgacaccatgcttgcaaagtgctcacaacacactccggcgcttaaaaaacgagagctgagtcatggatgcccagtttccccatccgtaaaatgagcaagttcgatcacttgaaacgacattcttggatcttggatgactcagattttccaggtacatgaggaaaggcacccagagggaaggaggaggagtggcagtgctgcgaccaagcccaggtttagcgaaacctacagctccactagttcccctacctccgcaggtgccaagcgggttaggtggggagtagccacagggcggagcttagtcggctccgcccccaacccgcgcttttctcattggcccactgaactcgagactcgtgacgccttaagcgtgcgcccagcgtgtgaagggggcgtggcacgctgagaaggagcagacaagatggcgacgtccgtggggcaccgatgtctgggattactgcacggggtcgcgccgtggcggagcaggtatagcagcgcggagagactaccttggggcgtggggcaacctggaccaagctggggtctgaagagagatgtttctgtgtcgcgggctcgctctgaggcgagctcgggtggagacggagccaccttcacctcga

SEQ ID NO: 28301 - DNA, 2300 bp, Homo sapien
catgttgaccaggctggtctcgaactcctggcctcaagtgatctgcccacctcagcctcccaaagtgctgggattacaggtgtgagccactgtgcccggctgtatagctatgttttatgtgtaacttggctttaaagaaaataattgggccaggcgcggtggctcatgcctgtaatgccagcactttgggaatttaaggtgggcggatcacaaggccaggagtttgagaccagcctggccaatatggtgaaaccccatctctactaaaaatacaaaaattacccgggcatgatggcacgcgcctatagtcccagctacttgggaggctgaggcagaagaatctcttgaacccgggaagtggaggttgcagtgagccgagatcacaccattgcactccagcctgggcaacggaacaagactcagtctcaaaaaaagaaaaaataattggtttctctctaatattttataaggttatagaaactgtcagattttattagtcagtacacaactgagtggtataatatattctttaaattttttaaaatttatttttatttagagatggggtcttgccctgatactcaggctgaagtgcagtggtgcagtcttggcttacttcagtcttgatcttccgggctcaagcagtcttctcaccccagcctcttgagtagctgagaccacaggtgcactccaccacccctggctaaatttttgtattttttgtggaaacaaggtctcgccatgttgcccaagctggtcttgaactcctaggctgaagcgatctgcccacctcagcctcccaaagtgctgggattataggcatcagccaccttgcccagccactgttctttctttctgtctctgccttctttccattcaagttagaaaataatcttcctgtcagtctgcctccattccagtgatgggcacataaatataactctcctggttggaaagctttcctctttctgagtaactgacatttcttgtcttcttggggctatcatgtgctaatacccacaataacatcaaaacctttcctgttatcccactgcccttacctattgcttttgtacttttgctttactttagccacaccatgttaccatatgtgcctcttccaggcatggaagctacatataacaccagcggcagtcagacgaggtaagcacatgagactcagcgtgtgtgtgcgcgtgtgcgtgtgtgtgtgcaagagagagagtgcatacataggtggtgtggatcgtctgtggcatgactttgacctcttgtccttgtaaacctgatctatgtctctcagataaacatttctgagattgaaatctgttctattacaagcagcaactaggaatgtgtaataatacaatttgttaaaaaaaaaaaagtgaaaatcactaaccagcttattgtaccagaagtcccctctcaagctatttcatgtcttaacagccaacttcagtccctggacaggattgatcttatctgagtactgttcatttgtgcggtttaccagatatcttcctcacccaaaaagtctgttcctttttacatttttccttataaaattccatagcaataaaatggattacacattcttgtaatttttttacatatgtagatacaggctatgtctggaagtgactagaatgcaggttgactggatatattattctctggaaagaaagaaaaagtattgaggcctagatgttaagaagttgaggctgggcgtggtggctcacacctgtaatcccagcactttgggaggccggtgcgggtggatcacctaaggtcgggagatcaagaccatcctgaccaacatggagaaactccgtctctactaaaaatacagaattagctgggcgtggtggcgcatgcctgtaatttcagctactcgaggggctgaggcaggagaattgcttgaacccgggaggcagaggctgcattgagccgagatcgtaccattgcactccagtctgggcaacaagagcaaaactccttctcaaaaaaaaaaaaaaaaatgaagaagaagaagttgaatgtgctggaagtagaaagggaacccctctcatatcttctttctcttcatggtgctaggctggagcctccattccctgccttggtaccaaagtcttgcttggtagcagaatcagctgtcagcaagctcctgctttcagcctctgagttccaggttcgtggattggatgagctggatggtgtgaaagcagcatgcccctgcccacagagcagccccccagaacagaaagaggtaagtgtaaagtgctggttgggtcagatga

SEQ ID NO: 28302 - DNA, 2300 bp, Homo sapien
agagactgtcaccgagcctcacggggaggtaaaccacaaccaaaaggatctgctggtcagctcaggcagtaataactcactaccttgtggtagtccaaagaaatgcaatttgaaaggagcctttgtcaagatgtctggttgtgatgagtccacagaaggtatggtagacatcgtctacacggactgtagtaataagcttgcagaaggtgtgctggacgtgaaggcatctaatctactggattgtggtgcaaggcaagagaaactggcatttcaagaggactccaggagtaccttgtctcggagagaactggatgctgcacatacaggaacaactggtcaggattcagatttcccagttactgctgcttctacagtggactttctcaaaataaaaaaatcatgtgaagaaaacgtatgcagatctttaaaagactgtgaaatggaaaagtgtccagactcttgtgcccatgagatggagtctgttgcagatcatgaaccaaataaaagaatattgggcagagtaaatttgtctttaaatgatagccattatggacagcaagataaaggaacatctctcagagaaacacaagaaatgactgaaggatcaagactagaaccaaactctgagtttggcaaagaaagtacctttggaatttcctcaaaagagtcgatgtcttgccatgatgaaagctctgtttccctaagaagcctgaaatccattgaaataatgccttctcaagaaaattcagaaactaatgttaacagtgaagaaactgacctgaaaaatctttgtaaaccaaaagatggtgaaatgctttgtgaaaatgtaaaggactgcacagtccttcctgagatgaaggaaatagtatcaagagattggagtaattctagtgacagagacagcgtatgtacctgtgtggaaaagaatgcttgcaaagcttgtcaccctcacgagaattcctctgacagacatttgcctttgacagtgaaaacagatattaaagtgaaaggagaagaaaccgaagagcatcagaggggacgactgggttacttaactgttggggagcaatctgaggagttggttaccagagaaactggcgatggcgatcccgtgagcaacatctctcagacccattttaaatgccgggggatacttaatcatgctgaaaaacagcagagccctgaggttttggactacatgttgcagaaagaagagaaatatatacgtcaacaaaaagcacatacgatatcgcaacagtgcatatcatctagtctgttgttagatgatgcacaaaatcagaaccaaccgaaggctgacaaagatgagtccaccatgatcaatgaaatcaccctagcaaagctggccaaggacagcattgtggcacagactcagaagttagaagaccagaaggaggaaaggttacatcatccattaaggaaggacactgagtcatgcacaagtccttgccttcttggtgcccctcggaaagcacaagacccctcctctgctgggtgtgatcaaatacatggtgcctttgcgaagaaaggagttcttcccttaaagaagcagccccatcgaacttgtaagaaagtttcctatcaggagcaaatcattgttgggagaaaaataggtaaaatcagaagttctgcctttttaaagagttcttccaatcccatccccacaaaagcgcacagacttctcagtttgtgtactctgtctgcacctacacgattagaacctgaaacagcacctaccaagagcttggttagtcacataccaaagcagatgtctacaccgtgccatcccttgaggagcctgaattttaggaagactaccaaagaatcagccttactaaacaagctgtccatccttgcctccaaactggccccagccatgaagactcagaagctaagataccgacggtgttcctctgaacttcttccaatggctaaaagctacaagcgcctcagatataaaagactcctggacggattttcatccagcacagagcagctgaatccatatttggcagctagtggatgggataagaggcctaacagtaagcccatggcactttattctctcgaatccatcaagatgaccttcatagatttgagcaacaagatgccgtccctgctgtttggttctgaaatcttcccagtatcctttcatgtgaaatcatccagctcagattgcacgactgagtcctcaaggacttttcctgagcactgtgctccggcaaggcttgccttaggagaggccctccagtgcccgtctcaacctcccaagtggacctttt

SEQ ID NO: 28303 - DNA, 2300 bp, Homo sapien
atgaatgaactttcttgtaccaatgaactggttgtaaacaaagtagaaagtgaatgtgttttaaatcaacaagtgtcccttaattctcaagaacatgcaaatttgccaactgactctctactgcatttaaacaaagagatgcctttagcaacaggcagagatgcccatcagagccatcaccctccattagagggtagagcagatgtcattgctgatatacaaaccattcccattcagacaaaaataaaagacatctctccaccaggtaaccaaacctgtggtgcctcttcaaactgtcccaccttaaacatcaaaccagtaagcctagagagaaaaaaggaaatggctgattcaggaacaaaagctctacattccaggctgcgctcaaataagagagaagcagctggctttcctcaagtggtctctgtcatagaatgtcacagcgttcaatctcaggatatctctagctgtcatcgtgtaagaaaaaatgtatcccaggaaaacatgtgttctgcttctgctgctttcaagtccagcaaaatcagcctgcaagttgataactctttgataacaaaatatgaaaatgcatttcagcaccgtgatcactgctgccaaggaacaggacactctgtggaaaaaagcagctgtaaagtgagttacacatcacaggaaagggaacttgatgggaaagaaacgaatggcagccttccaggagataagatcagaaacaaaatggtagcaggcttgttaaatagtggaatttcaaacaaaaccattcacacctccagtagcatcaaactcagtgaggaagggctggaaggaaaggagcaggatgtatccaaagaaactgtattttgtaagtataacatctctgatcatgctatacaagaactaaaccagactgtaaacattccaggtcctgaaaaagtgttggaccagtctcctactgttatgttctccagttttaaaaatgtaaaatcagttgaaacactcgatcagaaggcagatgaagtccttgactgtcagagtaaccaaaacagaccagatgaatgcaaaagtgaaggtcagtcagccaaggagatgctaagtagtgaccagagagagactgtcaccgagcctcacggggaggtaaaccacaaccaaaaggatctgctggtcagctcaggcagtaataactcactaccttgtggtagtccaaagaaatgcaatttgaaaggagcctttgtcaagatgtctggttgtgatgagtccacagaaggtatggtagacatcgtctacacggactgtagtaataagcttgcagaaggtgtgctggacgtgaaggcatctaatctactggattgtggtgcaaggcaagagaaactggcatttcaagaggactccaggagtaccttgtctcggagagaactggatgctgcacatacaggaacaactggtcaggattcagatttcccagttactgctgcttctacagtggactttctcaaaataaaaaaatcatgtgaagaaaacgtatgcagatctttaaaagactgtgaaatggaaaagtgtccagactcttgtgcccatgagatggagtctgttgcagatcatgaaccaaataaaagaatattgggcagagtaaatttgtctttaaatgatagccattatggacagcaagataaaggaacatctctcagagaaacacaagaaatgactgaaggatcaagactagaaccaaactctgagtttggcaaagaaagtacctttggaatttcctcaaaagagtcgatgtcttgccatgatgaaagctctgtttccctaagaagcctgaaatccattgaaataatgccttctcaagaaaattcagaaactaatgttaacagtgaagaaactgacctgaaaaatctttgtaaaccaaaagatggtgaaatgctttgtgaaaatgtaaaggactgcacagtccttcctgagatgaaggaaatagtatcaagagattggagtaattctagtgacagagacagcgtatgtacctgtgtggaaaagaatgcttgcaaagcttgtcaccctcacgagaattcctctgacagacatttgcctttgacagtgaaaacagatattaaagtgaaaggagaagaaaccgaagagcatcagaggggacgactgggttacttaactgttggggagcaatctgaggagttggttaccagagaaactggcgatggcgatcccgtgagcaacatctctcagacccattttaaatgccgggggatacttaatcatgctgaaaaacagcagagccctgaggttttggactacat

SEQ ID NO: 28304 - DNA, 2300 bp, Homo sapien
tttttaagatgtcccattatggacatctctcaggagaaggaatcaaattcccttgagggctaagaagagagaatcctattagcttccccagggatggaagaatgtcccatcaaccaccattgctaaagacaaaaactatcttgggggatctaggtgtatctcctgaagtggcaacatagaaacattttttaacataacattgttattcttaaaaaattttgtaactgttgcaatccactgtatcacatatgttttattacaagataaacaatttcagccaggagtggtggcttggcctgtagtcccagtcccttgggaggctgaggcagaagaatcacttgagcccagaaaattgaggttgcagtgagctatgatagaaccactgcactgcagccttggcaacagagctagacctggtcttgggggaaaaaaaaggcccggctacagtgattggtgcctgtaatcccagaactttgggaggccaaggcggacggattacttgagctctggagtttgagaccagcctgggccacatggcaaaaccccgtctctacaaaaaatacaaaaattagctgagcatgcacctgtaatcccagctactaggaggctgaggtgggaggatcgcatgagccaggcaggcagagatggcagtgagacgggatcatgccactgcactccagcctgggtgagggtgacctcatctcaaaacaaaaacaaaaaaacaaacaaacaaaaaaattgcaattacttaacacttgcattatttacctaacttctcctgagtcccaacataaaggcatccatgcttaagaacgttgcttgtcctgtcccagggtccccttggtccactgcagaatctttcactacagtgtaacatgttttttctttcaacatttttaagttttccaaatccgtaagaaatgggcactgttagtattaaagatataaagaaatttaagacaagtgctgtgtcgtttagatttagcagtcagtgtgattagaagcagcagaggagaggcgtgacccaagacaccgattctagttataaggtctctctggcttcaagaggggaagcagggagtccctatcgagttgctgccgctcaggtcagaaacggtggactggactagggggcgggggtatcagtggcagcaggcggagctggcaattgtcaggagtccttggccagagcctgacccagcccacccagctctctggttttctgcttggagagaaagatatcctgacagacgcgagtttaggcagtgccctgggtatgaccaaaggatgttggttaaaggccccgttctgggaacgggtcaggattcgtccttgcttccttctgaagggttttgtgtcctcaggctgtttcctggtttgtgaaataggatagtatctgcctcctgcatccatcaggtaatagggatgcaatgattacataaggactatgaagccacggcagccattcttattaataacctgaggggcgcagaacgtcgtttagagtttgcaagggtttgaaaagccccccgtaagtggacacttcccagcagaggccatcaccctaactctcgcgtgctcagccccttgcattttacagaagtcctcccagaaactctcgttggcgcctcttagctgcccaatgaggccacatgagtcattaacctcgttcatataacagaaaacggagctctgacggatctcgtttcccctgtggggagatcactgagtcggaaacgaagctctgtggccatggatctacttcggatagactaggaggaaatggatttcctccgtggggcgggaggctctagtgctcgagggcaggaaacgccaggaggtggcccaaggaagaggccgcacacgacgccccgcccccggctcgagccccggatgaggaagtggtgcggccaccgagacgagacggaggcccggcgagagcggcgcgggggcgcgagggcgggaaggaggcggggccccggggcggagccaccggagcggcgcgggttctcaggtgagcgctacacggtcggggcgggcctagtaggcgcttcaggcttaggggcggaacagcgcgggccgcgcgggcgtaggcggggtatctggaggaggcgcagggaacctggagagggtccagccctcagtgccccggccagaggcgggaaggggctctagagcttcggtgagtggagctgcccgccccggactggggattgggggggcttgagataggggaccttggcccaggttcgagttccaggctccatccccattccgctgtgtgaccttggacaagtctc

SEQ ID NO: 28305 - DNA, 2300 bp, Homo sapien
gtgagagcacactgagctgatgggtgggtaggaggtgaggaagaggagatgaggaagtttggtgagaagaaaagcttcatgggagaaccagagtgtcctttacacatgtcagaaatcaattatttagaatgctccagctctacctaattttcactgttttgaaatcaatcttagtccaacctcatcagaaaagctggaagggctctaagccctctaagagctagaaggaaccgaggaggtccccccatccagggctggccctcctcccatctctcactgggaccccatccttatggggggtggagtggatgattcattactatctagcatgctctttaaatatattcactaggggaaagattagcctggtttgttaacctcgattccaacagcaaaagtgactcttcaaagcatggtgaagcctggggtagtggcctcctcctagacccacattcaaatcctgtttcatgggcccccagaagtgtgatcgtttcagcatcatagcaggaagaggaaggcctgggaggcaggaaacctggtatggagaccccagctctgctcactcgctgtgcaaactagggccagcccctcctttccctcagacctcagtttcccgttattcaggataaggggttagacaggggtgattctaagggtcctgccagctctgacatttcagcatgtggatatctattctaaagtccttgaaacagttaagtccaattctccagatggaaaacaggtccagaaaaggcctggtctccagttccctcccttctcccttcgaacatgtcttactctctagagcaagattccaggcctgaaatatggcttcccaattacctaaggatgaagcctcaaatctttggcctggcatttaaaagactccgtaatcttgttttacccaacctcacttcccattcttaggcctctcttctcaccatctcccaggtcactgccaagcctttgccaatgctgtaccccaggccttaatctttttcctgactctccttcaagatccagcttatccctgtgggctgagcatgcagtagatgctcaataaaattctcagcgagcccaaggccccctctcctgcactgcccttggcgtgttgaaatcaagtgggggccttgttttaatcatcattttcctagcttgtcgggcagcccagtccagggcctggcacaagggaccctcagcatccaataccagccaggattgggaggggctcagtgaccagccagttgggccaccccagctctttgccacaagagaaagttcagcctgggtttggactcagatcctggccccaccacttacaggctgcgtaaccctgagcaagtcactaacctcgcttttcctcaggttccacgttttaaatatggggagaccagctgtgcccactgtgggctgggtagtgaggattaaagaggaggatgcttgtacgggactagcactgggctggctcctaatgtgtcctgaatattacttgtcccgccctggccacccagtcccctcctctggtggaaggcacagcctgcccaaggctacgtctcaggttgggttcgattgtgtgtgtctgtgtagcggggctgtccccgagggtcggactcgatcctgcccggaccagtacaaggtgtggcccagcagaacgcatggacaggcagggctcggggcgggcgggacggctggggcggggctgggcggacccgcccctcggggcacgcggtctcccggcttctccgccagtatgtttgcttgcttttggggcccttctcaagccagatctctaacgtggatggagtggcgcgtttcagggtggggctatgacaatgcactgcatgtgcagccgccatcaccgcgccccctccaccggctccgcagtctcctgcccggctttcccttctccacctccatctctgcggcggtaaaatgcagcactcgcagagcgcctgcgcggctttcaggccgggcggcggcggcggcggtggctatttatagtaggtgacgtcaccttgaaatagaccgttagggccggcccgcccttcccccctcccactcccgccgctccccgccgcccggcctggccactctcactgcgcaggcgtcgtcccgtcctcccatcccccagcgcggccgcgtctcctccctcggcgttgtccgcggcgcgagccacagcgcgcggggcgagccagcgagagggcgcgagcggcggcgctgcctgcagcctgcagcctgcagcctccggccggccggcgagccagtgcgcgtgcgcggcggcggcctccgcagcgaccggg

SEQ ID NO: 28306 - DNA, 2300 bp, Homo sapien
aggaagaggaaggcctgggaggcaggaaacctggtatggagaccccagctctgctcactcgctgtgcaaactagggccagcccctcctttccctcagacctcagtttcccgttattcaggataaggggttagacaggggtgattctaagggtcctgccagctctgacatttcagcatgtggatatctattctaaagtccttgaaacagttaagtccaattctccagatggaaaacaggtccagaaaaggcctggtctccagttccctcccttctcccttcgaacatgtcttactctctagagcaagattccaggcctgaaatatggcttcccaattacctaaggatgaagcctcaaatctttggcctggcatttaaaagactccgtaatcttgttttacccaacctcacttcccattcttaggcctctcttctcaccatctcccaggtcactgccaagcctttgccaatgctgtaccccaggccttaatctttttcctgactctccttcaagatccagcttatccctgtgggctgagcatgcagtagatgctcaataaaattctcagcgagcccaaggccccctctcctgcactgcccttggcgtgttgaaatcaagtgggggccttgttttaatcatcattttcctagcttgtcgggcagcccagtccagggcctggcacaagggaccctcagcatccaataccagccaggattgggaggggctcagtgaccagccagttgggccaccccagctctttgccacaagagaaagttcagcctgggtttggactcagatcctggccccaccacttacaggctgcgtaaccctgagcaagtcactaacctcgcttttcctcaggttccacgttttaaatatggggagaccagctgtgcccactgtgggctgggtagtgaggattaaagaggaggatgcttgtacgggactagcactgggctggctcctaatgtgtcctgaatattacttgtcccgccctggccacccagtcccctcctctggtggaaggcacagcctgcccaaggctacgtctcaggttgggttcgattgtgtgtgtctgtgtagcggggctgtccccgagggtcggactcgatcctgcccggaccagtacaaggtgtggcccagcagaacgcatggacaggcagggctcggggcgggcgggacggctggggcggggctgggcggacccgcccctcggggcacgcggtctcccggcttctccgccagtatgtttgcttgcttttggggcccttctcaagccagatctctaacgtggatggagtggcgcgtttcagggtggggctatgacaatgcactgcatgtgcagccgccatcaccgcgccccctccaccggctccgcagtctcctgcccggctttcccttctccacctccatctctgcggcggtaaaatgcagcactcgcagagcgcctgcgcggctttcaggccgggcggcggcggcggcggtggctatttatagtaggtgacgtcaccttgaaatagaccgttagggccggcccgcccttcccccctcccactcccgccgctccccgccgcccggcctggccactctcactgcgcaggcgtcgtcccgtcctcccatcccccagcgcggccgcgtctcctccctcggcgttgtccgcggcgcgagccacagcgcgcggggcgagccagcgagagggcgcgagcggcggcgctgcctgcagcctgcagcctgcagcctccggccggccggcgagccagtgcgcgtgcgcggcggcggcctccgcagcgaccggggagcggactgaccggcgggagggctagcgagccagcggtgtgaggcgcgaggcgaggccgagccgcgagcgacatgggggaccgggagcagctgctgcagcgggcgcggctggccgagcaggcggagcgctacgacgacatggcctccgctatgaaggcggtgagcgcgccgggagcccgggcggctggccggggggggcctggcgttggggagggacggggatggccgcgggcgcgttcccctcccggccatgggcgacccggcgacccggctgggcgtggccgcccgcccgcccttagcccgcgcttcccgctcccgctgggcgccccgccacttcctgaggctgggcccagggtgggggatccgggagggtgcagttcgggatcgcgaaggcagccccggaaggggggcgggccggtcggggtcgccacatcttagttcggaacccggccgggggcagagggtgccctaggggacgcgaaggagccgcatttctcctagagc

SEQ ID NO: 28307 - DNA, 2300 bp, Homo sapien
aacatcaatcattacaggaaggcagtattatcaagtgagcattttaattatgaaggaaacagaaaacaagttagaagactgaaggcaaaactgacttgttaataacagcaacatcactagttttatacttcagaggacctaaagccaagatgtaagtttcaaggttacagactggtggcatcagaatatatccttaacacatgtgtcctgctccatcctccctacagcaggctacttacctgcccttccccagccctgaagaaagcccaggtaaacccagagggttactgaaacttacaccctttccaaaagccttagttaaggctgatgagattaataacatagagactgagtcatcccagtaacattaagaatttaatctacaaacaccaagttagcagggaaagtgacccctgccagtcccttccaatatattcttttttttcttttaaagaaaatacctataagcacaatatattccatttagatgatgggggagaaatgggtttatcaccattctgagatggcagaattaaagcttggattgactcttctacgctgggtggcttttccaactcattaattatttcaaatatagatattatagattcctttggtttacaaaaggctaccttaaccctccagagaagatctatggacacaagtagcttgctgcaggaaagcattttacaagcctactagaaagccagtctttttctctgctcaaactagatttcgttctggtaacatctctccattcttgcctttttcccccatttcaagttgcctcaggtttctgattgttccagaacacaccttctagccatttttccttaacctccatttccccttcctttaaacctcgtccctcctttcttttcaccacatttatttcccaaagggctccgaacactgcagtctttacgtctcacttagagggtgagcaaccacttcatgaaaatgtgtggagaggcctcagcctgcataatcccagcaccactcagttactggggaggaggggcttaagtgtgacctgctgtggacagaggcagctttatcccacagaaaattaaggttcagggtcccttccaaggaaatgcattcgtcagtcccatttttgtaaaatatgcaaaactatattttagattttcttttaaaggaccccctgaattacataaagttcagcctccagacctagaccgtcccccggtctggaagaaaacctgcctcaccacaacagcatgctaatagtgctcaagtcaagatcaccaacaaatcaacatacgggcaacggtgttgctggtttccaaacacacccagttatgtgtgtaacaaggacaccagaggaaaggcaactcttcaagcacctttcttacctgaacaatcctaaatattggccccaactacatatttcatctgatattaacatcaaaagccttcaaatgagctttccaaatgacttaagattttagggagcctttgtattggcagttttttttcggaactccctccaaaaggccagcaaaggatacatttactataatcatgggcagtaattctcagacttaagccagctaaaaatcgcctgtgagagctggttacaatgcagatgtctgagtctcaccgcccgaatttctgaatgtataggtctaaggcggagttcaaggggatcctcccaggtctcaggaggttgtacactgaacataggttggtggtcgcagttgttctaccactgtgtgaccttgacgcagggagaggaaatattcatttacagaaaacgtaaaataacgtggagagagagtgagatggtaaccggaactcagaaatgcaggtggtgtgtgacccacggtattttgctagggtgtggctgggcacgactcatccaccggagaagctgcagaatcgatttatgagggtctcaggaatgcaaagacacacagattcgtctcacctagaagtcacgtttcattttaatctccaagcagacagcgcagcagcaaacctggggctgtggagtggggccccacaccctccgcccactctcccgcccccgtccacgcctagactgcaggaaaggggtcttcgcacacaaagccagacccccaggcgtgggaagatggaaccagaacaattcgaacgagcagagcaaaacagatcggaattgcagacttcaggtcgtggcagagaaaaccagctgagacagggcgccacttactaggtgattctttattccaagttggggaacggaggaagacgagagggggagcccccgggtccggtgaaacgctctaggagaaatg

SEQ ID NO: 28308 - DNA, 2300 bp, Homo sapien
gcctattcctccttttctttcaggtccctgctcaaaccagagctttcacagaacttactctaacctcaccttatccccaggttgaattccttggtaggcatttggggtattagtatttctccttcaaagcatgtgtcacaatggtaatttcacaggtagttgtctcatctttgatgctgatctatctctgtcattggtcaggaagctctgtgagggcaagagctctgtgtcttttcatagctgtattccagggtcggtacatatgatctggcacatagaagctgctcttttgttgtaagaataaatgaatgaatgaatggatgcattttctgacctctacctgggcaccatcctttcctttcttttcccatttatgtttggctctcctaaaagatcaaagaatggctctgtccctcctttgaagtcctttagtacttccagttctctctcctgctcgcttcactttctatgccttgtacttttggaacttggcatggcctggctgcctgcacctgcacctgggttcagggctggacttttcctgtgggtgggttcacttccagactagaacagaagcttcctaagggcagggactcttcctgggatacattcaggtgaaaaaacttggctgaatgcaggaatgaatgaacacaggcaaaaggcgagttgctccaagctgcagctgacagctgagctctaagtcttgggaggcatccacagcagacagcccctgctttcaggttcctcgtaagaattcctgcttcctttgggcaggcattatactggccccaggacatagccttatatagtttgcagtcctgggggatgtgtgggggaaatggggaagacctgtggggatgctgtccaaataatgattctttgtctgcagcttcagtgggaagaacagttgctgatacggaaggaggggaggcagacctctgaagcattgagtgcaaaggaacaggatgctcacatttaggcagtgggtggttgtctagcagtgggcagggagggcctgaggcagaccagagtcctggcagggtttctgtggtcctctgcctccctgcacctccccatcagagcaaggcccccctctttgggaacagtcacttttggctgctctgtggcctctagagccagcccctgagaataccccacagccctccctctgaaccctggcatgggctgcagggccagctctgctgctggtttcctgtatgaccttgggcaagtcatgcctcctctcttggtcatctctgttctgagccctggcttgctgtttagacatgtgtttccagatgggtgagctgagtccccaggaaggtcagggtttgatgaactccttggaaagggttctctagtatcttcccttctgctgcctctggagggccctgcatcaatactgggagagggacagggcaaggaaatagctcccggtgagatcccttcccccagtctcagtttcttcctctttacagtgggggtaacagtggacctgggggctgcaggctgtggagggggagtcaggaatgtgggtgggtgggtggctgtccttgtggccaagagattaggattgtgctggtttttttccagtgacacccagcaactctctgtcctctcaagaatgttctccagggagaacaagacttgactgattcttcagaagagtgctgcacccattttacaagcggacaagccaagtccttagaaggcatgggactagtccaaggatgggtggcaggtgatctgaagcctctaggctcctagccccaggtggcctgttccctcaatggagccactccagctctggcaagggcaggtgtggtggcgctgctggtgcctgctgtgggagtacagtgggcctttgtgccaggcgggcaccaccccctggctggcccctccccattcgcaggacagctcttacctgccgggccgccgccccagccaacagctcagccgggtgctccttcctgggctccacgcccggagctgcttcctgacggtgcagccgcaaggcatcgcaggggccccgcgctactgccctgctccctcaaagtcccaggtcccctcccctggtgctgatcattaaccaggaggccgtataaggagctagcggccctggcgagagggaaggacgcaacgctgccaccatggacagtagcacctggagccccaagaccaccgcggtcacccggcctgttgagacccacgagctcattcgcaatgcagccgatatctccatcatcgttatctacttcgtggtagtgatggccgtcggactgtgggtatgcagcgggttc

SEQ ID NO: 28309 - DNA, 2300 bp, Homo sapien
ccacctccattccgatgagtctcaccagatcagccattgctgatgaacactcaggtgccctgactctcacttttcacttttgcaggctttacttcatgccacatacatttccctattccccaagcctcctttctctccaacccctccccttattagacacagctttttaaagcagtcacggtcttacccatggcttcaattgttttctatatgctgttatgacaatagaatttaaatgttgttcttatataacagttttattttacgtgacacctcattcgctacaaccataaattcaaagtttccctaagaaagtaatcactaaaaaactattatattcttagtatgtaaatgttaggaaatttccttaatggtttgagttactgtgtgtgtgttacttttgaaaacatgagttgggatgtcacagaatggacttagcctacagaggtttacatccaattttcaaccagacggttccatttcaatgtgacatttaaagagttcaaaactgtctcattccccacacctctttctcgtcctacattctctgtctaggggagaatcactgctatttacacagtccatcaaactagggccttagcagcctgtttttccttcccctcttcttccacgtctaatcaccaagcacttcctgttctatctcccaaatgatcacaaaacttttccttccacttcagtcactgctgctgcctttttagccttactgttctccagatgaacatagagtatcttaatcagccccactgctttcataaagccctctccactgcgcagagtgacgtcactgcaagcacatcggatagagactcctcacccctgtgtggttcagtgactctcgtttccagaataaaattcaaactctaccccagcatctaattttgggtcagatagatctgcattttcattccaggttgattcactgtccagcagtgtagcctcagataattgaaccctctaagcctttgtttgctcatctgcctgaactcactgagggttgggactgtttcacacatgcagtattggcacttagacttaatgttgaatgaaggggaggcattttaaaattcacatcaaaaaactgttattctttaaaaaaaatactaatctacaaggtcacttcccctccaagcatgacgtctacctttactttctgataatcatgatcggcttgtggggatcaagattactcaggattaaattctggccccatcttgagccgtcatggaaacttggggaagctacttaacttctccatctagattgattctgcaaaatccgtaaaatggaatggtttctgggggttaaattagtataccactgttggaatactgtcaggcttgccagatatttactgttcatcttcatcaaatgaggacagtggtatcccactatatggttttcaattttgtgtaagaaaaacgtgctttatgcattgttagtaaaagaaatatctgaatatccctgccatggaagaaagaaacagagggagaaaagagagttggtaggtcctagcatttcagaactgggaaggatgagttcagtccctattttatagacaatgaagggaaagtgtgatgtgtcctagggtttcattcaagtcgcagtcatcacgctttatcgagagtgggaccagggctctaggagttgctgtggtcaagttgaagacaaaaagtaacacttgtaagacaggagagaagcatttacttacaaagcagtccgaaatttgtgtataactacatttggtgagcaaacgaaagctgccagactcagaaaaacagagatgctaatggaactgactttagtaaccagggttttctattgagttcattgcccagggtgacttccaataacaacctccaacccctgcacttttctcaggactggaaagctcaggcagcccaggatgaataatgcagtcaccacagagggacagggtggccacaaggtgggcagcagcagggatgggcattgtgaggcatttggtgggtctgtggggtcggccattgtgagccactagcctgacttggttgtttcctggcaaccaggtgacataggaggttttgtggttactaggcaacggccagggccagcagccttcagtcggtagctggccgtagaaggaggaggagctccgactacattctgtccttgtgcctcttggacttttttgtgtgtttaggtgcccaatggggagcaaactgacttgctgcctgggccccagcgggggcctcaactgtgactgctgcaggccagatgtgggaccctgccatgagtgtgag

SEQ ID NO: 28310 - DNA, 2300 bp, Homo sapien
ggaggctgaggcaggagaattgcttgagcccaggagccggatgttgcagtgggccaagtttgtgccactgcactccagcctggctgacagagcaagacactgtctcaaaaaaaaagaaaaaagaaaagaaagaaatgtttagagtgtgctaattatcctgacttgattattatacatgcatgtatcaaaatattactgtgtgccataaatatgtacaattattacatgtcaactgaaagtaaagaggaaaaaaaagtaaaccaaaacaagacctgagtgtctcagagtcctctaatcccatgaggaatcatatttaaagctgaccaaaattaggtctttatttttaattacgcaaaaagagaaaattcctttaatatgtgccaaagggatagggaaaatgataagattatattcaaattatttgaaatttgaaaacaaagcagtaaagatcccactacacagaaaggcatgaagacgaaaagattcggggttgattcaaatggaagaaagcacaactcacttcacgggtaacaatttttatttgaaaacacaggtttcacaagaaaatcatctttttttttaaattgtgacttttatcttaacactctgtgaagtactcaaggtccaagaagcttaatggtcatttgtcaaaatagtaattatctaattttttcctatgaattatgaaattttttcaaagccggaaataaaccaatggaaacaaataaaaagtacctagaatttcctcaatggaatgcctgcccttattacctttgagtctgatgtatatgaatttaaaccattttgtaaaattgcaaatccaatcacacttaatactttaggattccaagcaaagcttgaagcctacaacatattacaggaattatctttactgacaactgatggaaacatctctaaaataagcttttgaagttagtacattaagcctaatttaatataaaggcaatttaatcttaccttcatatgaaagaaaaatacactgtcaggatgaaggatttactgaagttataattaactggagatatatcaccagtaaaaacctaattccctgttataattaaatcaaagcctcatcaggttagagggtgtggaagggcgtgacccagtgggaggtgggaatctcaccaataaaaggccctcgtgtgccccttccccacaagacctgagcgcccagtggaagcagctggaggacagaggagcttccagcagaagaggtgagcccatgcctgtgtgtgtgtttttcctcttagatgcctagaaatgggggttatgacttggggggatgaatgagagaaattcgtaattaatgaattcaacaaaggccgtctgagtgctgcctcagagttggaaaccagtcaccctggatccccagtctaggagtgtaagagtggtggcagtcaatttggtattcacttccaaggctggagaaggatgtaattttttttatttttttatttttttattttttggtgagacgggtcttaactctgttgtccaggttggagtgacttggcgtgatctctgctctctgctaatttttgtattatttgtagagacagggtcttcctgtgttgcccagactggtctcaaactcctcggttcaagggatcttcctgcctcggcctcgcaaaatgctgggattacagatgtgagctactgcatccagcccctcttttttttttttttttttttttttgagatggtgtctcactctgttgcccaggccagagtgcaatggcaggatctcggctcactgcaacctctgcctcccaggttcaagtgattctcctgcctcagcctcccaagtatctgggattacaggcatgtgccaccacgcctggctaattcttttgtattttcagtagagatggggtttccccatgttggtcaggctggtctcgaacttttgacgacctcagatgatccacccaccttggcctcccaaagtgctggacaggcatgagccatcgtgcccggcctcccagcccctaattcttatgttcatcaatcagtctcttgctggggttcccctaggaggaggtgaaatgaccccagctcgctgttcctcacatgggtgctgccatgtcactggctcaggctcagctgctgggtcaccaggagaatggacgcttcctccacctcagctcagagcacagtgatgattcgtgactttcccaatagaacttcaaatctctgaagacggggggtggggggatgtgcttgagtgtttgtactcatggtcttattctcggagtgacaaagctggaacacaatacctc

SEQ ID NO: 28311 - DNA, 2300 bp, Homo sapien
cctgtccccaacaagggcatcagggcattgcagcacctgatagttctactaactcacccccgccccccggccgcgggcagtgcatccccagatagtgcccccaaaactccccactgccgcaggaattacagcttcggatagcgccccaacccatctccagccataggctggatagcgcccccggatagcgcccccaccccactcccctcagcgggcagtgacgcccgaggtaccacactcaagcagccccccaacacgggcagtgacgccctggatagggcccccaacccgccccccacgccacaggcagtacggcctgggataacgaacctattctgccaccttttcaccattctggctgcgctgtagtcaccctcgcggccaccaaccgcagcagcgaggtgagccactgtaggctccagcctccagcatgcgcggtagatgactctagcctctggcatgcgcggcaagtggctcctcctccttctcctctaagccgggcacagagcagctacgcaggccgacgcagatgagcctggaagggcaagccacccctcttggcatcctttatatactgagtttaatgcaaatgaagtttctcgactacatagtctgatcggatgagagaaacctctaggcctactctgatcgggctttgttatcttgttctgattggttatcctaagacttgctgtcatccagtcagaacgtgaaaataaagcacaatcagagtagacctagaggtttttctctcatccaatctgaacatgtagtccagaaaccttacttgcataacctcggtctgtggggggaggggttcttgccattccaggcacttctgcgtctgccagcccatctgctccatgcccaggttagaggaggagtcacctgtcccacgctggaggcttgaaagcctgcagcagcatggctcggctcgctgccgttggtggcggtgagggagactagaccgcagccagaatgtagaaaggtggcggggtggatgagctatccagggctcactgcctgcggcagggggcggggagggggacaggttggatgcacgatctggagctgcactgcccgaggtgggagcgggggcggattgagggcgccatcgtgggctacaacccggtggtgggaggcgtgttaggggcagtattgggtgctgcactgcctacagcacgggaaggttgggtgctttaccggacgtcatttcccgcagccgcggggtggcttgctgggggcgctatccgtggctgcactggtcgcgctggggtacgggttgggggcgctatctgggacatcagtgcgcatggcagggaacttgttggctgtgatatccgaggcgtcactgcccttggctgggggctggttgggggctctatctatgggctacactgcctacagccaggagcgtgttggggcgttatcggggcggactgccagtggcgggggtgggggtgcgggttgggtgctatcggggggcttcactgcctggcagggagtggattgggtgcgctatttggggttggactgccggcggtggttgactcggtgggaggagaggggcagagggaatgggttggatgcactatcgggagctacactgcccgaggcgagggggagatgggggcgccatcgttggctacaccgcatgtagtggggggcgtgtaaggagcagtagtgcgtgttgcattgctcatggcgggggagggttgggtgcgttatcccgggcgtcatttcccacagcggcgggggtcagtggaggggcttgttgagggcgctatccatggctgcactggtcgctgaggggcaaggattgggggcgctacctgggacatcagtgccatggtggggaacttgttgggtgtgttatccgaggcatcactccccatggctgggggctggttgggggcgctacccatgggctgcactgcccacagccaggagcgtgtatgggacattatcgggggcggactgccagtggctgggtggggaggcgggttggatgctatgtggggttgcactgcccagcagggagtgagttcggtgcgctatctggggttgcactgccggcggtgggtggcagattgggtgccctatcgctacactgccgcggcgagtaccgggttggcggcgctatcctgggctacaccgccggtggcgggaggcgttttaggggcgctatctggtgctgcactgcccgcgcaggagttgggttgggtgacctactccaggcgtcactgcccgaggctgggggctgatttggggcgctatcccgggagtcatttcctgtggcg

SEQ ID NO: 28312 - DNA, 2300 bp, Homo sapien
ctgacacctccacccacagggccctgtcactccatgatgtccgctactgtgtgcccaggggtcccagacggtctcagcaacacatggtgagagggcgcgcgcctgggaaccacagcaggtctaggggccgggccgtgctcaggatccccgcagaaatgctgtgtgctggccaggagcagaaggagatggccctctagagactggagtccctctcacctcctctgaccaccgctgtcactgacacctccgctgcccaccaccagggggacggtgcagcccccgatagcgcccccgaccctcccccacagctggcagtgtagcaccagatggcaaccccaacccgcccctgcctcggacactgcagcaccaatggcacccgcaacccaccccctgccttgggcagcgcagcccgggatagcgcccccaacccgctccctgccgtaggcagtggctgtagacagtgtagccatgggtagcgaccccaaccagacccctgccgtgggcagtgatgccccgatatggcacccaaatcgccccctaccccgggcagtgcaaccctggatagtgcccctacctgctccccaccaggagaagcagcccaggatagcaccctcaacccacttcctgcctccaggcagtgcagccacagatagcacccaaacttactccccacctcgggcagtgcggccacagacagctcacctaaaccaccccctgccaagggcagtgtagccccctatagtgcacccaacctgcccctgctgcagccagtgcagccccagatagcacacccacccgctccctgctaggcagtacagacccctgatagcacccaacccacccctccaccgcaggcagtgtacccggccctcaatagcgcccccaaccaacgcccccaccccctctccatgggcagtccagccccggtaccaatcccaacaaccccccgctacctgtctcagtgtagcccccagagagcgccctcaacaaccccctccccactgccagcagtgtagcaccctatagtgaccctaacccgtcccccaccaccagcattgcagccccaaatagtgcccccaacccgctccccactgtgggcagtgcagccatggatagtgtccccaaccagctcccagatgcaggcaatgatgccctggatatcacgcccgcccccgtcccccacaggcagagtagcaccggatagcagcacccaccctcgccaccagcagtgttgcacccaccagccccccacaacctgtccccaacaagggcatcagggcattgcagcacctgatagttctactaactcacccccgccccccggccgcgggcagtgcatccccagatagtgcccccaaaactccccactgccgcaggaattacagcttcggatagcgccccaacccatctccagccataggctggatagcgcccccggatagcgcccccaccccactcccctcagcgggcagtgacgcccgaggtaccacactcaagcagccccccaacacgggcagtgacgccctggatagggcccccaacccgccccccacgccacaggcagtacggcctgggataacgaacctattctgccaccttttcaccattctggctgcgctgtagtcaccctcgcggccaccaaccgcagcagcgaggtgagccactgtaggctccagcctccagcatgcgcggtagatgactctagcctctggcatgcgcggcaagtggctcctcctccttctcctctaagccgggcacagagcagctacgcaggccgacgcagatgagcctggaagggcaagccacccctcttggcatcctttatatactgagtttaatgcaaatgaagtttctcgactacatagtctgatcggatgagagaaacctctaggcctactctgatcgggctttgttatcttgttctgattggttatcctaagacttgctgtcatccagtcagaacgtgaaaataaagcacaatcagagtagacctagaggtttttctctcatccaatctgaacatgtagtccagaaaccttacttgcataacctcggtctgtggggggaggggttcttgccattccaggcacttctgcgtctgccagcccatctgctccatgcccaggttagaggaggagtcacctgtcccacgctggaggcttgaaagcctgcagcagcatggctcggctcgctgccgttggtggcggtgagggagactagaccgcagccagaatgtagaaaggtggcggggtggatgagctatccagggctcactgcctgcggcagggggcggggagggg

SEQ ID NO: 28313 - DNA, 2300 bp, Homo sapien
cactgagccatgcttacctcactgcactccagcctgggtgacagaatgagaccctgtctctgagaaataaaaaggaaattctacaattcaacagcaacaaaaatacaacataaggctattctgggtacactgccaatgaggtagtcctgctccacaaggagcagtgtaaaaaagaatacaacataatttttaaatggatgaagaagttgaatatatctctctccaagaagatgcacaaatggctataagcacatgaaaaaatcaacactactagtgattgtgttagaagtgtaaatcaaaactatattgtgatacccacttgatacctactagcctgtctataattaaaacataaatgacaagtattgaagaggatatggagaaattaactctcctatgcactgtggaaagaatgtaaaatagtgcagctgctgtgaacaacagtttggcagttctacaaaaagttaaacacagaattatcacatgcaattccacttctacatatagactcaaaagaattgaaagtagggattcaaacagatccttgcacaccagtgttctcagcagcattatttataatagccaagtatagaaagaacctgaatgcccatcaacagttgaatggataaacaaaatgtggtatatatgagtattggaatattattcagccttaaaaaggaaggaaattctgatacatgctacaatatggatgaaccttgaaaatgtcatactaagtgaaataaaccaaagaggaaaatattgtatgatttcatttgtatgaggtacctagaataggcaaatttatatagtaagaaagaataacagaggttaccagggcctggagagagggagggatggggagttagtttttagtgggtacatacttctgtttggagatgatgaaaaagttctggaaatggatagtggtaatggctgcataacactgtaaatgtacttaatgccaatgaattgtacacttaaaagggattaaaatggtaaattttatgctatgtatgctttgccacaataaaaaatgaagtataaaagaagaatttctgggctttccgttttttcatgtgtgtttttggttttgtttttttgttgttgttttttttgtttgtttttgagacaggatcttgctcagttgcccaggctagagtgcagcggcgtgatcatggctcactatagctttgacctcccagtcacaggtgatcctccctcttcagcctcccaagtagctgggaccatacgtgtgcatcaccacactcagctaatttttatagagacaaagactccctatgttgcccaagctggtcttgaactcctggcctcaagtgatgctctctccttggcctcccaaagtgctgggattacaggtgtcagccaccgcataggctttacttctaacttcttcttggctgtagtccaggagtcttgtttcctgagtcctcatgatccccatcacatgcttccaggttgattcactctttgtacaaccctctgacccagcgctctccacagctctgccctcaactcaccacatatggtgcttgaagagccacttcctttcctatacaggccaccaatgtctttttgtggcacatgaaacccacttcagagaaatgtgggactttggaatccacgaaaggcataattcacttcactgtcaagggatatagctcattggtcagaaactgtatctgttctctgaaggaccattgcattcggtccctcctggctggtttctggtaccttctagtctgtccttctcccctccttgtctgtcttcatttctctcaaatcccccctccacctgggcaaatctctttaaagaccctgtctttgcactcagagaacgccccatgctccacctcaaattctcccctcatttctggccctgcatccctcattctcacactctacctaggctagcactcactggtggagggctggggtgccacagctttggagaagaggtttaaaggtctccatatccaggagctggctctgatatctcgccccacctgcctgaggctgatcattaacccagaacttatataaagatggctcatgcgtggaatgggtatagcactgcctgcagccatggccagtacggttagccccagcaccatagctgagaccccagagccacctccattgtctgaccacatccgaaatgctgctgacatctcagtcattgtcatctattttctggtggtgatggctgttgggctgtgggtaggtggaatcccagtggcttttagggtgggcacaaggtttaggagggggtatcttaaggg

SEQ ID NO: 28314 - DNA, 2300 bp, Homo sapien
acacctgaccactgcactgcctgtgccctggcggcagccagccgccatcctaccgctctggtgctcttcagttttcattgccgccctcctaccactccagcgctgagtctttagtctccatggccgccaccaaccacagcgaggcgagcggtggtgccacaagctccagcctccagcaggcggctcctcctcctggcatgaaacaactgggcaggcaaagccaagaaagcctagaacaggatgcagagagtggtagcgttagagcctcaccttggcatgctggccactggatggcagaggccggtttcagcgaaggcactcacgcccaccctccaaagtccagcctctccttttggcccaagttggccaggaactagggcctggagtggggactggagacaccacagtgcccgggcttcctactctactagaaccgctgggcccaccctggctgcgttcctcgggaagcaggagcagcaaaaactgaaccccagccagccctcccaaccctagtgctggttcccgttcctgacgcctccacccacggggccctatcaccccgtagtgtcagctactgcgtgcccgggggtcccaggcagtttccgcaacacatagagggcgcgggcctgggaaccacggctggtctaggtgacggattgtgctcaggatccccgcggaaacgctgtgcatccgccgcgctccagcaggaggagatggccctctagagtctggagtccggggagacgaggaccgctcctctgaccacccgtcactgacaccaccagcaccaggggggcagcgcagcccccaacagcacccctaacccgccgccggcagtgtagcccccagatagcgcctccaacacctcacccccaaccaccggcagtgtagcatccaatggcgaccccaacctgcccttgcttcggacactgcagcacccaatggcgcccagaacccgccccctgccgcgggcagtgcagcccgggatagcgcccccaatccgctccctgccgtacacagtgtagccacgaatagtgcccccaaccagacccctgctgggggcagtaatgccctgatatggcacccaaaccgccccccaactgcgggaagtgcaaccccggatagtgccccaacctgctccccactgggagcagcaacccagggagacgccccaactcactccctgcctccggcagtacagccacagatagcgcacccaacccaccccctgcgcgggcaaggtagcccccgatagcgcacccaacccgccccgccggaaccaatgtggccccaggtagcacacccaccagctccctggcacgcagtacagacctctgatagcacccaacccgccccctcccaaaacgggcagtggatacgtccctcaatagcgcccccaaccagcctcccaccccctctacacgggcagtctggcccccagtagcactcccaataaatcctgctatctctgtctcagtgtaggccccagaaagcgccctcaacacccccctccctgctgccaacagtgtagcaccctgtaatgagcctaacccgtcccccaccacagcactgcagccccagatagtgctgccaacctgctccctgctgtgggcagtgcagctatggataatgcccccagccagcttctagacgcaggcaatgatgccctggatataacacgtcccgcccaccgcaggcagagtagcacccgatagcgcccccaacccgtgcctgacaagggcaatgcaacacccgatagttcttccaactcgcccgccggccacggccactgcatccccagatagtgcccccagaactccccactgccgctagcagtacagcttgggatagtgctccaacccacccccagccacgggcagcgcacacccgatagcacccccaacccactcccctctgtgggcagtgaggccccagataccacatccaaccagcctcctaacacgggcagtaacgccctggatagggcctccaacccaccccaccacgccacgccacaggcagtacggcctgggatggcgaacttttcccaccaccattttaccattctggctgcgctctagtctccctggcccgcaccaacggcagcagcgaggtgagccacggcaggctccagcctccactgtgctaatgaagttgctcctcctccttttcctctaagcttccagactccagtgtgctcaggaagtgactcgttttctttttcctctaagccagtactaaccagctacacaagctgacgcaggagagcttggaatgacaaaactccccccacttggcat

SEQ ID NO: 28315 - DNA, 2300 bp, Homo sapien
tctactagaaccgctgggcccaccctggctgcgttcctcgggaagcaggagcagcaaaaactgaaccccagccagccctcccaaccctagtgctggttcccgttcctgacgcctccacccacggggccctatcaccccgtagtgtcagctactgcgtgcccgggggtcccaggcagtttccgcaacacatagagggcgcgggcctgggaaccacggctggtctaggtgacggattgtgctcaggatccccgcggaaacgctgtgcatccgccgcgctccagcaggaggagatggccctctagagtctggagtccggggagacgaggaccgctcctctgaccacccgtcactgacaccaccagcaccaggggggcagcgcagcccccaacagcacccctaacccgccgccggcagtgtagcccccagatagcgcctccaacacctcacccccaaccaccggcagtgtagcatccaatggcgaccccaacctgcccttgcttcggacactgcagcacccaatggcgcccagaacccgccccctgccgcgggcagtgcagcccgggatagcgcccccaatccgctccctgccgtacacagtgtagccacgaatagtgcccccaaccagacccctgctgggggcagtaatgccctgatatggcacccaaaccgccccccaactgcgggaagtgcaaccccggatagtgccccaacctgctccccactgggagcagcaacccagggagacgccccaactcactccctgcctccggcagtacagccacagatagcgcacccaacccaccccctgcgcgggcaaggtagcccccgatagcgcacccaacccgccccgccggaaccaatgtggccccaggtagcacacccaccagctccctggcacgcagtacagacctctgatagcacccaacccgccccctcccaaaacgggcagtggatacgtccctcaatagcgcccccaaccagcctcccaccccctctacacgggcagtctggcccccagtagcactcccaataaatcctgctatctctgtctcagtgtaggccccagaaagcgccctcaacacccccctccctgctgccaacagtgtagcaccctgtaatgagcctaacccgtcccccaccacagcactgcagccccagatagtgctgccaacctgctccctgctgtgggcagtgcagctatggataatgcccccagccagcttctagacgcaggcaatgatgccctggatataacacgtcccgcccaccgcaggcagagtagcacccgatagcgcccccaacccgtgcctgacaagggcaatgcaacacccgatagttcttccaactcgcccgccggccacggccactgcatccccagatagtgcccccagaactccccactgccgctagcagtacagcttgggatagtgctccaacccacccccagccacgggcagcgcacacccgatagcacccccaacccactcccctctgtgggcagtgaggccccagataccacatccaaccagcctcctaacacgggcagtaacgccctggatagggcctccaacccaccccaccacgccacgccacaggcagtacggcctgggatggcgaacttttcccaccaccattttaccattctggctgcgctctagtctccctggcccgcaccaacggcagcagcgaggtgagccacggcaggctccagcctccactgtgctaatgaagttgctcctcctccttttcctctaagcttccagactccagtgtgctcaggaagtgactcgttttctttttcctctaagccagtactaaccagctacacaagctgacgcaggagagcttggaatgacaaaactccccccacttggcatcatttatatatgagaatttatgcaaatgaagttcctgggctacatgttctgattggatgaggaaaacctctaggcctactctgattggactttgttatcatgttctgattggttgtcctaagacttgctctcatccaatcagaacatgcaaataaagcccaatcagagtagatctagaggtttttcttctcatccaatcagaatatgtagtccaagaacctcatttgcataacctcggtaaggggaagtctcagttccaggctcttctaggctatgttctctgtctccacaccttcctctcagacagcagctggagccccagaacctgggagcctcacagagaaagtcctgatgtgggacctggttttccacccgagacccaggatccaataaagaagtgtttccataaatgatgcatcctcc

SEQ ID NO: 28316 - DNA, 2300 bp, Homo sapien
gcgagactttgtctcaaaaaaaaaaaaaaaaaaagaaagaaaagaaaagatggctggcttcaacactgagaaaaccaactctccttgagcaaatgctttgcatattctcatagaaataagggaacacctattaccctccttgcactgcttcctgcacagctgggatactacctttcacaagcatcctgagccacctgctggccttttgtgtgtgtttccttcctggcttcctcccatttttttttccatctctgaacctgctgtaaggtgaagaattgaggcgggccccaaatgtaagacctcatgaatttgacgatgcaacagtgtcctggacagcctggctctcagggctggggagctgggcagagagaaaagagggcattccaggggccagggagctccaggcccagagtaggatttcaaggctaaagaaacagaggctgtgggtgggtagagggtcttgactagggtagggacagagggtgcgtcttaaggctcagctagggacagcttcatccaggaagtagtcagcaattgggggccaagctgcaaggaggaagaggtggggagagagaatggagagagaggtgttcagtgatcaaatgcctggcctggcctgtttcctcaggagacacccctgggagtctgggagcctctcccccgggctgctatccaacagggtgcaagtaatccccccttacacacactaagaacccagggtgagtgtcaaattatatgttagctaagaaatgaagagagggagcaggatttctggttgacggtgaggatatttattaagggtttactggtacaaggagaggggctggatgatttggggtgggaggggatctctgttctgggatcctgcagctccaggcccccatgggtggggtgagggtcagggacctaagaacattcttcaggggccactgtcttctccacagtgctctcttgtgtgtgaccttacagctgtagctgctgcaggacctccactggtcgggtgtcaggctcaggtcgcttctggctgtgtgcttgttgctctgtttggaggtcttggtgacttccgtaccctgggtgacaggggtgctgtttgccttccaggccaccgtcacagctcccgggtagaagccactcatgagacacagcagtgtggccttttggcttggagctcctcagaggaggacgggaacagagtgaccaagggggtggccttgggctggcctgtgggtgggcgagcggcaggaggtcagcatcctgttgtgtacctgggagccccctgacctcagtgtatgaagaggggtcaggccccctcagtgccagtgtaggacccctcagacatggtccacagtgtctcagaagggtgtgacatgaggttcctaaaacaactctctgtcattcagggaacctccgagcctgtcccctgcccaccagtggtggcagttaatttggtattcatttccaaggctggagaaggatgtaattttttttcttttcttttcttttggtgagacagggtcttactgtgttgtccaggttggagtgacctggcgtggtctctgctcactgctaatttttgtattgtttgtagagatgaggtcttcctgtgttgtccagactcgtctcaaattcctgggctcaagggatcttcctgccttggcctcgcaaagtgctgggattacagatgtgagctactgcatccagcccccttttttttttttgagatggtgtctcactctgttgcccaggccggagtgcaatggcacaatcttggctcagtgcaacttctgcctcccaggttcaagcgattctcctgccaaagcctcccaagtatctgggattacaggcgtgtgccaccacgcctggctaattcttttgtattttcagtagagatggggtttcacccatcaggctggtctcgaacttttgatgacctcagatgatccacccaccttggcctcccgaagtgctgggattacaggcatgagccatcgtgcccagcctctcagctcctaattcttatgttcatcaatcagtctcttgctggggttcccctaggaggtggtgaaatgaccccagctcgctgttcctcacatgggtgctgccacgtcactggctcaggctcagctgctgggtcaccaggagaatggacccttcctccacctcagctcagagcacagtgatgattcgtgactttcccaatagaacttcaaatctctgaggacggggggtggggggatgtgcttgagtgtttgtactcatggtcttgttctcggagtgacaaagctggaacacaatacctc

SEQ ID NO: 28317 - DNA, 2300 bp, Homo sapien
cttgtacaattaaatttcaaatcctaaacatttacttatttaagcctgcctctctaaacttaaaatagatatcagctcctccaataggatgagtagattttctcactatattttccacttctttttaaattttctcctccatttgagcattcagaagcatgaatctgtggggattgttaaagtttttttttagtttgctgcatttctgagtatacaaacacatacacatataactatagtatcgtgtgtgtgtgtgtataatttgtgtatatacatatatttgttcaatctggaagccattgaaattttctgtttataacaacacagaatgacctattctttcagcacctaccccattacaccctctgttttataatcactggacaaaatatagcatcatctatattaatgcagattgtatacatcatttgtgacctatttatttgttctagaaatttgtacttagcaatgatagacatttgtactgtaatatttatatcatgaagggtacctattctctttgaaacatagcaactctctcatcttaaccctaaaattttcatttgttctatttattttagggcaggtcactttcaacagcttgttttcttgggcatatcataaaagtatttgcaattgggtgttatgtatcagccagaatacacacgtagttatacattttgaaagttatctaaaattctgcattcagaaacactttaattatatgtattaggctgggcatggtggttcacgcctctaatcccaatactttgggaggtcgaggtgggtggattgcttgaatccaagagttgaagaccagcctgggcaccatggaaaaaccccatctctacaaaatattagctgagcatggcggcaagaacctgtagtcccagctacatgggaggctgagttgggaggatcacctgagcctgggaggtcaaggctgcagtgagccatgatcaagccactgcactccagcctgagtgacagagtgagaccctgtctcaaataaaaaattatatgtattcacccaaagtgttcaccccaccgagaagatgcactggtgaaaatatagtgatttttttttcctttaaatactcagtgaatggccagccgtttacatacacaatggtagacaaattcctctgtgaattcacaaagtttgggagataaataagtgcatagtaatatatagagataagtggaaaaataagtttcataattatattgtgagagaaatatgatttttataatatcaagtaacacttttttctaattctgaacagtttattgcttctagaaacattagatcactcaggaatggtagaaatatgactttttagggaaatatgacttttaaaatgtgactttaaaaaatgtcactttttaagaaacatgacttttataacaatatccatttatgctgtctttaattctgaacagtttgcttattggttctagaaatattagatgactcaggaatggtagaaatatttggcaatggaatttcgaatcgagaatggaacttctggttgttactaacatatcggttttgcccctgctcagtttgaaattcttgccattgagtgtattttggggtacacaatttctcctcctaaaacttattttaataagcacagaatagtaattaatgagcttgggttttgttgttttttttttaagtaaaacgcctaatcttttattttattttattttattttatttttttacggagtctcgctctgtcgcccaggctggagtgcagtggcgctatgtcggctcactgcaagctccgcctcccgggttcacgccattctcctgcgtcagcctcccgagtagctgggggctcccgccaccacgcccggctaattttttgtgtttttagtacagacggggtttcaccatgttagccaggatggtctctatctcctgacctcgtgatccacccacctcggcctcccaaagtgctgggattacaggtgtgagccaccactccctgccgtaaaaggcctaatctttaatgaccctcctgtgcgtgtgaaagcactcttgttggtgcagcagaaagcggacctcacaatacacattgtgactttaccctgagacgttgatgatgctcctatcaccatggttatgtgattgggtatatcttgccctcggtcctaactgccactgtctgtgctgagtttttcaaagttcatagcaggttgaacatgcttgctgtcattttcacagattctggtctttcttatggggaacctgagttcctgcattaaaggtatgttcacattggcctgttg

SEQ ID NO: 28318 - DNA, 2300 bp, Homo sapien
atgtcctttgcagggacatggatgaagctggaaaccatcattcttagaaaactaacacagaaacagaaaaccaaacaccacatgttctcactcataagtgggagttgaacaatgagaacacatggacacagggaggggaacatcacacactggggcctgacgggggttgggggctaggggagggataacattaagagaaatacctaatgtagatgatgggttgatgggtgcagcaaaccaccatggcacgtgtatacctatgtaacaaacctgcacgttctgcacatgtatcccagaacttaaagtataataaaaaaataaataaaaatttaaaaaatggttaaaaagccatattttaaaaggtttttaaaattcacaacatactccatttttgatataacttctaatatttcttctctgtggtagaaatttgttcctgagaaataagaggccaaggatattacaagagcacaaaaagtttacataaatgtgttaacattttaaaggcaactatatatgaataacattaaaacattgttaaaaatttattagaatgaataataaaatcatcaagtttatacttaataagatcaaatatattgcttatataattttaaaagtagtgcagaatgtttattattctagtctcactaaaaatgataaacttcaaacatatctataggaaaataattacaaaactcagcaagtaatatgggagataatttgaagaaatgttgaaatagtttcttacataaagacactaggtatttctttcataaaggacactaggtaaaagttccagcaatgagtagggaggtgatctaggtacattttattattgattattgatacaggttttctcttgagaaagtgcacagttgggctcttctctctctctcctctctctctctctctctctgcaagacagttaacaacaataaaacccacctggtcaacccatcgacaacactcagctttatccctatccctctctcaccgttcctctagggacacagttaccctgtggtttctcctgggttctttctccttcctcctccagatccctgggatcagccatcaaccctcctgataccccctctcctgtttggctgccttcaggctctttgttgaacctgacaccaaaggatgtctttttaaactgtcagtttcatctattctgcctccagttcacaacccgaaacaatcccagataatgaatcaaaccaaacccctcactgacacacaaggacctctacagtctggattcaaatgtccttacctgacttgacacttacacttcacttgttcaatcttctcatcaatgatgtattctgtcatcccctcagcatatcattgcattgaaaatgtctcttttttttttccaaagccctatctttccaaagctagtaatgtgtgagtatttgttccagagcaggaccccacagcccagtgagacccaagtcacaatcacctctttccctggcctctgtggaaggagctgcccaggactttgctcccagagccctctgcagcctccccgcagcctcctttcattgggtggaggtgatattttgcccatgtccttctagtaatgcaagaaaaacgtattgaaaaatgctgtctttcttttagtatcagcaacttgggccatggcccagggcgtggccatagatacttctagactgacactcactaggctctcaggccgacaccactcacatgacttctactgagggaatgcagtctggcgagagagcagcaggagacactgtggatctcagggtctgtgcagtgggcagccacaactgtgccaaccccctcctaccccacaaattccgcagggctgggtgatggagcctgcactcactgaggctgacctggaagctgtgccctccctgggtgtggttccagcacccacttcttcccaggtctggcctgtcggacttcccctgtccaccagcccctaggacttgaataaatacatggggtaaagtagaggcaggcaatgtggggacacattggcatctgtaactcctcctctgtgaggtcagtggaagggataagagaggcctggagcagcccactccagctctggacctcagaagggctgtgtccaccatggctcctgtcctcctgctgctcctctctcacttcccaggtaaggacaggcctcccacgtccagggcaggtcccccaggcttcagcagtcccctctggctcagatcttccagcaacttcatgctggtaagtgagccagcagccatatccacctgtgtctgcaggttccctctcccagcctg

SEQ ID NO: 28319 - DNA, 2300 bp, Homo sapien
gaggccaaggatattacaagagcacaaaaagtttacataaatgtgttaacattttaaaggcaactatatatgaataacattaaaacattgttaaaaatttattagaatgaataataaaatcatcaagtttatacttaataagatcaaatatattgcttatataattttaaaagtagtgcagaatgtttattattctagtctcactaaaaatgataaacttcaaacatatctataggaaaataattacaaaactcagcaagtaatatgggagataatttgaagaaatgttgaaatagtttcttacataaagacactaggtatttctttcataaaggacactaggtaaaagttccagcaatgagtagggaggtgatctaggtacattttattattgattattgatacaggttttctcttgagaaagtgcacagttgggctcttctctctctctcctctctctctctctctctctgcaagacagttaacaacaataaaacccacctggtcaacccatcgacaacactcagctttatccctatccctctctcaccgttcctctagggacacagttaccctgtggtttctcctgggttctttctccttcctcctccagatccctgggatcagccatcaaccctcctgataccccctctcctgtttggctgccttcaggctctttgttgaacctgacaccaaaggatgtctttttaaactgtcagtttcatctattctgcctccagttcacaacccgaaacaatcccagataatgaatcaaaccaaacccctcactgacacacaaggacctctacagtctggattcaaatgtccttacctgacttgacacttacacttcacttgttcaatcttctcatcaatgatgtattctgtcatcccctcagcatatcattgcattgaaaatgtctcttttttttttccaaagccctatctttccaaagctagtaatgtgtgagtatttgttccagagcaggaccccacagcccagtgagacccaagtcacaatcacctctttccctggcctctgtggaaggagctgcccaggactttgctcccagagccctctgcagcctccccgcagcctcctttcattgggtggaggtgatattttgcccatgtccttctagtaatgcaagaaaaacgtattgaaaaatgctgtctttcttttagtatcagcaacttgggccatggcccagggcgtggccatagatacttctagactgacactcactaggctctcaggccgacaccactcacatgacttctactgagggaatgcagtctggcgagagagcagcaggagacactgtggatctcagggtctgtgcagtgggcagccacaactgtgccaaccccctcctaccccacaaattccgcagggctgggtgatggagcctgcactcactgaggctgacctggaagctgtgccctccctgggtgtggttccagcacccacttcttcccaggtctggcctgtcggacttcccctgtccaccagcccctaggacttgaataaatacatggggtaaagtagaggcaggcaatgtggggacacattggcatctgtaactcctcctctgtgaggtcagtggaagggataagagaggcctggagcagcccactccagctctggacctcagaagggctgtgtccaccatggctcctgtcctcctgctgctcctctctcacttcccaggtaaggacaggcctcccacgtccagggcaggtcccccaggcttcagcagtcccctctggctcagatcttccagcaacttcatgctggtaagtgagccagcagccatatccacctgtgtctgcaggttccctctcccagcctgtgctgactcagccgccctccctctctgcatctctggaagcaccagccgcacttccctgcatcctgagcactggcgtccatgctgatttctattggatatactggtaccagcataagccagggagccctccctggtatctcctgagccactaccaaaatgtacttcatgaccagggctccagggtcccgagctgctcctctggattgatggaaggctggtccaataaagggcttttgctcatatctaagctccagtctgaggacgaggctgactaattactgtgtgattgagcacagcagtccttcgcacactgacacacaggtggggaggcgggataaaacctcagcctgctcagagtcttgttctctgacaatgtttagatattaaaataactcacatatacaaacttcacaggaaagcactttctggctcaaaaaatactctctt

SEQ ID NO: 28320 - DNA, 2300 bp, Homo sapien
tctgaacctgataagcagacagtggagggggaagtcagccccttgattgccggtttgcaattcaccccaggaagtaaatggtccttaatcctacaactactgtaaacccagaagggaaagacagtacacactggaattgtaaagcccttgtgaattgcttaggcagaaagttttctttcttaagccttcaggaacccagaataaggcagactctgttaaagggataaatagaggtgtctgaatgtgagtgtatgcatgctgcgtgtgtctgtgtttatgtttgtttgtttgtttggggcaagaaagattctaggacaagagctaggcatgtacttctgaccaggtgggtaagcaactctaagtctgtatttgtattggtcattctcagtggaaatcccttaggccctctagtggttttcccctacctgcatattggttttcatgttttatattcactgttactatcttctgtgtttaattaaaattgttttctatcaacttcaatcttggtttttttatttgagaaatggcctgccctgaatttttaaaaaataaaataagaggccagccacagtaggccatgcctgtaatcccagcactttaggaggccaaggtgggcggatcatgaggtcaagaggtcgagactatcctggccaacatggtgaaacccagtctctactaaaaatacaaaaattaactgggagtggtggcacgcacctgtagtcccagctgcttgggaggctgaggcaggagaatcgcttgaacctgggaggcggaggttgcagtgagccgagatggcaccactgcactccagcctggcgacagagcaagactccaactcaaaaaaataataaaataaaataagacatagaaaagggaagagacctaaggttgcacagacatcaaggcttgattttaaaagagaattctttacctctgaaatctttccaagaaggaacagggtaaccacaggaaactctaaaagttgtatcacttcaagctttgggatttttcacccaccacagattcaatgaaatggcagtgcagagtactaaactcagacaattcataactgagaatgatattaatgtgtcagagcacctaatcaatggggagaaattggggcagaagagaagaaaagcggaaccagtgtagataatgcaacaaatgaatggaaactacatactgttttttgcagcacttacagtctagtgggggaatggaaagaggagagctgtttatagagtgcttgccgtgtgccaagccccgtgctgattacccctccagtgtcacttcatttagccttctactcaagaaagaattatgatcccattttagagatgacgaaacagagataagaggggttaatcacaccaagtcagtaaatggcacagatagaaattgaatcttgcgtctttctaatcccaaagttgcagttgttgacatgaggccgaactggaaactgaaatcacttaaagctcacttaccactatgaacaagagacacggcgtataaaagcatgattaaagaggtcttgatcatcaaatgcggctagactggggagttttggcgatccataagggctgtgatttgatcattttgtagtatatgtctggccacaatagatgcacccacaagtgtttgtcagaataaatgataagctgccatgcttcattctttgggatgctcctttctgaccaaaaaagttatttggtgtatatccagattcattctgaaacataaatgttcagctatggtatttactcaaacaggtttttctttctcagctgctggcgttatctttttcccctcccagctgagggtgtaaactccaagccaatgcaccgaacctgacccagactcaaggtgttttcataagctgctgaaaagcatttccaaaacaaaagataactagattatactttaaacttctggatttcgcttagctgtagtttagaggaaatcgactaataaagatcctaaagttatacactacaggacagtacaacttaaccagaggaaagacattggcctgaagaattttgagcctcggcgcttgccgttgctcatctgctgcggcgctggtcgcgcctgcgctttggttcttggaaggcggtgctctgagaagccggactacgcggcagcggctcttcaaagcggagccgggagtttttgctacagttttcgccaccatgagtcgcagctataatgatgagctgcagttcttggagaagatcaataaaaactgctggaggatcaagaagggcttcgtgcccaacatgcaggtaaggcaggagagc

SEQ ID NO: 28321 - DNA, 2300 bp, Homo sapien
tttcaccacgttagccaggatggtctcaatctcctgacctcgtgatccacccgcctcggcctcccaaagtgctgggattacaggcatgagccaccgtgcccagccttattttttattttttgtagagatggggtcctgccatgttccacaggctggtctcaaactcctgggctcaagcagtcctcctgccttggcctcccaaagtgctggtattataggtatgagccaccacacctggcttacttcttcctctctgaccacatccacaaggtcaccttcctgggccttccttgatttgtttcatgtttgtgtgttagcgcagtggtacctgccacctgtgagtcttttgcatgtgtaagtgcagcagtgatagctcacccagattgtaacttccaaactagaaagaaggcctgtgaatatattactcacttgattttcattaaaagaaacccaaattactgctgcttttgggacctgtgcttcatctatcaagaaaatgggatgccattaatttgtttggtctattaattcaacaagcatacgttaatcattcatgtatgccaagtatgggtgatataacagtgagtaagatgtggtcccactctttgcagagaatgtttatttcatcaaaaatctgttgtgtgcctactatgtgccaggtattgtactggactccagagttatagaagtaagacacaatccccatgacaaagggatagacaagtaaaaagacagtcacaatacgggatggtgtatactaagattaagggcttccccaggtgctggagaacccataaggcacacatggcccaattcacagcttgtgaaagagacttcattcattcattcattccatctgccattcagtagttccctaatgcctgctgtgtgccagtcactattcaaggtgctgaagtgatgaagtccttccccatgaagcctaaaaattccagcagaggagatagacaatacacacatcagtaactggatactacactagatgatgataagtgctttggagaaaataaagcaatggtggagtcataataacagggccacagggaaggtgtccatgttctgcattgagtggctaggaaagactttgctgagacgacatttgagttatctgaagaagtgcaagaccgggttctttgaggaagactatgccaggaagaggaaacagcaaatacaaagatcctggtgtacaggctacttagatcattaaagaaagatcaagttagccagtgatgctgggatcatgagagccaggtgtgtgtgttaaggacagaggtcaatgaggaagtggaggcatagggtcattccatcagctacaaggccctctacaccttgtagctgataaaatgacttcggcgtttacactgagtaagaaggggaaccactgaagggctttaatgggggtggggagtaacatgatctaactttcattttaagaggctcactctggctgtggtgtggagaatggccagaaaggagcaatggccgaagcagagagaccagtaaggaggctatcacaaaaatctatgtgaaatggtactggcttgaaccagggtaagaggagaagtcctgcctgcaaacagacaacatcgtgtatcagatgttctaatggacgcatatgcactgtgtaaagtgtggtgggatcccagagtagaatgtgatgagcccagggtaaaatgacttggtgagggaagttttcacagagagggacatggagctggccctgaaggatgcatattcactactagtctgtgaaaaacataggtcaggggccatgtgtaggtcaacactacacccttagcacctagaacacatgctggtgtgttcaataaatgattgctgaatgaatggatggatgggtgggagagcgcatggatggatggatggatggatggatggatggatggatggacggatggatggttggatggatggatggatggatggatgaatggatggattggatggatgtattgagttctggaagtaaacagtaaaaatgagaaaatctagaaatgttggatttaattgaccaaagagaaagtcaagaataataaaggaaccttaactgttggttaatttcagatgtgtacaaagacaatcccagtcctctggggatgtttcctcctgtggaatctctatgtctcatcctctcagaccatttaccctggaatcaaggcaaggattactcagagggcacttgactatggtgagttggatgttttcagaagccagacctcaggcccactaggtggggtctgtgacccaaactgaacagctcataa

SEQ ID NO: 28322 - DNA, 2300 bp, Homo sapien
ctggcttccaacggtcacatctcagcgcaaataatcacctcctcagagacgcccacgtgggtatcctgataaaataagcccacctcccccagttgcattgctctacctattacaagaccaccttaccaacaacattcccttagttccgtcacagtacatgtcacaatttatacatttttgtttattttattgtttgcttatttattttgtctccatcgactagaacataaactcctcgtggacaaaaatttcatcttttttgctgaagaggactttgcacattgtaggtgctcagtaaatctgttgattgaatgaatgaattcatctatgatgaccgacaataaatgatcccatgaagagcgtctctgcaccgtatcattattgatacggccacgtgctaatgagtagaatttcacagcagtttacagttttaatagcgcattctcatgtgttattatgtttttcttcaccagaaccaatcaaggaagttactatttctatccccactttaccttaaggaaactcagttcaaatcagtaagtataacccaaggtataactcccctgagaagctgtgagaagtatggacaatgccaagtgaaagcgtctgtggttcctttcagactgacttatcatcctgattttcccaggactgttctggttttagtactgaaaatcctgcattcttgggaaaccaggacagttggtcaccgggtcttacccagaaaagtgtagataagccataagaacttcatgcaatcaggctgggtgcggtggatcatgcctgtaatcccaggactttgggaggccaaggcaggtggatcacttgaggtcaagagttcaagaccagcctggccaacatggtgaaaccccatcactactaaaaatacaaaaattagccaagtttggtggtgcacacctgtaattccagctactcagagggctaaggcacaagaatcgcttaaaccctggaggcagaggttgtagtgagccaagatcatgccactgcactccagcctgggtgacagtgagactgtctcaaaaaaaaaaaaaccaaaaaacaaaaaaaaaaacttcatacaatcaaatccctggccatctaaaatacattaatggccgggtatgatggctcacatctgtaatcccagcacttatgaagccaacacgggtggatcaatcacatgaggtcaggagttcgagaccagcctggccaatgcagcgaaaccctgtctgtactaaaaatacaaaaaattagctgggcgtggtagcgcactcctgtaatcccagctactagggaggctgaggcaggagaattgtttgaacccagggggcggaggttgcagtgagccaagatcgctccactgcactccagcctgggtgacagagtgagactccatctcaaaaaataaataaataaaaataaaaatagataaaacacattaactaaaatgaatttattggagatgagagtagggctggagtttggaatctgaaaatgttaagttgcataatagttgatgaacccacccacccaacttaggtttaaggaatgctggaacagtaagtcattaataacattctgaaaaggagcggacggacactgagagatgccaactgaggtcctaccctgagtgataaggtaactaggtcagcccgattgtcaagcctcatgctttcagactgaatctgatgatccaccacaagtcccaaaggtattctgggcagtagtagagccatccaccgcaggcaccctgaccagaaggaaccagcttatgattccagacaggaaaattcttcctcttccaatgcagtttaacaccgttttcaatcattttggtaaagtagccatcacaatttcacaagtggtgtgtgtgtgtgtgtgtgtgtgtgtgtgtgtgtgttttgcaggaagataattattgcataggtggcactgtctgtttatctaggtagatactgtagtgctcattcatgccattgggtaattgtagtgaagcaattatgtatcacattttgaaagaggcattaaaaaaattcaccactgagatgagtcagacttaattatcttggctttttagcagctgagtttaaggcgcaaggtggagaacacatcagcttcaaaggcagagagaatcgaaggtgctctccagctttggacacttcctctgcttgaggtaagactcatgaacaaacttcaggtctctgccagccatgatctccaaactggagatgtcccagatttggtaggacactttgaacaggcagctgtcatatatcctgggttattattattgtctgcct

SEQ ID NO: 28323 - DNA, 2300 bp, Homo sapien
tcctcttccttaaaggggtgttgacctttctcaacattccacaagttacttcctccttgctttgttctcctctgcctttgcctcttttaaaaagttctaaattactagccaatcaagacaaatacaaaatataaagtcccattccagccaataaaaaccagacacaggccaggcgcggtggctcacgcctgtaatcccagcactttgggaggccgaggcgggcggatcaggtcaggagatcgagaccatcctggctaacacggtgaaaccccatctccactaaaataataataaaataataataataataataataataataataataataataatacaaaaattagccaggtgtggtggcgggtgcctgtagtcccagctactcgggaggctgaggcaggagaatggcgtgaacccaggaggcggagcttgcagtgagccgagatcacgccactgcactccagcctgggcgacagagcgcgactccatctcaaacaacaacaacaacaaaaaaaaacaaaaacaaacaaaaaaccagacacagcagtaaagtggacacatcaggttatatatgaccctgtctcctttgttcggtgtactctcgtgacaaaactgctggcgagtataccctttctacaaaaaataaaaatggccttgctaaaaaaattaaatttatattcaagtgctatttctttacaacatcaaaaaacaaacatttctaacaatcccattcctcaggtctgtatttatgtctatcataaagcagagactttttacactctactgaaagagctgattcactcaactgtaaactttgcatgggcagaaacatgtctttttggtctcttgagtctccagcatgtggggtatctgtcacaaagtaggcaatcaatacatatttatttgcagaatcaagggcaggatgtggacaagtgctgccacctattgggagaaactttatttgactctaaggatttggactatggttatcacacaaggacgaaacttgatactctctctcatctaagttatcattagttagaccctctatggtagccagcctccaggatggcccgcagcgatccctgtctgttggcattcatacctttggctggatcctctcacacatagggttggtttgtaaatatgacaaaagccgtatgtgacctctggagctaggtcataaaagacattgtggcttataccttggtctctctgggatcacctgctctgaaggaagccagctgccatgtcatggggacactcaaacagccctatggggaggttcacgtggtgaaaacaggtctctggccaacagtcatgactgtgccatcctggaggccgatcctccagccctagtcaataactgctgccctggcctacagtttgtaatctcatgggagacctggagacagaaccacccagccacgcatccccaaatccctttacctctaaaacctgtgggacaacaaatgtttattgcgttaaactttggggtgattgttatgcagccacagagttctaataaactgtcggacatagattactggctacaaatagttctactttttttttgagacagggtctcgttctgtggaaccaggctgaggtgcagtggtgcgatcacagctcattgaggcctcgacctccgggctcaatcgaccctcccgcctcagccacccaactagctgggactacaggcaggcgccaccacacctaattttttgtattttttgtagagatgggggggggggtttcaccatgttgcccaggctggtctcgaactcctgggctcaaacgatccacccgcctcggcctcccaaagtgctgggattacaggcgtgagccaccgcgcccggccaacctaaggattaacctaaggcttctcagagcagatgccgctggaactgagggccacggaagaaagggggtgacacttggtcctggggagtggcgactgtattgtctgtctgcagcatccctatcagcgctaccgttgttccacgcacacagggagtaagtactgggagtcccagccaccgccgcggaaaatctgggatgccagcgagcggccgcatctcggcgcctgcgcactgtgcccgcgctctcaggcagcgccgttgcgcgcggagtcatcgatcggccgaccccgagaggcccggttcctttaggccgcctgcccgcctccagctctcggggtcggctccaggaggcgccctcaggagaggggcgggcgctctattccagagaccgagtggcagggcggccactgtggcggggctctttccccgtttcgcctc

SEQ ID NO: 28324 - DNA, 2300 bp, Homo sapien
ctcctttgttcggtgtactctcgtgacaaaactgctggcgagtataccctttctacaaaaaataaaaatggccttgctaaaaaaattaaatttatattcaagtgctatttctttacaacatcaaaaaacaaacatttctaacaatcccattcctcaggtctgtatttatgtctatcataaagcagagactttttacactctactgaaagagctgattcactcaactgtaaactttgcatgggcagaaacatgtctttttggtctcttgagtctccagcatgtggggtatctgtcacaaagtaggcaatcaatacatatttatttgcagaatcaagggcaggatgtggacaagtgctgccacctattgggagaaactttatttgactctaaggatttggactatggttatcacacaaggacgaaacttgatactctctctcatctaagttatcattagttagaccctctatggtagccagcctccaggatggcccgcagcgatccctgtctgttggcattcatacctttggctggatcctctcacacatagggttggtttgtaaatatgacaaaagccgtatgtgacctctggagctaggtcataaaagacattgtggcttataccttggtctctctgggatcacctgctctgaaggaagccagctgccatgtcatggggacactcaaacagccctatggggaggttcacgtggtgaaaacaggtctctggccaacagtcatgactgtgccatcctggaggccgatcctccagccctagtcaataactgctgccctggcctacagtttgtaatctcatgggagacctggagacagaaccacccagccacgcatccccaaatccctttacctctaaaacctgtgggacaacaaatgtttattgcgttaaactttggggtgattgttatgcagccacagagttctaataaactgtcggacatagattactggctacaaatagttctactttttttttgagacagggtctcgttctgtggaaccaggctgaggtgcagtggtgcgatcacagctcattgaggcctcgacctccgggctcaatcgaccctcccgcctcagccacccaactagctgggactacaggcaggcgccaccacacctaattttttgtattttttgtagagatgggggggggggtttcaccatgttgcccaggctggtctcgaactcctgggctcaaacgatccacccgcctcggcctcccaaagtgctgggattacaggcgtgagccaccgcgcccggccaacctaaggattaacctaaggcttctcagagcagatgccgctggaactgagggccacggaagaaagggggtgacacttggtcctggggagtggcgactgtattgtctgtctgcagcatccctatcagcgctaccgttgttccacgcacacagggagtaagtactgggagtcccagccaccgccgcggaaaatctgggatgccagcgagcggccgcatctcggcgcctgcgcactgtgcccgcgctctcaggcagcgccgttgcgcgcggagtcatcgatcggccgaccccgagaggcccggttcctttaggccgcctgcccgcctccagctctcggggtcggctccaggaggcgccctcaggagaggggcgggcgctctattccagagaccgagtggcagggcggccactgtggcggggctctttccccgtttcgcctcagctacccctcagctccggtagtcgccagtccggggtcgtcgccgtttggggcgggagctgctcggccccgccgccgtccccgtcgccgcttccgggtccaggcccctcgggccgcctgccgccgtcatgaggctgcgggtgcggcttctgaagcggacctggccgctggaggtgcccgagacggagccgacgctggggcatttgcgctcgcacctgaggcagtccctgctgtgcacctgggggtacaggtacgctggggccggggctgggcggcccgcggggagtggggagtgcttggggtgggtgcagggcgggttggcgtcatctgtgggctgcaggcgcgggcgtggccgggcgataggccaagtgcggggacgccgggggggccttcacgggaggcccgggctcttccgggcgtcgcggagccggagggtgcaggcgacgggaagcgcgggtggtcggctggggtccggctcctggagaacatggcccggcctcccgggggctctggtcccctcctcggtgagtcatggcttctggttttgcagtaaacggaaccagggagaggagggaacgcaca

SEQ ID NO: 28325 - DNA, 2300 bp, Homo sapien
aaatggaagggaggaggaacattaaatactgttaaattacaagtttatggactgttataatgaagtatttttaataaagtcttatgttgagtaggaatatgctgctcatttggcaagtcattttaatgaatttttactgtggttcatagcacctagtaactataactaggcactgttatttatccttttatttataagttcctaattaaatagttacataccaggttgctgaaggaaaacattcatttaaagaaaatcaattttcacatttgaaaaaagcccttgagccaaattgattttaaagaatgatatcttgacagcaaatttcaactcaagattgcaagtcacacaacaaagatttagacattagctgcatatctctttccttcttcttatcgatcctgttatactgagtgttttatttgttatagatagtgaaatacataaatatgaaatggggaaggagcaagcataaattgcctactgataccctaggcactgctcgtggagctttcaattataacaacgcttatctggtgtagtggtggtgtctcctttaaacagttgagcaaaaaggtgaggatcagaggggcaggttatttgtccaaggctatacacttggtaaatagcaaaacaagtgggaacctcggctgcagtttgctagtgcgtccgtactttactatgagtcacctggggatcttattaaaatataggttctgatttggtaggtctgtgggggcctgagattcagtagttctaaacagttccaggtattgtcagttctggtgatctgtcgcccacatgttgagtagcagtgtggtgactaaaaatgagtgcttttgagccacacggacttgggtttgtgcactgttctgccactaaccatggggccttggacaggctttctgtaccttgacctgtttttaaaatggagatagtaattaggaaagaacttctgatgtgaaagcttgaaaaacgcttgacacaggtgctgatacatagtcatcatgcgataaatgctattaatttaccaggttctaagcgttaacaggagcagttctccactgtatccttagtgcccagaacagattgatagctatcaggaaatcttcgtatgtatgaatctctcacaagtcttttctacaactgcagcctatgagctagagaggttgggcacagctctactaatttgatatcatggaatttttagcttttatatctaagattcagtttcatcaagtcttgcactgtacttcttccatgagggaatttggttcatgcttatctttgtgaattatttgtgaatatttattcaccatgttgattgggtttggcagaaatagaggacagttttttcacttgattttgggttttgattttactttaaaaaatattctaggggaaaatgtagccaacatatacaaagatcttcagaaactctctcgcctctttaaagaccagctggtgtatcctcttctggcttttacccgacaaggtaagagatgaaatactgtcacaatttaaatgactgtaaagaatagtaagtatacttaatattcttggtgagtatgacatctgactgccctcttttctgctcctggcgaaatgttcctcttctaagactaagcttaatattccttaagtgctatttactttatctttgtatctccatgccattttgtacatatttttattgtagtctcttttccatggactataattgttgatatgatttctttccacctaaggttgggaataccttgaaggtagggaatatatcttacttttgtattcttgtggtctagcatgaggtcaggtacataatagatgctctttctctctgtgtagatacatatatatatgtctatatagacatatatttagatatatatgtctatatagacatatatttagatatatatgtctatatagacatatataaataatacatggtctgtaattggatctaagtttttttttttaaaccatttattggaggctctttgcaggcacttagttggatatttcacatgcattcttatttactgctaatgacttcgaagtaaattatgtggtacttattttatagatgatgaaatcataattcaataaggtttataattcactcgagatccttatattagcttctcatttttttgcagttaaaaaaattaaaatctcagtgtcttacagtgaaatttacttctcactcgtgtacatgttgtgtgtgggtttgctttggctgaaggagttgtctttatccaggacatgctcctcttgtagtagaaggaaaggagtgc

SEQ ID NO: 28326 - DNA, 2300 bp, Homo sapien
acaggcaagcccccaagacccatttctttgatagtcttcgccttgtcttcctcaacccccttgcctttctgtttcagcaaatctcagtccctgactaacagcctcagcacatccgacacctcccagcgtgggaccccaagtgaagacgaggccaaggctgaaaccatccgcaacctgaggaagtcttttgccagcctgttctctgactaacgccatccaggctgggaggggaagagtgctctgctacactcgtccccctcctgcctcatcttccttctcagccttggttcctgatgggaacagaatggagggcctgagaacatactttctaaatgcctttgacccaggaaccgattatctatatttgttcccattttccttcaccgtgacattccagcattgtctgactgtgaggtgggcctttgagagcctccaggttcctcaaaacaggcctgagcgatgggcatcacaccctctgcctacccacgtgcctgcttacctgccagataaccaagtgagatgtctgcgagtggctagttttcacattcttactagtgtttggctcacctttgggcaaaggccccctctaggccttgccccacctccatcaaacgcagacactgtagtcagacctcagcaatataggaggcaataatcttttaacagtgttttgcaaacaaacaaaaagagaaaaatcccagccaggggaactcgccacctgcccacgctagttccatccacgctcaagacccgcccttagaccaggcaggcaaaggcccccatcacactcggccactagtggggtcctgaggccaagaaagaaaccagaccctgtatgacaagtggggtctttcagaacacgacagaaacaggggggcccttgtaatgccactcatactcagagcattattcttatttggacagccaagggcagatcacaggttattgtaggaataaagactagtttacaaaggagaaagaggccctggacttcccaaggaaagggtcaggttagggctcctgtacccattctgttccaccactgtttgatctctctggcctcccaccaggaatgccgtttcctttttatggatctgttgggaaccagagagaatcaacagatcaatgacataggatccgaagtgcaatgatagtcacttctagtttggcatttcacaaactctgtacagcaaggtattggtaggttactcaatttcaaaagggccccatggccaaatatgtttaggaaccgctgtttgtatttctttttttggagacgcattgtatataatatatgtcaaaggctttcggaattcctgcaggaaagaaatcagctttgttaaatccaaactgatgatttgactcaataagttagttgcagagctggaaaaagtagtctaactcccttcccagtgctctttcccctataccagtctgcctctcatgcttagacagcgttcagcggtgatccaaatcaccaagcacctggtgctggaaacattgtaggtgccagaagcagcctcctggtcccaaagagagcccaagatattagaacatagccatgttagccccttgcctcccacttcgcaacatgagacatgtcttccttttgctgtccacagggaagggagagagggaggtaaaaatggaagtggctttggcctggagcagcttctagttatgcccaagcaatgtagattgtttggtaatcagccaagatccatccaggttcccaggagcataaaagcaatcatctcctttttggtccttcaaaaccaaactggagtggtgacgtcagggccagagaccctctccttctgtgggcattggatcacttagaactctcaacctcagaaaagcctgccttcaagctggcttttgacgggctattggctggagactgggtcagtattgaaagtgctagctgtgcacctggctgccagaaagccacttggcctttaggacagtcctcttcacattgccctcttccctcactcatgatcaggtctggatttaagagcaagagaccccaggataattcagaagtcctctctctcctcctgttcaagactcttggtctgggattcaataataagtagcagacctgacataagaaagatcagataggtccaattgccagtgactattgggagccataatttggcagctggagactggtaggctcaggcctgattaacactggctaggatcagcagcaaataaaatagccattgtgtgaggtgagaggtgaagaggtgaaggcctggtactctttctagcgcccaaaaagcccaccaccc

SEQ ID NO: 28327 - DNA, 2300 bp, Homo sapien
cactccatcacctaggctagagtgcagtggcatgatctcagctcactgcaagctccgcctcccaggttcacgccattctcctgcctcagcctcccaagtaactgggactacaggcgcccaccaccacacctggctaattttttgtgttgttagtacagacggggtttcaccatgttagccaggatggtctcgatctcctgacctcgtgatccgcccaccttggcctctcaaagtgctgggattacaggcgtgagccaccgcacccagcctgcatcttcattcttactgttagcctcaggttcaccccacctagcttattaagtgatgttgaataaccaattcttacatattattaggctcatggacaccatgacatccagactgatgggtgcctgctgaagggggtgaccctagcaggaggactcccctacgcaaggattcatggagtttgctgtttcttttccttagggtgagaaccaaactgccttcacacggtgggcagaggggaactgactcaggtttggaataagagagaacatcccaactgaaaagctcttggaattcgctgaacttcaagacactgtgtggaccagcttaggatagggagtgagaagaaattaaccaaaaggtaatttcgttacttttcagctggaaaaaagatcagattatacttgtgctttcataattaagtagctgctggaaaaaaacgcttcagatgctttctatgagaaaactgctgcttgaagttcagcagaagttatctacttgatacttatattccaggcaaggccttccgttggagaaaatatcggcactttggacaaaactgaaatgtgaaaagaaagggaagagagggcctctatcatgtaagatgcttatccaaagtggatttggtctggaaagtcttctaaaaccttccacatgactgtggaataagtcatgtggggcgcggggataagcgaatctctcaaattccaccacgtatgccctcattcaacctggatccttagagtggcctccagggcactctgctcaggactcagtcagctgttggccacacccatgctctccagtctcctgagaccctatttggttctgagagggctaaaaagcagtgtggctaaatatcccaggcctcaaagtattcctactgtggttggggaagcaatagaatcataccccataaaacaatgaaaacagtgctagaaaaacatcgagagacagaaacatctctacgagttaggccacagttagagtgaaggcagggaaggtttttaaagctgggtggaggggacaagtcaaaaagatgtggaaactggtttccctttcctatggctaaagtgctcaaaggggaaaaaggagtttcaaaaatgttcttggaaataccatctctcacgaattcttcggcctctgctgtcccaatgtcacttgtctgagatgtaaacagaggagttctgagaaagaagctgaacttgcatttctccctgtttctatttgttccaaacttgtggcatttctaacaggatgaagcggaagagaaagggaaagagacaaaagtgtagaaagatggaagatcccagctgcaaatggccatttgcagttagatggaacagctgctgacgttcagggaaatgcatgtctctcttcagatgggaaggagcagtggaaaggggtgacgagttcctggctggccaccaatcatcccatctttctgtgccggttcctcatctggaaagtgggagtgatacttgtgcttgcttttcctacccacaaagattattgtgagagctataatacggtgagatacagaatcctgcttttaaaaatacaaagcagaatcaagatgtcaataataaggatagtaattgtgttagttatctgcaatcatctattatagctagtcgtctaggatcctggatcgttctcctggttttactacagttttggatcagctcacccccaaatcccttgctgaagggtggagctctgtcagccatgggcagggaaccacttcctcttgcctttctactttctgtctttcaaacatgcccagggtctttgcacttgctgttccccctgcctggtacctctctcctgtggcttgccccagagctgatccttgtctttgtccacttctcagcgaggatggcacttcagggagcccttcccttactatcgcagagagagcaggccctccccagtcatgtccaacccagaactctgttttgttttcttcatagccctagcatcacagaaaatcaccctgtgcattcatggatgtccacgggggcaagggcttt

SEQ ID NO: 28328 - DNA, 2300 bp, Homo sapien
tcatgtggggcgcggggataagcgaatctctcaaattccaccacgtatgccctcattcaacctggatccttagagtggcctccagggcactctgctcaggactcagtcagctgttggccacacccatgctctccagtctcctgagaccctatttggttctgagagggctaaaaagcagtgtggctaaatatcccaggcctcaaagtattcctactgtggttggggaagcaatagaatcataccccataaaacaatgaaaacagtgctagaaaaacatcgagagacagaaacatctctacgagttaggccacagttagagtgaaggcagggaaggtttttaaagctgggtggaggggacaagtcaaaaagatgtggaaactggtttccctttcctatggctaaagtgctcaaaggggaaaaaggagtttcaaaaatgttcttggaaataccatctctcacgaattcttcggcctctgctgtcccaatgtcacttgtctgagatgtaaacagaggagttctgagaaagaagctgaacttgcatttctccctgtttctatttgttccaaacttgtggcatttctaacaggatgaagcggaagagaaagggaaagagacaaaagtgtagaaagatggaagatcccagctgcaaatggccatttgcagttagatggaacagctgctgacgttcagggaaatgcatgtctctcttcagatgggaaggagcagtggaaaggggtgacgagttcctggctggccaccaatcatcccatctttctgtgccggttcctcatctggaaagtgggagtgatacttgtgcttgcttttcctacccacaaagattattgtgagagctataatacggtgagatacagaatcctgcttttaaaaatacaaagcagaatcaagatgtcaataataaggatagtaattgtgttagttatctgcaatcatctattatagctagtcgtctaggatcctggatcgttctcctggttttactacagttttggatcagctcacccccaaatcccttgctgaagggtggagctctgtcagccatgggcagggaaccacttcctcttgcctttctactttctgtctttcaaacatgcccagggtctttgcacttgctgttccccctgcctggtacctctctcctgtggcttgccccagagctgatccttgtctttgtccacttctcagcgaggatggcacttcagggagcccttcccttactatcgcagagagagcaggccctccccagtcatgtccaacccagaactctgttttgttttcttcatagccctagcatcacagaaaatcaccctgtgcattcatggatgtccacgggggcaagggctttgtgttgcttaacccagcatcctgaaccgtgtttgttgaatgaatacagaaccccgtttgctctgggagagcacagaaaacagtcttctatcatatatcatagccagctgcaaacagcagatggcttcccatatcccagagagtaagaaccagagagagagagaaagagagagagtttgggtctttctcctctgtgcctgctctctccagagaaactggaggggtagcagttagcattcccccgctggttccaccaagcacagtcaaggtctctaggacatggccacccctcacctgtggaagcggtcctgctggggtgggtgggtgttagttggttctggtttgggtcagagacacccagtggcccaggtgggcgtggggccagggcgcagacgagaaggggcacgagggctccgctccgaggacccagcggcaagcaccggtcccgggcgcgccccagcccacccactcgcgtgcccacggcggcattattccctataaggatctgaacgatccgggggcggccccgccccgttaccccttgcccccggccccgccccctttttggagggccgatgaggtaatgcggctctgccattggtctgagggggcgggccccaacagcccgaggcggggtccccgggggcccagcgctatatcactcggccgcccaggcagcggcgcagagcgggcagcaggcaggcggcgggcgctcagacggcttctcctcctcctcttgctcctccagctcctgctccttcgccgggaggccgcccgccgagtcctgcgccagcgccgaggcagcctcgctgcgccccatcccgtcccgccgggcactcggagggcagcgcgccggaggccaaggttgccccgcacggcccggcgggcgagcgagctcgggctgcagcagccccgccggcggcgcgcacggcaacttt

SEQ ID NO: 28329 - DNA, 2300 bp, Homo sapien
aactgtcagaggggcaccttctccagctgggacccagtctcctgactccccctggctttcctcctaccacactggcagaccgggtacctcccactggggagccctaactgatcccacctttaagggaagagtcttgaagccctgaaatgtcttgtctctattaaccttacttctccttgggccacagtgagacaaaccaagtccttttattactgtggcttgatggtttcaagggtcttttccagatctaatagccaaagaacattagaattttcctctatgatacactagaataataataagctctccctccctaaagatgatgtttaattaaaacctctggccattttggctatcttcatatttttaaagaaaacccagatgtagaagaaaagcattcttcaaatgttaaccatccattccatctcctggtcaccttagaatgtcatgtgtcaatgaaagttgaaaggtttttgaagcatggtataactgataatacgttttagctttatcatttagcaactgggtggccttggacaagcacagtctcttcagcctcagtgttttccatctgaaaaatgggtgcaatacctactcttaaggttgctgtggggggtcgggggagggggtgaaagagatggcatttgggaagtgcgtgcaaccaggaggggcctaagacatgtctcttccctcctccagctggatagcagctctcctccttccatggttccaagacatccacagcctgggtcccccagacttgccctaccaagtgctggcgcctctccaaagtctgattctttctattttccttaagttgcaaagcccagtgttgaggtgtaattgtgtgtaagagggagaggggatggatctggtttctttgaaaatggcttctttgctaaaacgacaacctcagatctgatactgaaagaatctgctggcactggcccctgtcagaacaatttggagctatccaggggccatcctctggggctggcagccggccccccagctgagcctcatgctcaaattcccaacaggctcagaggcaggccccgaacacacttcatcctacagccccattcctcccatgcaaaggcggcaagagagaaggagagaagggcttggcattctgaagcaaaattctctttctctgctgcaacccccctcagccctgccagccacctttgcagaagccacacacgcgcacacacacacacacgcacacacgcacattttcagaaagcccttggcacagcccaccccttcctgagctggacagagctgccagggcagatttgcccgggccgaggccgccttcttcatctccagccccctcccattcctcttctagagtcaaggttttgtcaggagtttcaggggcaatgactggccagggagggggaccacagacatcctgcctgctgccaagtccctttctttcccccacagtgtgtcttataagccggcatgtagtttattcttctcctaaacacttccatagggtgcagggcctggagttgccatagaaacaccttttaactcctcctcccccagaatgccatgccaggccctaggactttggggaaaaaagacaaaaagagacacctgtggatgagcagagacaggaggaaaggccatcgggcagccccccggagaggaccaggccaggcctcctgtgccttttgctaggccaacatggcaccaagccatgaagagaaaaccaccatgatggttttaaaacaggaagttgatgggctgatgtgaacacctttagggggctacaaagttgactggtggggttgtgtgggtcccaaggaatggggagctccttcatatttgtttgagggcgagaatagacagtttcaacccagactggaaaccagaaaggctctgagcaatgaaacttgggagccaagtactggacgccagcagggtgctgtgcaaggcgagggaggtcggcaggcaagcagctcacacccacacctcccattttaaaagcattagctcatccctgccactagtgcagctcaccaaacccaggcagaacaatttgggatccgtgccagagcatcgaagattttttgtttctttttttctttttgattccacaatctcctggtctttggctacttcctggtaacttagattttctctgagaaatttatgaagaggagcgagggagctatttcttgtttcaatccagagaaattgtaagaaactttctgcattgctcagacccaccgcaggaaacctaagcagtaagcagacgggaaggcccccattggaagcaggatcta

SEQ ID NO: 28330 - DNA, 2300 bp, Homo sapien
cccacaccaccacacccagctttttaaaaaaaattatttttacttttagtagagagagagttttgccttgttggccaggctggtctcaaactcctggcttcaagtgatctgcccacctcagcttcccaaagttctgggattacaggtgtgagccaccatgcctgacctcaaatttttatcaacaggagaatggagtagcaatttgtggtttatccatccagtagaatggtattcagttattttaaaaatagaatgactgctatacaacatattgcatctcagaaccattgagggaagcagttattaacaaaagcataatatatttgattacatttatatgaagttcaagaacaggtaaaattaataaacggtgacatgcatcagaagagtatttgcctgttaggagatgtggagggaccagaaggggtacaaaagaactttctgaggtgtagaaatataataaacattataccagtatatacatttatcaaaactcaaagaagtgtatacctaagaactgtgcatttcaatcttaagtaaattttactgcaataaaaatactggctgggcacagtggctcacgcctgtgatcccagcactttgggaggccaaagcaggcagatcacttgaggccaggagtttgagaccagcatggccaacatggtgaaacctcatctctactaaaaatacaataattaggtgggcgtggtggtgggtgcctgtaatcccagctactttggaggctgagacaggagaatcacttgaatctgggaggtagaggttgcagtgagccaagatcgtgccactgcactccaggctgggtgatgaagtgagaccccgtttcaaaaaaaaaaaaaattgtatataataatcttaacaaaaaatataaaatctaattccatggtttaaatagtcattgttctcaatgggatgttttgatctcaaatgaacagtgtgggttttttaaacttatgttactctgtttagaaaagcaatagatgtgtatattatctgcttgtgctgacataacaaaataccataggctgggtgagttaaacaacaggtacttatttctcacagttctggaggctgggaagtccaaggtcagggtgtcagctttgcctggttctggtgagggctctctcctggtttgcagatggctgccttttacctttgctttcacacagtgcagggaaagcaagctctctggcatcctttcttataagggctgtacttccatcgcgtgggccacaccctcatgaccccactaaccataattacctcccaaagggctcatttccgaagcatcatattcagcattatcttcaacatataaatttggtgaggtgggggacatgccggtccatagtaataagcactctagaaaattagaaaaatataagtaagaggaaagaaaaagaaaaaaaggcatgtacttgcgttaccaaaatataatcactgttaacactttgatttcttttatttccaaagttttgttctttcaacttgtacatctttgtagtcatttggttcctataattttgaatcattatcttttaaatttgtcattagaacatgaaattgtttctgttaccaaaatccgttcttcagggcacctttaaaaatagccacaataggttcattgagtaactgtgctgtagttgacttatttgttaaactgtggttgaatgttgagatacttcccagtatttcgctagtgtaaataacctgtgattaacatatttgtgcatgaagctttttctgtaacttagaatctttctttgcgatataattccagaaaatggaaattgtaggttaaaaagctatcctcttaatacatgttgccaaattcctttccagaaggatgtcctaatttacattaccacctgcagtggggcaggaaagcgctgtatctgtttgctcttaagggggtggaggtcgtttccacttatgtatttgttggcttatttccagcaggtaaataaaggcagctaaagctgactgctggttgcgcaaaatccccctggctcttctggctaaagtcctaccactccctgtacctggcagcagcctgtcttctgggcctcacctacacacgtctgggtaggagccagtcatctccatccatccacagccatgaatttcctccggcgacgtctctctgacagcagcttcatggccaacctgcctaatggctatatgacggacctgcaacgcccagatagctccaccagctcacctgcttcccccgccatggagaggaggcacccccagcccctggctgcctccttctcctctcc

SEQ ID NO: 28331 - DNA, 2300 bp, Homo sapien
ccagctgcttgggaggcaggagaattgcttgaaccagggaggcggaggttgcggtgagctgagatcgcaccactgcactctagcctgggtgacagagcaggactcagtctcgataaaaaacaaacaaacaaaaaacagaacatctggcaactctgggtgggtctccattcacatatggcaaaaatcagttggagctgagcagtgactgtcaccttaggcaggtgtgcatacctcagtctgtcacaagccccatccctcctttctattataccctgccaacctcacttagtacatgactacccggccacgtcggtattaaagtttgtgatccttcagctagtcttatgccctcttagttactgaggttagagtcactccctcttagttactgagatcatgtactaacgctcatgcagtaagtggaagatgctgggtaagaaccttcccgatcttggaaatagtaccattactccacagtggctcaagctaaacacctaggagattttcttctttcatccctttacgtcaacccctgtcatagtctattttgtgccaatataacagaatatcacagactgggtaatttataaggaacaacaatttatttagctcatggctctggaggctgggaagtccaagattgaggggctgcatctggtaagggccttcatgctgagtcaccccatggcacaaggcagaacaagagagcagcagaggggtggggagagggccactcctggcattaatggaatcacctcttaaaggtcccacctctcaacactgttgcattggggattaagtttccaagatatgaactttggggaacatatttaaaccatagcatcccctaaatccagcctaatccatcatcaagccttcctgtgctacttttgacacacattgcaggaggtccaccttttccgtatcttgctgtcaccaccctggtcttcatcaccataatctcttgcctgaattgttccctccagattgatatgacaaagccctgaccctcacggtggcctacaaggttctgggtgatggtgattccacactagtctacctctctggctgtaacccactctccccttgctcacctcactcagccaccctgggggccagttccagcttcagaaccatgcatcggccgacccctctgtcagcaatgctcttgcttcagccctggaatcgtttttgtcctccaagtatccaatatcacaagcggcccggagaccaccctaggtatagcagtcctagacccctttctttttcttttcttttttttggagacggcatctagctctgttgcccaggctggagtgcagtggctctaactcggcttactgtaacttccacctcccgggtccaagcaattctgcctcagcctcccgagtagctaggactacaggtgagggccaccatgcccagctaatttttgtatttttagtagagacggggttttatcatcttggccaggctggtcttgaactcccgacctcgtgattcacctgcctcggcctcccaaagtgctgggattacaggcgtgagccacaggcacccagccgacattctcttgtttttttcgtttgttgtatataacctacccccacctccaccccatgcaaagtccacgaggacgatagactttgtcttgttccctgttgcatcctggccctagggcctagcccacaacctgggacatttcctgacaaggggccctggtttctctgaggtgccacctgaggtccgggaggtcagctgactttcccaaaggtggattccaaggacactgcattcttcgcactccccgaggggcgtctagacactcctgggacccagaattattagctaactgggctcctgagtccggtgagagctcagagtctagaagcaactttccctgcctggagaggtgaacccagcaaggcgttggggagaggcgtgggcgagggagtgggcgcgggtgggcggggccgtccgggggcctcgttgcccgagccaatggggcgccgcggcgcggggaggccgggccgccgggcgggggcgctcgcgcgcgttgaggggcagaggctgagctcccgggacccggagcggatcgactggcgggcgccgcgccgaggcaccaccgggcgccgagttcctggcggctcgcacggtaagcggcgcggcgccgcaaagtagactttgtggggtttctgacagccgggagaccccacctcgagcgggggctgctggtgcgttctcgcgtcgggctgcgtcccctggagctccggctctgtgtccgcgggatgcgggcgcacgga

SEQ ID NO: 28332 - DNA, 2300 bp, Homo sapien
tgagctgttttgatgacgttgtaaagggaaattagagcaagatcctggaatgcggtaagtgagccactaacaatatctggccttactcacttgctttctaggcaatgaggagccacagaaagcctttgaacagggagtggcacagcctttgaggaagattcctctggaatctatacgaaaggctggaggataaaaggaggcagaaagcaaagccaaaggggtcagacagaagctagcaaaggcttgttcgaacaaggaagccattagagacaattacaagaaagagaagtttctagtttaaaagaaccgtatgaagctctcgttaaaaagaaaacggagttgcagtagtgaatttccaggttggctgcagaccaagcccagatttaggttcacggtgtaaagagcacagccttcagggtccaggggcaaagggaggcatgccatctttctttctcccaagaaacagctccaggatgtgggtgatgtacaaagaaattctagaatcagctcatgtctacagatgctttggaaatccattgtgtccagtgaggtactgtaaggtgatgagtggaaacaagaatgaaaaaggtgcttgctgattccaaaaaccttacacacagacacacacactgatatcaggcggatttgggtaaggctcatatgaagttaatcaacaaatcaagggaaaagggacatggaatttggaaaatgactaagaaatgttggaagataaaatttgtggtgtaccttagagagaaaaactcctgtatttcaggagactgccatccacacaggcattctgagccccccttttttccccctctacccatgtgtgatggtctctctgcgggacctcattcattcacacaactccctataccacccttaacctgagaagggcccggctgggccaccaaacccaattgcgattcatcactgagcccagcctttggttgcagccaaaacaggaaagagaatgaaggaggctagaaataccacaaaggcaaacttggagctagtgcccaccaaaccaattccctgcttcagaaatggaacgatgctgaactgtcagctgaagaaggctgcacagcttgaaagaggaagcgtcaaaggaagcttggtggagaggagagtgtgaatagggaagtgccaacagggacacgtgcagggggtgggaaggcaggcaggacgcccagtgagagtgacagaggccagcagagcacgagtgtgcaaggaaacacagggaacgagaggctgcgtggctgacagtgtgccggggtgacaggcggatacggcacatgacgcagagtggaagacaaccacaggtagagaagtgtcagcaaaggaatgcatttttgctgttctcctaacaattcagcacacatcagatgggaagggtgaaggaggagagcatgagacaggggtgaaaagcagagccacagggacaatgaaggactaagtcccataatacaaagaccacgggtctttcttgactagactgatgatgctatgggggtggaggtggaagtgggaatccctggctctcagccacagttctataagggtcaccttcgtgccctcatctgtatgctccagtaggctcattacccaggagagaattatctccagatagagaagggaagagttgatataatgtagaccaaactccacccagccatgcccacaggctatggtacgggagacccattcctcccagaaaatggtgaacaaaggctctgcatgcatttatcaactttgtaacagtcatggtaacttcttctcccttggctcattcatttattcatccattcattcattcggcaattattactgagtgtctgggacaagctgggcacttctaagtgtactgaacatgaccaaccaatcacctgccctcagggagtttacagtccagcgggagaacatagaaaagagacagtctcaacagccagcaaatacagtggaggcatcaggcagtgatcagagttgtgaaggaaataaaggaaggaaaggtggggtgggaggaggagggttctgattctgacttcataaagggccctctctcacaaggtgaagtgtaaacaaagacctgcaggaagtaaaggggctacaagggatccatggaaagagcattcccagaagcggggccagggcagtgcgcacagtgaggagagcaggtgtgtgtgaggtgagtaagagaagacacaagggtgggggccgcgggaggcagagccaggagggcagggctgagtggctctggaagctctggaaaggccagcggtcaggtctgatggtgggtc

SEQ ID NO: 28333 - DNA, 2300 bp, Homo sapien
gcctccctttcgcattctgctgggctcggtcagccgctgagattaggtaaacagcgctccggagccggggcaaagcgggcgctgctgctgctggtgggggtcgttgtttcacgaggctggagggaagggggatgggagaagggtcccagctcggtaaagccaaaggccgagagtgtggttaccgaggcgggagccaggtccggagccaagcaggggccaagcctccgaagcccttgccgccccacccccccagcccgacctcgaggagtggggtcagctgggcaacccaagctcggcggccctttcccgcgcgccccctccccagcccatccttcccctgccccttccaagaactagggtgggcttcccgctgcctcgctcgagtcctggagagcggagaggcgcgcagagggaaggcaaagacccggcggcccgcccggctggggagaggtggagacccggggggaaggggaccccagaagccctgggaccgagctgcggaaaaacccgggagctggatcgcgcgcccggagctccggtctccgagtccgagttgtgcagctctcggcgtcctctttctctccctgcctctctgctttcgcctcctctgggtcttctctcgagggcatcctccttccatccattctcacacccccgctcctgtgccccgacccatttcacccacttctcctgtggctcgggaggactctccgtacccccaccctggtccctagaactgggaggctggaagtccattcaagggatgttgcgcgccgggttcttatgccaagagggaaagagcgagaataaaatcagcaggggaggggcgtgttgtgcgtgcatggggtgtgtgtttggggtggaggaaaaagaaatgtagtttcctcagaggaagaggaagccttggacaggattcttggataccgatcccagaaagatgccgtcagagcccttcggcggggctcctcacagactccggctgccccacagcatgcccacctccgagagaagctgcgacccgaggcggggaaacttcctacttctcacgacggctgttttgtgcaatttggggagcaggctgcatggtcctgcaagcctgcgagcctctctaccacggcagctgcgggcccgtcccgcttcccttccccctttttccgcgaggcacgccaagcccgaggcggccgggagccgccggggttgggggaagaagggcggggagctcccagcttgcaccctttcatcccgacccggcccgggatcccggctccgggtgttgcttccgcctgcctgccagccagcgagctgaagaagcaccggggcggagtctcgccggggggcggagcctgtgcgggggcgaactctcggtccgcgcggctgcggcgcttgccattggccggccgctcggtcacggggtcgggggcgggcgccgacgcgggcgccggccccgcccccgctcggaacccagccccggctcgcggtcccccccggctgcacagacatgacacagacacacagtcactgcagctgctgagcgagtccggcgctctgggcacgcggaggcggcggggccagcccggagcccggaccccagcgcccgcccctgccggttcccgcgcggcggcccactcctggccgggcgcgggaggcggggatcgcgcgccggctccggccagcggcgcccggctgcccgcggcggctgcagcggccgcccagctccgagcgccgggcgctccgggaagccggcgcatctcggaggcggcggcggcggccaaggccggcgagcgctcccggcggcgggggccgcccgcctcggctccccgcacccaccgcgccgcgatccactcgccgcgcctccgctcccgtgaccttcccggggcgcctcccctagccccgcgcccccggccccgcgccccaggccggggcgaggccttttccggcgcttctttcccgcggagccgcgggcgggcggcgcaggccctgggggagagcgcgccgcggccggttgcagccccccccgcgccgccgcgttcggcgcccggcccggccagtctgctcctgccccgccgccgcgccggagcccgggcgcccgaagctgggggcgcggccgcgctcgtctcgccgggctgttcgcgggcaggccctgccctgaagggacgaatcggcttggagcgcgggaggtggagtcggccccggcggtcgctccctggacccaacccgaggctgacccaggcccctgcccatgcggggcgcccctggctcggaagagtcccccgggccgggagcagctccaggcagcggcc

SEQ ID NO: 28334 - DNA, 2300 bp, Homo sapien
tcaagaaatattcatggaatgagcatacatgtgagtgataaaagaattgaagtcagtaacgtcaggattatggctaatcatgggagagaggggagtaagcgtccgggtccacaccacagaagggtgttctgttaacctgtccaggggccagtcacaccttggaaagaggcaaaatgaaaggaaatcaaacaaggtgctgaaaacaacaggtgtaactctggcaatttctctcgctgctgctcagttcttcacctgtgaaatgagagggctgagccagatggtctctgggtattacagcaaagtgggagggatgtgaggtgcagagccagactcacctgagtttgaatcttgctgcttctagtggctagctgtcctatcactccacttctctgggcatgtctcctcagctgttaaatggcattaatgacacctaattgatcaggctgttgaatggattaagtgaaacggtgagcacacagctgcaggcacgaggtccagcagagagaaagggctccatcgcctctctctttttgcctctgccacttccacccccaaagatcctgtccttgctcttgaccaagcatctcaagtacccatcagagcttcctctgccctgagtgtaaggaaccttgtcctctcatccaacaaccccttccatggaccaatggtgggcctgacttctaggggactctggcctcttcactgcaaaagtcaacaaactggttcatttgtctcctggcaggaaaactcccctgtccagccctaggaaagggataggtctaagcagggtcatgtgactccctctggccacagaatgtgagcagaaggtctatcaaccacttccacttctgactcatcaaaatttctcctttcaacagaaaaccaaatactgaatgttctcactcataggtgggagttgaacaatgagaacacatggacacagggagggggaaaatacacactggggccagtcaaggggttgggggcaaggggagggagagcattaggacaaatacctaatgcacgcaggacttaaacctagatgatggggtgataggtacagcaaagcaccaaggcacatgtatacctatgtaacaaacctgcacattctgcacatgtatcccagaacttaaaattaaaaaaaaaaaattctcctttgctgtctccctttccccagaaaacttggagcctatgattggagaatggtggcatcactgtttgaaaggaatctgggtccctaaatgactacattagaatgtgatgtgggtgagctattatgctcccaagactatagggtttacttgctactacagcagagcctattccccccctaactaaatcagacagcctgacacttccaaggggcacagctcctaaaatggggcatctttacctgttccctctctcagggtgagtccctctctctcctgactcactcttctcagggagtggagaccaacgttccctatccttcacctcccacccctgccctctatgagaagatctagattctaacatccaaatttacattcacagtctctgccagggtatccatccctcctgtgcaaattggctccttgtggccagcatggcatcatggacatccccaggggagtactgtgatcaggccctgccatcacattttctgtacctccttggtctggacctcagtttccccatatcagaaagccctggaatgcttttcctgatctgatatttgcaagccatggaaagcacatctgagagcaaatgaatgcctaaggctgacagccagcagactgcacctcagcccagcctcccccacacatgaccacaggctctcctggctgagtaaacatgttttattgggcctgggtacacttcctggccattctgctcccaccttcccttcccctgctctggccagttccccagcacagcccctccctggggcctccaatacctgtccttcagatccccactgcctcctgccacttttctaccctgacacctgcatccccagccttaaggggcgtggagagtttttctcttatcagcctgttttactgccccctcctccttggttacacagtaatttggagcaaaattccaggcaaggacagatcaacaactgtcagctcccagtcagagagaaagggcctcttcagtctgtctcaggagactgggagaaacagcataaaggaccccacaaggaagggagaggtaccctgggtcaggcgcttgtggagagagggcttcgcatgtaaagtgacgtcagggaaaatagaacagaaaaaaagccagggccagcccagaggcac

SEQ ID NO: 28335 - DNA, 2300 bp, Homo sapien
gggacagggtagcagtgggttgatttcatgtgctataatatttcaacatttctaactcccttccttgctgggaagttgtgtgcatgtgtgcgtgtgttgcgtgcatgcatgtgtgtgtgcacgtgtgtgtttatgcttcagaccctctccacttcctctccaatctatactgtgttgatgcaggggaataatcagacaacacaagctgtgcagtcaggggatgtttcaagatgtgacacaggaagtgtcctagaacttgttcctgttcaatggggaaatccatgtttagttatccttcttgccaagaactaaggaggaatttaattgttctctttacttaaatacctacagaaggccgaccaaggtggcaaaagtgcagaatgcccagattagagatctacaaagccacagggctttgcaaacaggaggaatagacatttctggccaacaaattattaacaactgcctccttacaaggagtggggaggaaacctctttagcaacacactactgataaagaaacttgaggtttccatatatggagactaaaatgatgtacaaagagttctaagggtcctgaaataaggaaccatcatcccagcatggaacagtgaagtagaaggggaacagcaagatgaagactccagacaaggcccaagcacacacagctgctccagccacacccgctggtctcagttgactggtttggaggtggacatctcactcaagctcggccaatgggtgtccctcctctggggcttttgaacatgggattttagagagcttgaggatgtcactggaggctgatgtaactcttggagctattggaaactattaggagaatgccaattagcagcaaggaagaggtgagctcacatgcagagagaaacagctgcagagacttgatgacattattggttctggatcccatcacggctgaaggttgcttatcattctgcccttcacctggcttagtctgggaagtgatttcttaattttctccaaggcaatacatgtccctctccattttagctggcctaagataatttttgtcaattggaaccaaatagctctcattaatactgatcactgtacactttcctgtcgaaaatttgaaaatggttcttcattcccctaggaatacaaagcaaaaataaaaatctctaccatagcctacaaggccagcgtgggctggctcctttctggctcctagacctcaagttgtatccttggacatcacctattaacaggcccttgtccatggggctccctccatgtggaatgccctcccttcgaccctactcagtcttcagattacagaccgaccacagcttctctgggaagcattttctgacctccgtggcagaccaaactcccatggaatagtcccttggagtaccaagtcaccatctccccagcacttgccacaattgtaattgtactttcatttgtgattatgtgatggttatttgtctcacctgctgtcagatcagtggcagcattagattctcctaggaaaaaccaactcagggatcccattgattctacattatggtgagtatgaataataataggaataaagtacacaataaatgttatgtgctggaatcatcctgaaaccatttccccacccaccgtccatggaaaaatcatcttccataaaaccggccaaaaaggtttggggaccactgctctacaccatctccagcacccaactcagtaccgtagtggctgtcagatgggtttgcaacttcatggacactcctcctctcaaattctccttaagtgggcccagcttggtgactcatttctaatgaatgaaatgcagtgaaagtgatgtgatgtaatttctcaggctaagtcctaaaaggaagctgcttccacttggctgtccctcgaggactgtttactttgagaaaggctatctgtcattttgtgaggacactcaagcagcatgtggagggccctatatagggaagaactgggtcctcccaccagtggctgttaccagctcactagccatgcaagtgaaccaccgtggacataaatcttttattccagtccagcctccagacgactgcaaccccaaataacatcattactgcaatcttatgagggaccctgagccagaaccacccagttaagttactcccaaattcctgatccacaaaactgagtgagataataaatatttattattttaagccactaagttttgggatgatttgttgtgcaataggtatgcctggcacgcagtagatattcagtggctatttgttgcctgtctggataaataatac

SEQ ID NO: 28336 - DNA, 2300 bp, Homo sapien
tcccagctacttggggggctgaggtgggaggattgcttgaactcagggggtcgaagctgcagtgagctgtgatcgtgccactgcactccagcctgggtgacagagaaagaccctgtctcaaaacaaacaaacaaaacctccctccacagggacactgctagcaggaaagatgatgaagcttggagctgctggagtcatcacctgaatctgagaataaagctaacagaggagagcaccacagacacgtcaaaggaccagcttgagttacctccctggaagtgaccatgtctgcaggtactggaaatttcaatcatgtgagccaataaattcccctcttctggggaaacacatggaaatgggtttctgtcacaactgaaatcatcctgaccaatggatttagggctctgaagaacaaaaaggaaatacatcattagggctcttaaatgcctcaaagggaagcctaacgtcaggcagggtgtcccagaaatgcaatctaacaccttttggtgaaactcattgcctgtctttttggtgagtaggatgggagctgcggagaaaaaggccatgctacttttattaagtatttgcagttacattttgcaaatgatttcagcaactttatctcaggtgttttaacatctcagcatctcacagttgtaagaaacagaatcaatcttctactcagtgcagagggggagagagcatgatatagcaaaaagagcactgaaccagagtctaacaatctggcttttcatctttatctgatcactgattagagtgtggtctcagacaaatcaccttgcttttattggtctcatgactacctcgtcttcaagcactcacccaactctgcaatggaaaatacactaggacagaggttcttaattttttatggggcctgggccctaggaaaacacacactgcacacatgattttacgttgcatggggttcacaactctagaagccaatctacatctctaacttctctgctttacagtaacaccagcttctgcttgagcgctcctccagtgggagggagctcactactcacaaggaagcccattgtactactgaactgtactagaaaaataagttattcttcatatatatatatattttttgagatggagtctcactctgtcccccaggctggagtgcagtggcgcaatctcggctcactgcaatctccgcctcccgggttcaagcgattctcctgcctcagcctcctaagtagctgggattacaggcacgcgccaccacgcctggctaattttttgtatttttagtagagacggggtttcaccacattggtcaggctggtctcgaactcctgacctcaggtgatccacccacctcagcctcccaaagtgctgggattacaggcgtgagccaccgcccctggcgttcttcttcatatcaaaccaagttctatacactgtaatttctactcattggtcgaagttctcaatggcaaatcagaaaaattgtgttctcgcctgtatatgacatctcttcctctctctctctgaagactgtttctaactaaaaaatgtagatgattcgccatgcaaattattttactgtacattgttacaaagataagttcttcacctcacccctaatatgccaaatgttcaaatgtagatgctgaagtccaaataagcacactgctattaatctgcatagatctaggtgttgcaaagaggagaactgctgtataacaatatcttgaaagaaacagcatagtattttggggaaagcactgcattcagaatcagaagacttggagtaatactcggtctcacattccaactacctgtgtatccttgggcacgtcacttaacttctctcagcctggttctcttctgcaaaatgcgacaggaatacagtgaggattaagtgaaataatgtttgtaagcttctagggcaaggctgggacatagcaaattctcaataaataagtgccagctcccgcgctcagcaggctccgagttttattcgatgcgctcggcgctcttggtcgagcgggattccccctccggagcccgagtctgcgctctgggctcgactgaggctccctggccgctcgcgcttttctctccttctccaagatggcggcgatcggcggcgttgaggcgggatccgggcgagccgagtgaaggtagcggcgagcggagaccccaggagaccgggctgggcccccaccctgaggcggcagcagccccgccccgtcgccacccgccgccctgggcccgcgacatcacctctggggtgccccaggcccttcgcggcctagccc

SEQ ID NO: 28337 - DNA, 2300 bp, Homo sapien
attatttctgaaatattctttgccaaaattcatgcacagaaagtgtttaatttgaggtctccattggttcttggcattatcagcctatgaaaatctatataatctatatatttttcttataaactcagtattttagtgccattgagaggatatgctgttttcaaataaattgatataattccctgtatttcccttctacctgcaccccttttggagtcagcaccacttgggtggaaaggggaggacagtagtttccgctgagaaagtgtcatccttaaatgctggaacatggaaaactggctacattatgtatcttgcctcctcacatttttatctgaggcctgaccttatgtccccttcgtttcctatgaaaaggcccttcgaacaggcagttctccaattgaactttaaaacaatccagttaatatagtttcattactctagcttctcttactttgaccaaatccattctttatttcacttctcagagaagtgaagaaatgcttttttatgtttcttttcttaatctaataaatcattcttggtaatgcttcattttcccatttaggcctacctgtatgtacattgtattttatctgattgtgcaaataagtctttttaatgtaactcttatgaaagtctcccttgttaatcaaattcatcttttctttcacaaaagttccatgcttcagtattgtccacagctacctgaaggaattagtaatgtgtcatttaagtgtccttcagtatttctaaatacccttataataatgaaggtaaaattaaatttaaataaatgatcaattagattaactttgtaagcatctgacttaattggatgagaacatttccaaaatatttaatatgtaattttaaaattcctgaaggacttatgaaattgcttgttcttaaaacatttaaagaactttaccttggctgggcgcggtggctcacgcctgtaatcccagcactttgggaggccgaggtgggtggatcacgaggtcaagagttcaagaccagcctggccaagatagtgaaaacccatctctactaaaaatacaaaaattagccaggctcggtggcaggcgcctgtaatctcagctactcgggaggctgaggcaggagaatcgcttgaacccgggaggcggaggttgcagtgaaccaatatcgtgccactgcactccagcctgggcaacagagcaagactctatctcaaaaaaaaaaaaaaaaatccttttaccttacagtgcattttatagcattgtcatcttcaaagtcaaaatggacatataaactcaaatgccaaaaaaggttgtaaaaattcaataaaaaatacaatatctagaacatttaaattatagcaattcttattagtgaaggtcttaataatcataaaagttttatgaccagtggacaaatgataaatgtctccctattttcacctagcctttaagaaagccttggtggtggtgacagctgtcatatggtcaactgatgtaaggagtgtacctgcttttacagttacataaatttgaacaaattcatgtcgccccccccaaaaaatgcaaaagacattgtgctctaaagatatttaacatccctatacagttaatcatttctgtttaaattacaatgcaatagattttaccgcttcaccaatccagttggtaggattttgtggtcttcaaatgtttgatgtgatctgtcttctctgcatcttgctttacttgtgtatgttgtaaccatgattgaacctatccctctaacttaatgttggtttctaccctgtctcagtgttgtcagtcctgttggcattttagaaattctcattaattttgaaaatattttttgtattggaggtattttatatacttccccaaatgacaactttaattcatgactgaaatctaattaagcctagtatacttcctgcagtatcaaccccactgtatttacaaagagaatgaggaggtgacaagacactttttatttcttgctgcccttccagtcagcccttggatcactgcgcatttccatctggaaggttgcttctcctcagtgatttcgcattacaggagggttttccttctttgtttctcagacctggtcctgtagacgggaaggagcctggacacagtgacacattctcaaaggccctgcaggaccaccatggcttatgatgactccgtgaagaaagaaggtatgaccccataatctgagaagcattccaaagggggtatcctcttcaatccttgcagcccatggatatagagaccaggactgggcaccacagcctggac

SEQ ID NO: 28338 - DNA, 2300 bp, Homo sapien
gttacataaatttgaacaaattcatgtcgccccccccaaaaaatgcaaaagacattgtgctctaaagatatttaacatccctatacagttaatcatttctgtttaaattacaatgcaatagattttaccgcttcaccaatccagttggtaggattttgtggtcttcaaatgtttgatgtgatctgtcttctctgcatcttgctttacttgtgtatgttgtaaccatgattgaacctatccctctaacttaatgttggtttctaccctgtctcagtgttgtcagtcctgttggcattttagaaattctcattaattttgaaaatattttttgtattggaggtattttatatacttccccaaatgacaactttaattcatgactgaaatctaattaagcctagtatacttcctgcagtatcaaccccactgtatttacaaagagaatgaggaggtgacaagacactttttatttcttgctgcccttccagtcagcccttggatcactgcgcatttccatctggaaggttgcttctcctcagtgatttcgcattacaggagggttttccttctttgtttctcagacctggtcctgtagacgggaaggagcctggacacagtgacacattctcaaaggccctgcaggaccaccatggcttatgatgactccgtgaagaaagaaggtatgaccccataatctgagaagcattccaaagggggtatcctcttcaatccttgcagcccatggatatagagaccaggactgggcaccacagcctggactcccaagtgatggtccagagcactgttatgacactcagcctccacgccatccccagactgggcccatggaaacgaaaaccaggacaggggttccaacacgagagtctgaaatatgagtctcttagtttattggggtgatcccctgcagcactcttggtccttgccagctccagtgtgcaggagtctggggataggaatcacatcctggactcccacagagagcagcacagcacatgaatccttattcttttcagcctttcgtctgcaagtctgtgtcctcctaccaaatcacaactcagaaaccatatctgaggttgcacatggggcctttgcatagcatggaaacattgtttcttcaggtttgattcttgtatttgcagctaggtcatcaagaaatattctgttcccctgggtctagccctgtatttcagtggacttgattgaaacattgttttaatttggaaatagaggaactgttgcattacctgcatgacgatttggtcattacttacttgactttctcatttcctttcccaaataaacctgtgcttctcagattgttttgatggtgatcatacctttgaggacataggacttgcagctggccgaagccaacgagagaaaaaacgttcttacaaagattttttaagggaagaggaagaaattgctgctcaggtcaggaattcttccaagaagaagttgaaggtaagtcctgaaaatttaaattaggaaagtcttaaactactcatttttttttggtgatgcagagtttttttttgttttttttttttttctctcatggcccaggcttgaatgcaatggcacaatctctgctcactgcaaccttcgactcccaggttcaagcgtttctcttgcctcagcctcccgagtagctggaattacaggcgcgggccaccacgcctggccaatttttgtattttatcagagacagggtttcaccatgttggccaggcaggtctcaaactcctgacctcaaatgattcacctgcctccgcctcccaaagtgctgggattacaggcctgggccactgcgccaggaaagtcttaaactacttcttaccatatttcctaatatttgaagaaggaagtattttttaataacttgagaaaagaaaaataaaacgttatgcacatctatttttattatttcttgtgctttgtttcccaaaatcaaaaatcatcaaagacaagagtggttacaaactgcatttgcctcatcatcttattattggtcaattcttctttaattataggatagtgaactttacttcttggggacggacacacacaagaagaagaggaagcactcctctgatgattactactatggaggtgaggatgggaatgggcaacaggtgggataaacacatcgctggttcttggagtcggggtaggggaaagggatccagatgttgctgactcagtggcctatttaacaggacagtggttcttgttctgagtgccgataaaccagtgtgaaggaggagagaggtggaggg

SEQ ID NO: 28339 - DNA, 2300 bp, Homo sapien
ggcccaggcttgaatgcaatggcacaatctctgctcactgcaaccttcgactcccaggttcaagcgtttctcttgcctcagcctcccgagtagctggaattacaggcgcgggccaccacgcctggccaatttttgtattttatcagagacagggtttcaccatgttggccaggcaggtctcaaactcctgacctcaaatgattcacctgcctccgcctcccaaagtgctgggattacaggcctgggccactgcgccaggaaagtcttaaactacttcttaccatatttcctaatatttgaagaaggaagtattttttaataacttgagaaaagaaaaataaaacgttatgcacatctatttttattatttcttgtgctttgtttcccaaaatcaaaaatcatcaaagacaagagtggttacaaactgcatttgcctcatcatcttattattggtcaattcttctttaattataggatagtgaactttacttcttggggacggacacacacaagaagaagaggaagcactcctctgatgattactactatggaggtgaggatgggaatgggcaacaggtgggataaacacatcgctggttcttggagtcggggtaggggaaagggatccagatgttgctgactcagtggcctatttaacaggacagtggttcttgttctgagtgccgataaaccagtgtgaaggaggagagaggtggagggctggtattttggaggattcagcatagaagaacagtctgcatttgtgatacaccaggtaccaggttccttctccccccaatcatccacttatcttgtgcccattgttatctagcatcccttttgccatacgtagtcctctggcctgcacctgtgggtcacttctcaaccagtatatatccactcacagaaccagttttcttagctatgttatgcacatagctgatgagactcaactttcaccagaatgggtttgtcctgaacacagaaacaaatgatactctgtctgcaatctgaattgttaacttcccataatcccacagctatagtcagttcttctgggtatgtgctctttggttgcttctgaagactcaatgaagagaaacaactttagtggcaagaactgtgtccagggtcagaggcagactctaccaagccaagaagcacaagggcatcatttctcaatgttaggaatcagttaaagggtctcccttcaaatcattcctgttagcctctttctcatgttagctaggtgcttttgatgagagaggaaacttgttagaagttgcttcccatcatattgacagtacttctcttgattatttctagatatttcgtctttggaatcgtcacagaagaaaaagaaaaagtccagcccacagtctactgatacagctatggacctgttgaaagctatcacttccccactggcagcaggctccaagccctccaaaaagactggggagaaatcctctggctcttcaagccattcggagagtaaaaaggagcaccacaggaagaaagtcagtggaagcagtggggaactacccctagaggatggtggctcccacaaatcgaaaaaaatgaaacctctctatgtgaacacagagacactgacccttcgggagcctgatggtttaaaaatgaaacttattctgtcaccaaaggagaagggaagcagctctgttgatgaggagtcttttcaatatccctcccaacaagcgactgtgaaaaaatcctcaaagaaatcagctcgggatgagcagggtgctttactcctaggacatgagttacagagctttctgaaaacagcccggaaaaagcacaagtcatcctcagacgcacattcatctcctggccctgaaggctgtgggtctgacgcctcccagttcgcagagtcccacagtgctaaccttgatctttcagggcttgaacctattctggtagaatcagactcatcctctggtggggaactagaggctggggagttagtgatagatgattcttaccgagaaatcaagaagaaaaagaagtcaaagaagagcaaaaagaagaaagacaaggagaagcataaagagaagcgacactccaagtccaagagaagtttaggactttctgccgtgccagtgggagaggtcacagtgacatctggccctcctcccagcatcccatacgctggagcagcagcacctcccctgccacttcctggcctccacacagatgggcatagtgaaaaaaaaaagaaaaaagaagagaaggacaaagagagagagagaggagaaaaggtaaagcatcttttaagt

SEQ ID NO: 28340 - DNA, 2300 bp, Homo sapien
agccaccgtgcccagcctgcatggagtttatgattccacttcctgtttgggggcatatgagttgtctctgtttttgtttttttttgtttttttttttttttttttttaccatgaataaagtttacaagaacttgttaaaagcttaaaggaagggccagagatggtggctcatgcctgtaacccagggctttgggaggctgaggtgggaggatcacttgagctcagaagttcaaggaccagcctgggcaacatagtgagactttgcctctaaaaataaataaataaaggttaatggaagaatccaaaagaagttcatgctaaacataactccatatgaccaagcaataaggttaagtgaagaaagacatggaaagtgccttgacctgaaggtcatcttaaatggccttctccccgcttatactccaaataccattactgaaacgtagatctatttaagctttcatgtgctagttactgggttagacaatagtggggagcaaaacagaaatagtagcccagcccccagggacatccagactcgtgggggcaaaggcatttgtgaacaggtctcatgagtgttgtggaaacacttcaaagcagtttttatattgtacagtaaagacatcggaccccatggctgctcaaacaagtgaatctacagaggtgattaagttctaatttaggtttgtttttttttttaagacacagccttactctgtcacccaggctggagtgcagtggcacgatctcagctcactgcaatctctgcccccctgggtccaagcaattctcatgcctcagcctcccaagtagctgggactacaggcgtgtaccaccacacctggctaatttttgtatttttagtagagacggcattttaccatgttggctaggcttgttttgaatgcctgacctcaggtgatccacctgcctcagcctcccaaaatgttgggattacaggcgtgagccaccacaccttgcttaatttaggttttctgtcatccaaaatttgtgcagtcaatttactagcctttcagatttaaaaaccacaaacatcacaataagtacttaagcacccacagtagccagactactaaggccatggttattgtatttttggagtacatgccagaagaaaaggtcataacccatagataggtatctagtgtgtaggtgtcagcagacacaccacacacagccaggaaggctgaagagattagaatcacaacgctgggaaaggcctttgagattcttagcttggggtccacggttgtacttcagggaccccagaaactccctgaggttataagcaaaattgtatcgctgccttttttcttcagaaaggctcatggcttttgtcaaattctcaaaggagactgtgacctaaataaaatattttttaaaaatggttacgagtccttgatctaattccagtatctagagaaaatgggagctatgtttggctcacacagtaaatttatggcagagacgggtattaaagccccactcgtgactacatctgtgctttttgccatcctgggcgctagagggaattgcgctgcaattcattaaattgcctctcagtctcaacagatgacaaaccccttgcccttgcctctgatttaaggtaagataatttgggctgcgagcagggtgcatcttggagcggggagaccttgacatcaaacaggaagagtcttaccgggacaaggagacaacagcccagagaggctgtcacccagggtaggtgtgcagtcacagtgaggtcccaaggactaagggctatgaccctaagagtctcggcttctgtgtaactcacccaagtcacttccctggtctacgacccagtttcccaaatgtgtaaagggtcctttagacctcgccctaaaaggtcaggggcgtggcttaaagaggaccgcgcttcccgggccccgaccccagaccctacatcgtgtgtgacgcccgccgccgccgagcaagccgcagtgaggtcatcgccctccgcctcgggggcgggaccctggcgtctcagggcggggcttgtggtcgagcttcgcggtgccaccgccccgcccacgcctcctcgccggcctccgagtgcgtcacgtgacgggtcggtggcgctggcggttgctgtcagctgattcccggggttggtggcagcggcggtagcagcaatggactttctcctggggaacccgttcagctctccagtgggacagcgcatcggtgagtccctggagccccccacagctccgccccggtgctccgcacccagcttcggtcccctgggaagcctc

SEQ ID NO: 28341 - DNA, 2300 bp, Homo sapien
agctatgactgtaccactgcactccagcctgggcaacatagtaagactgtatctcaaaaaaaaagaaacagaatcaagtgccaattgtgcgcagcccaggtttgcgccctgggattcagagcaggactcacaagtcgtgtgacgaggtggtattgcatgctgtgtgccaggttttagttccttcactccctgacatgcctgctgtgtgccctgtgccatgtgccaggccccatgctggtctgagtagggtgaaccagccaggcacagggtgacgggctgggagcaggactctcgtctccctccactctggggccctaggaaactgcatgtgtgccatggatgaatgtgagaaggttggataaactgatgtttctaaaacctgggtgcctgtcagaccctactgggagcccccagaccatctgacagccgcctgccctgctatcctggggttgctgaggcccagcctctgggatccttgtggagagagttgagaagctttgtttagtttgctgtcagctctgcctcagcctacccagggcgctggcatcccagagctgttgtggctcaccccccggtgggtaccacaatacctgcctcatccctctacaccagccgccacatccaccacacacacctccacacaccacacctccacccatagacctacacacacaccacacacacatctacacccaccacacacacctccacacacacctacactcatacacctacacagacacccctacacacacaccacacctacacactcatgcacctacacacacccctacacacaccacacacacatctacacccaccacacacacctccacacgtcatacctccactcatacacctacacacacccctacacacaccacacctacacactcatacacctacacacccccacaccacacacacatctacacccaccacacacacctccacacaccacacctccactcatacacctacacacagccctacacacaccacacctacacacccatacaccacacacacccacacacaccacacacacacatctacacccaccacacacacctccacacaccacacctacacacaccacacctccactcatacgcctacacacacacccctacacacaccacacacacatctacacccaccacacacacctccacacacctccactcatacacctacacacacagccctacacaccacacctacacacccatacacctacacacccccacacacacaccacacacatctacacccaccacacacctccacacacacctccactcataaacctacacacacagccctacacacaccacacacacatatctacacccaccacacacacctacacacacacattcatacacctacacacacccctacacacatcacacctacacactcatacacctacacacaccacacacacatctacacccaccacacacacctacacacaccacacctacactcatacacctacacacacccctacacacaccacacacacatctacacccacacctacacacaccacacctatactcatacacctacacacacccttacacacaccacacctacacactcatacacctacacacacaccacacacacatctacacccaccacacctacacacacacccctacacctacacatacacacctacacacaccacacacctacacctacccacacctacacctacacatacacacctacattcatacacctacatacacacccctgcatataccacccctacacactcatacacctacacacctgcacacacacccctacacacaccacacacatctacacacaccacctacacacaccacatacatctatacctacacaacctacacctacacatacaaacctacactcatacacctacacacacacctacactcatacacctacatacacacccttacacacctacacacacccctacacacacacgcctcccaaagtggcagcaggcctcctgacccgaaaggcgcacccctgttagaagccgcgccctccagtggccctggcgctgccgtccctccgccatcagcgtgactctctctcacccagatgggaggcggctgcgggaaaagcctcagtgactggatggtgagacaaggcatggtgagcaggggccaggcccggccacccggaaagctgggggtgctcgcagggctcctgccaggcatgggcgtggggcaccgtgctgctctccaagggagtgggacccaggagaaggcccagaggagcaagga

SEQ ID NO: 28342 - DNA, 2300 bp, Homo sapien
cacatctacacccaccacacacacctccacacacacctacactcatacacctacacagacacccctacacacacaccacacctacacactcatgcacctacacacacccctacacacaccacacacacatctacacccaccacacacacctccacacgtcatacctccactcatacacctacacacacccctacacacaccacacctacacactcatacacctacacacccccacaccacacacacatctacacccaccacacacacctccacacaccacacctccactcatacacctacacacagccctacacacaccacacctacacacccatacaccacacacacccacacacaccacacacacacatctacacccaccacacacacctccacacaccacacctacacacaccacacctccactcatacgcctacacacacacccctacacacaccacacacacatctacacccaccacacacacctccacacacctccactcatacacctacacacacagccctacacaccacacctacacacccatacacctacacacccccacacacacaccacacacatctacacccaccacacacctccacacacacctccactcataaacctacacacacagccctacacacaccacacacacatatctacacccaccacacacacctacacacacacattcatacacctacacacacccctacacacatcacacctacacactcatacacctacacacaccacacacacatctacacccaccacacacacctacacacaccacacctacactcatacacctacacacacccctacacacaccacacacacatctacacccacacctacacacaccacacctatactcatacacctacacacacccttacacacaccacacctacacactcatacacctacacacacaccacacacacatctacacccaccacacctacacacacacccctacacctacacatacacacctacacacaccacacacctacacctacccacacctacacctacacatacacacctacattcatacacctacatacacacccctgcatataccacccctacacactcatacacctacacacctgcacacacacccctacacacaccacacacatctacacacaccacctacacacaccacatacatctatacctacacaacctacacctacacatacaaacctacactcatacacctacacacacacctacactcatacacctacatacacacccttacacacctacacacacccctacacacacacgcctcccaaagtggcagcaggcctcctgacccgaaaggcgcacccctgttagaagccgcgccctccagtggccctggcgctgccgtccctccgccatcagcgtgactctctctcacccagatgggaggcggctgcgggaaaagcctcagtgactggatggtgagacaaggcatggtgagcaggggccaggcccggccacccggaaagctgggggtgctcgcagggctcctgccaggcatgggcgtggggcaccgtgctgctctccaagggagtgggacccaggagaaggcccagaggagcaaggaggggcagctgagggtcttgcgggaccccagggctcaggctgtttccgggttggcccggccagcccagcttccgcagctcctctgtgcccggttcctgctcttgagtctcgggcaaggacaaggtagcccgtctggcagctaagaggcgatggggatagcggagcgggagacggagccggtgtgcacagctgggcacttgctgttgccactgctgctgggaagtcggctcctgccttctctctgggctctgctcctgcctggggggtcctcaggtgctgggtgacagagcttggaaaccaaactggcctggttggggaaagactctgtctgtcttttccaaagtagctcactagtaactagtgctattagtgccattactgattaatagtaaataggaactggcctattggtttcttgagcatctcctccatgccaggccctgtgctaagcttttgacatcccatttcatcctcacagccacctggacggtaagtactgctgctagcctcaccctaaggacgagggaaatcaggcgcagagaagttaagtaacccactcagagtcacactgtgttaaggggtgagctaggtccagctctttctcactctgaagtctgtgcccatgacctccaactggagtctgcccctgcagaagccgttagagaggaaagcctccaactcc

SEQ ID NO: 28343 - DNA, 2300 bp, Homo sapien
tgtgttaagtctttttttcctttgagacagagtctcgctcttgtcacccaggctggagtgcagtggcactatcttggctcactgcaacctcctcctcctcccgggttcaagcgattctcctgcctcagcctcccaaagtgctgggattacaggtgtgagccaccgcgcccggccagtgttaagccctttttctagtaatctcatcaaatatccaggaaagatcaaccactggagagagaaagagactgggagtcatcaccagacccagacagatttacctgttcttctgaggacagtgccaagagattacctgggggactttatctgcctaggacaacctttgtccctgtgcggctccacctccaccttcccttaaagtcggcctttcacctccagggccattccttcttgctaatgatttactgtctttcaaaagaattgtctgcattccctatctcccttctcccctataaaaaaggctgggtagcctctgtactccactgggttacagggtcaccattcttccgtgattaccccattacaatacatttttgtatgtcttttctcctcttaacctgacttttgtcggttggttttcggggaaccttcagaggaagaaggggaatttttttcaaggccccttagctcacccttgggaggatgatcctttccaatacaatctcagaagtgcctctgggctgtagtggccctaggctgaattccaggaagttttttttttttttttttgtttttttttttttttgagggacagcgtcttgttctgttgcccaggttagaatacagtagcgtggtcacagctcactccagcctctacatcccaggctcaagtgaacctccagcctcagcctcccaagtagctgggaccacaggcatgtgccaccatgcccagctaatttattttatattttgtagagacagggtctccctatgttgcccaggccagtctcgaactcaaagcaatcttcccacctcgactgggctcaaagcgctcttcccacctcaacctcccaaagtactgggactacaggtgtgagctaccatgccaggcctgaaagccatcttaaaaaaaaaatcttagaatgagaatcacagtattgggaaaggactgtatgaatcatctggtccattcgttttgtcctctgggttcacccagtgaccctatttcccccgagttctaaggagtccacctcatgcagaattgattcaataggcgatcagcaagggccagctctgctctgggccctgagcaggcactgagtataagtcagacctgaatgtgcctggaagagtgtcccacgcattccagcagggaagcagtttgtatgacaggtgtcccagtccaggcggataccaggtgctgccagagtgtggaggaggcaggcggggacttagtctcctccctgggtttggacactggcatcctgctttatgtgtgacaccactgcacccctctgagcctcggtttccccatctgtaaaatagaagcgatctaccctcacaggtcagttgtagggatgaaccatgaaaatactagagtctctgttttttgacaggaactcaaaaaacagatcctaaatgtacatttaaagagggtgtgaggaggcaagcagtcagcagaggattccagcaggtgacattttagggagctggagacagcagagcctggggttgctaagttcctgatgttgcccaccaggctattgctctgagcagcgctgcctcccagctttctggaaccttctgggacgcctggggtgcatcaagtcccaaggggacagggagcagaagggggggctctggaaggagcaaaatcacacccagagcctgcagcttctcagatttccttaaaggttttgtgtgtgtgtgtgtgtgtgtgtgtgtgtgtatgtgtgtgtgtgtgtgtgtgtgtgtgtgttttctctaaaagtcctatggccagactttgtttcccaagggtcatatgactgctcctctccaccccacactggcccggggcgggctgggcgcgggcccctgcgggtgttgcaacgcccggccagaaagtgggcatcagctgttccgcctggcccacgtgacccgccgagcataaatgtgaccggccgcggctccggcagtcaacgcctgcctcctctcgagcgtcctcagcgcagccgccgcccgcggagccagcacgaacgagcccagcaccggccggatggagcgtccgcaacccgacaggcaagcgcggggcgcgggacgcgggacgggcgcctttctctcccaaccctgcttgcgtccta

SEQ ID NO: 28344 - DNA, 2300 bp, Homo sapien
ctcactgcaacctccgcctcccaggttcaagcgattctcctgcctcaggcttccaagtagctgggattacaagcgcctgccaccacgcccggctaagttttgtatttttagtagacacagggtttcaccatgttggccaggctggtcttgaactcccgcctcagcctcccaaaatgctgggattacaggtgtgagccacggcgcctggactgtcttttttttctttttagagatgagtctcgctctgtcgctcaggctgaagtgcagtggtgcaatcaaaactcactgcagtctcaaactcctgggctcaggccatcctcccaccttggcctcttgagtagctaggacaacaggtgtgctccaccatgcccagctaattaaaaaaaaatttcaagccgggcgcagtggctcatgcctgtaatcccagcatcttggaaggctcaggcgggtggatcacctgaggtcaggagttcaaggctggccaacatggtgaaaccctgtctctactaaaaatacaaaaaattagccaggcgtggtggcacacacctgtaattccagctacttgggaagctgaggcaggagaattgcttgaacccaggaggtggaagttgcagtgagccgagatcgtgacactgcactccagcctgggcaacagagtgagactctgtctcaaaacaaaaaaaattataaaaaaatttctagagaagcgggatcttgctatgttgcccaggctggcctcaactcctggactcaagggatcctctcatcttggtctcctgaagtgctaggattacaggcatgagccacagtgcctatagatcaaggttgaggcttagaagtgaagggagcccagaggaacctggctagagtttggtcaaggagagtctttgtcaccatactacagaaaattaagcagctgttaaacagaatgaggccggtctgggcatggtggctcacgcctgtaattccagcactttgggaggccgaagcgagtggatcacttgaggccagaagttcgagaccagtgtgggcaacatggtgaaaccctgtctccactaaaaatacaaaaattagctgagcatggtggcgcctgcctgtagtcccagctagttgggaggctgaggcaggagaatcgcttgaaccggggaggcagaagttgcagtgagccgagattgagccactgcactccatcctgggggacagagtgagactccctctcaacaaataaataaacaaataaaagcagtgtgttagggtgcgagaacccgggtcggggacgcgggtgagccgcgcggtaatcgccctgtcctgccaccagctggaggacaggggctcctcagagcctcaggcccagagaacgggccccacgaccgggaagcgaatactccacagggcacagtctcccaatgcaaaatgggcacctggacccaatcatttctgaacttctagttttttctccctatggctatgaaaagggtcattttttttcataggactttaaaagaaggcttaagaaaagcacgcaggcctggccgggtagctcacgccagtaatcccagtgctttgggacgtcaaggcaggcgggtcgcttgagagtagagtttcgagacctgggcaagatggtgagactccgtctttatgaaatattttaagaaaatcacgtacacctgtggtccccgctacaagggaggctgaggcggaaggattgcttgagcccaagaggttgaggctacagtaagccgtgatccagccactgcactccatccccggcaacacaacgagaccatgcgtcaggaaaaaaaaaaaaaaaccaagaaaataaaaaagaaaccacctaaaggcgtcctccgcgcgcccgcccctccgccatctttgcgtccgccccgtcctgcgccgccacttccttcccagccagaagtttcgcgccaaattgttccgcacacaaaatggagcccggaaggaggcgaggtcatgcactttgcagccaatcatcttcggcagacagtccgggcggcggggctggagggctcagaacggtccaatcgctggccgcgaggctccggcgaaccaatgggagcgcagcggctgcggcgtccgaacaccgcctcttgtttttcccgcgaaactcggcggctgagcgtggaggttcttgtctcccctggtttgtgaagtgcggaaaaccagaggtgaggctagtgggagtgggactgggactgggagccagcaggcatctggatttccgggtgtagttggagtgggacaggagtttctcgggaactggggttggagtccgggagcgc

SEQ ID NO: 28345 - DNA, 2300 bp, Homo sapien
agctggcccagcgacctgagtcttcctgaccccagccttccaggtgaagcgtgccaccctgctcacctcccactgccaagttcactgccagctcaaggctcacagcctgtgtgtgtcatgcccagcacaaaccctcccgggctgaagccagttcccagaggcaaagtctggatgtggaaaatgcaccaggctgcaatcctgccacttgccaccaggtgactttgggcacatccccttagcccctctgtggcctaaattggggcattaaacacaatcaggtagtacaggtactgcaccctccacccccacctgccccatcctctctggttaactttcctggagaatctcaagatgttacagagacaagcaaagcaagtcactttccatattcaaagtcccaggccattttagtacttctgtcattctgtggacccatcaatatcatacccattttagagatggcacaaccaggacccagagacttttcatgacggcccagggtcagatatctaggtagttacggagacaggacttgaacgccagtctctcagccaatggagctgacccctcaggtgccctcccagacccctgcgtcctctcatgaggtagggaggccagatctgggttgggggtgaggctggcagacatccctgaggtccagggatctggaactgagggacacagacacagcatcccatccctttgctgtatcacacaacgagaacattctcttttaagcctcctgatatgtgaaggagaaagtctctgttaggtgctaatgggtatttaacacctctccaaaccttgccaatctccctttttcactgagggcacacatctcaagccttggcaggccacggtttccagctggaatttaataaccttgctttgttttcactgtgcttattttaactcttactttctatttatggcaagtgatactgatttcccatttaaggcagtgatataatgattctctaaaaaaacgtgtttaaggggtggggaaagtggatctgatattttaaaaaatatattaagtaataagtggtgtggagatatggcccagtgagaaggcccgatgtctggcctaggtcaagcccctcatttaaaggtggggagggagaatgcaggcaggagacgcaatgctcaaggcacctggtgtgtccccgtcggccgtggtctctgagactcgcatgcctcgaagacctctggctactaagcctaggtgactccccgcccctctgggcgacacgtgcatggcccatgtgccagtccgcagggtcccgtgggcaccgtgagctcgggagggaggcggcggctgggacaggcaggttggacacctgggagggcacccggggacttccgcgaaggaggagggcgctggaaccgtggcgcgctcgacctggccgggcgcaagccgctggagaccccggccgagtgggcaggcggccggaccccatgcgggtcacctgcggccaggccgggcgtgcgtgtgagcgcgtgcgcagacgtcagcctccgaggcccgggccgccttctgggcaaggtgcgcgcgcccagcggccccggccccacgcgcccggacacgcggaaccgcagaccgcggcgccccggaggccgcgaaagggatgggcggggccgggccgcgggacccgcctcccattggccgggcgccggggcgaggcggggcgccggggtggggcggggcgagcgggctctggggggcagacgctggcgctgggcggcgggaggcgcggctcgcggggggccgaaggagcaggtgggcgacgctcgcaggggcgcgggagggtgccgctgggaccgtcatcaggagcctggggttctgccacctttcggagggatcagcgacctcttcgccctgcgggtgacagtggggcatctgcctgcgagagggggaaggagggagaacccagggccacacacaaagttctcctcatctggggacaggaggaggtgaaggaggaggagccgggttgatgctaacttggagctgcgaaaccttggggcggcgttcaaggccccctcccacacgcgcgcagagcagagcgccctgctcctccttcagctgctggcgtcgccgcgcggggagaaagaagccgtccctccggcgctgggagagctgcagagccgcgggcagagaaggaggccgcggccgagcccggcagcccgataccccccatccgagcgaccccctttggggcaggcggagaaggtggcataggcgaccaggagggttcgcccacctgggacacgcacccacagtcacctccaaaggaccc

SEQ ID NO: 28346 - DNA, 2300 bp, Homo sapien
cctttctgtcacttctggctgggtgaggggtctctggcaaaggggcagaaggtgcgtgagaggttgcgaatggccaggactgtcctggggccagccggggcacctggtggccaagcttagaaacatgacaggtcctcttgggagggctgaccgcagggagcgttgggtttcaggctgctggcgtcggcttctgtggtgccctttctgtcggctatgagagtccagacagtgcccaacctcctccccttctttccacacgcacaaccaccccaccccctgtggcctgagctgtcctgcctcgccacaatggcacctgccctaaaatagcttcccatgtgagggctagagaaaggaaaagattagaccctccctggatgagagagagaaagtgaaggagggcaggggagggggacagcgagccattgagcgatctttgtcaagcatcccagaaggtataaaaacgcccttgggaccaggcagcctcaaaccccagctgttggggccaggacacccagtgagcccatacttgctctttttgtcttcttcagactgcgccatggggctcagcgacggggaatggcagttggtgctgaacgtctgggggaaggtggaggctgacatcccaggccatgggcaggaagtcctcatcaggtaaaaggaagagattccattgcccctgccacccacaccctaagatcaagggtgttcagctgcaaggtggaaagtttgcacgtggggtaggtcagttggctgcattagttaagggtgttagaacggtcacttgctttttctttgcttttaagtgtcagggattggactcaggagagggaaaggagccatttcaggctgatgtcagcagctggaggaagcatgagaatcaaacctaggatgctcagagtccaccaggaagaattttagaattatagacagtcagagttaacaagggtcctgagagattttgtacagccacctctcttacaggatgaggacaaaaagggactgagaaggggaggacatttccagagtcacagctcattaaatgctcttaaagtgtcaaggttaagacatgctcttcaaggggagacagatctggttctagacttggctctgccactgagccactgggtgacctttgggaaagtactcaacctctcggagcctcaatttcctctcctgtacagtgaggggatatcctaatatctatatcctagaggagatgtgagaattaaataaaataatgcatgcaagaggcctggcatggttcctggcatatactgagtcctagaaatgttagtagctattactgatgaagcccaggctagggacctttcaaagcattgcaattagagaacagaagatagaggctcattagtgaccttcgatgttgagtatgtctctagtttgagaggtctgaatgatgtggtctgcaagtatatcctgccttctaccacaagggattccagaatacaccaaagaaaacaaaattctgaggtttgtaaatagagggtggctgtggtttgtacatagaagctcatctcctcgttgccttctatcccaaaggtgatacactcttctcttggccccttccctcaccattctgagctggttccctcagaagtctaataggttaagaatcaacgtttctgccaacgggaggaaggaagtgggcgccggggttgccacaagtgaatggattgtctttggcactttaatttgcagattaatttctccttatttgtgagccagagccaattttcctcttccactccgtcgtcctttgggtctcccttgggctttacccatttccagcttccgtctacctcgggagcatggctggtcctggaagctccgttatctaaaatttgagccgttggtgatccgtgctagaaacacttgaggaagaagagttgagttttctgttgactgtaatggcatcgtagtgtgtttatgtctttcttctcctgtccctgtcatctggctgcaacaggccctgttggattgcacaaagtgctcccccgaccaacacacacacacaaattgacatcaactcctgggccacagatatgccatgtgaccttggacaagtctctccacctctgggccttatttctctgctggttgagcgaagggattgtcttccatggtctccgagatcccgtcccacgctcatgccctagaattctctgagtccttgatgcacttttgcctttggcgaggaggcaggacagtcaggcgtggaggtaggagaccagagtttgcagagcagaggtctttccaaggtgatttgggagctgccagac

SEQ ID NO: 28347 - DNA, 2300 bp, Homo sapien
actattcagatggagccctgacattggctttctcagcttggctgtgactggcagcaggtttgcgggagaactgtgtgtcccagaacatgactggctacacctgcacctcagcaagattggggcagggcagttatcttcaaaaagctgtgtaggtggggcagtcattactgacaaatccagtgcagacccaggatggcccaaacactggcttatcctttctgaatctcatctcccacagctgtaaagcggggtggtgctcgctacctcacagaggtgttgtaaagattagatgtaatcttgccaagcagccactttgtaaactgtatagtcttatgcagatggaaggaagggcctgtgcctaccttgatcatagcactaaacaaactgtactgtattttcattcctcttagttatctccctaaaaagactctgagttccttgaacacaggaaggtgttttatttgattttgttatcctcagcatgtagcagtgtctgacacacagtaggtgctctatcactgtgagagggatggatggatgggtggagttacagatggatagaaggatagatggagggatgggtggatgatggatggatagatggatggaggggggatgatgaatggagggataatgagtggatgaatgagggaatgggtggatggatggatggagggatggaggaacagatagatagatggagggatgggtgggtgatggatggatagatggatggagggagggatgatgaatggagggataatgaatggatgaatgaggggatgggtggatggatgaatggagggatgatgggtggatgaatgaattgagggatggatggatgaacacatggatggatggatagatggatagatggaggaactggtggattttggatggatgggtggatggatagatgaatgaatgcctggatagacaaagagatgatggatagatgaatagatgaattaagggatgtcggatagatggagggattgatagatgttggatggatgggtggtggatggatagatgagtgaatgcatggatagacaaagagatgatggatggatgaattaagggatgacagatggatggatggatgagtaactggatggacaagtggataaatggatagatggttgaatacctgaatggattgaaggaggatgcatggatgtaagataaggctaatcatcctccactctctttctttgcaaaaccatccacccatttactcaataaacatttattcagttcaaacttggcacaaagcaccatgtgaggcccaagagatacgtgggttaataaaacagagctcctgccctcctgaaaactgcaaagaaaggggcgtggcttcctgagttcaaatcccaactctgccagcgactagttgtacatcagtgatgtttccctactttctctcaattaaatagggataatgtcagtacctatcacattgggaggtcttgcggggattaaatgagttaccaaatgccaagtgtttgggacagggcctggcacccagcaaagtctcttgtgagtgctggctgctattatcctaatggagaagatggcatgaaaaccaggaaataggatgccctttgggaagcaatgcaacaggaacttacacaaagaaaggaaaggaggaagcaattagtggtgtctcaaaggagtatgtcaagaaaaacttttcagagggaaacctttgagcagggtcatgaaaacaggagttctctaagagattgtggacttgcctgggaccacctggctataagcacaaaaccatccggttcctttctgtcacttctggctgggtgaggggtctctggcaaaggggcagaaggtgcgtgagaggttgcgaatggccaggactgtcctggggccagccggggcacctggtggccaagcttagaaacatgacaggtcctcttgggagggctgaccgcagggagcgttgggtttcaggctgctggcgtcggcttctgtggtgccctttctgtcggctatgagagtccagacagtgcccaacctcctccccttctttccacacgcacaaccaccccaccccctgtggcctgagctgtcctgcctcgccacaatggcacctgccctaaaatagcttcccatgtgagggctagagaaaggaaaagattagaccctccctggatgagagagagaaagtgaaggagggcaggggagggggacagcgagccattgagcgatctttgtcaagcatcccagaaggtataaaaacgcccttgggaccaggcagcctcaaaccccagctgttggggcca

SEQ ID NO: 28348 - DNA, 2300 bp, Homo sapien
ttccctactccatgatttctctctaccttatatcacagtgtgcaattattgagcacttactatgtatcaggcaccatgctgggtgctccctcttttaatccttacaatgatatttaagataggttattcttttcaaaatctccactttatagataacaaaagcatagaccttggaaagttatgatacttttcatggatcacaaaagtagtgcatggtagggccgagtccaggagtctcattccaaagcctttagccctatgctgaatgacctcgattattgcccttatcagaaagtactgacaacattaggtcacacatccctccctcctaccacctctcaatgctcggaggccagccggtgtcaccttagtccccccagagcccagcacggagcctggcacacaccaggtgagcatgagtgctgtggaacgtgactatccgttctgagcccccaagtccttgtcttggtccttgtgcttggaatatcccttcctcactttgctcctaacaagctcctattgatccttcaaaacgctgctcaggcatcacctgagcctggcacataaagttcttcccagtaggtgtcacctcccacagccccacttgccccacacgtctctggcaggcttttgcagcactgtttggtacctctgcttagaacactctgcagaacgctccctcatacgttcacatccaggccagccatcacctctgaacaaactcctattgatccctcaaaggccttcacctcccaggcctaggcactgccttctcacccttccaaagcctttgctgaaatgtctgctgcgttccagatcccactgaggtatctcctccactggactttgagtcccttgagagcaaggaccatggataccttatatcaccgtgagcaactattgagcacttactgttgttaaaaaagtttaacctctagccgcctccttacatattttaagttgggcctaaaagtttttctgtacatcatgaactataacaagtggaggtatagacagactatagcctacactgtgccaatcaccgcattttggccaatcaaatgcagccaactgttcgaaccatgttcagataaaccagatgccaacctgtaaccaatccagctgtttctgtacctcatttctgttttctgtatgtcactttcctttttctgtccataaatcttccactatttagctgtggagtctccagacctactctggctcgggaggctgccctgctcgcaaatcattcactgctctgttaaactcctttacatttaatttggctgaagtttttcttttatcactatgtatccaccacattcagtgctccctttttcttaattttatttatttatttatttatttatttatttatttatttatttaatttatttttagagacagggtctcactctgtcacccaagctggagtgcagtggtgtgatctcggctcgctgcaacttctgccttctgggttcaagcgattctccagcctcagcctcctgagtagctgagactacaggagtgcaccaccatgcctggctaatttttgtatttttagtagagacagggtttcaccatgttggccaggctggccttgaactcctgacctcaagtgatcctccctcctcagcctcccaaagtgctgggattacaggcgtgagccactgcgcctggccagtgctccctttttcagtcctcatagtgacatttgaggtaggttattcttttcaaaatttccattttacagatttaaaaaaaagcgcccttggaaagttatgccacttttcctggatcacaatattaaaagatcacaattcatcttctaataatttggcaagccatccatggtcttctaagcaaggcgccatgaatataacgaatatagagacagaaaaagacccctccccactggctgggttgagggactggagagcccagatggaagggcagaggtgcaggcttttttccttgttgccactagatggcagtagggcacccgttgtcagccctggggcaaggtcaccgactgtctttgcctttgcctccagcaagccaaaaccctgggcagactcaatccaaaaataaacaatcaaagagcatgttggcctggtcctttgctaggtactgtagagcaggtgagagagtgagggggaaggactccaaattagaccagttcttagccatgaagcagagactctgaagccagactacctgggtcccaatcttgggcttggtatttcctcgctgtgtgactctgggtaagttacttaacttctctgtgcctcagttctctc

SEQ ID NO: 28349 - DNA, 2300 bp, Homo sapien
ttattgaaagcattgctttccttacaggcttgaattgcacctgagttccaaaggagaagttgacattcttccagaacatatgcccagtgtcttcaacttgagatggagctgggatgccaagtctgcaaatgtgggttttgggcttggacaagcctgggtttgcatcccaactctgccctttgctgggactgtggccctgggaaaaatgagcctttctgaactttcctgatggcactcataaatgggagacagtatcgatgtcaggctgtgagcatgcatgctgcacatagtaggtgtttaatgatgtttctcaataacaaatgatttgaaataaaggcagctgtgtgaagcactgatagtaaatgtggccaggggcacagatagcaggcagctgggagggagggaagagggtctgcttcttgaggggtgatcagggaaactatattagtaggaatgtttttgttgtttttgttgttttgtgtttttttgagatggagtttcgctcttgttgcccaggctggagtgcaatggtgcgatctcggctcgctgcaacctctgcctcctgggttcaagcaattctcctgcctcagcttcctgagtaggtgggattacaggcatgcgccacacacctggctaattttgtatttttagtagcgatgaggtttctccatgttggtcaggctggtctcgaactcccaacctcaggacatctgccggcctcagcctctcaaagtgctgggattacaggcatgagccaccatgcccggctggtaggaatgttttgattgcaagtgacagaaatcacttttggctcatggaatgtgactgtaccttgaataagtaagacatacttttacgtcagggcctttctttatatttgctattccctctgttgaaatgctttccccccaccccgcaaggtatttctgtagttctctcctttatctctttgaatctttatcaaatatttcctttatctcactgaatctttatcaaatctttatcaaatacatttaaattaaattttaaagtacattttaagccagacgcagtggctcactcctgtaatcttagcgctttgagaagtctgaggcagctggattacttgaacacaggaattaaaaatcagcctgggcaacatggtgaaaccctgtctctataaaaaatacaaaaattagctgggcatggtggcatgtgcctgtggtcccagctacttgggaggctggggtgggaaaattgctgaagcccaggaggctgaggctgcagtgagcagagattgtgctgctgaacaattcagcctgggtgacagagtgagattctgtctccaataaataaataaaaagtaagggccgggtgtgggggctcacgcctgtaatcccagcactttgggaggtcaaggcaggtggattacgtgaggccaggagtttgagaccagcctgggaacatggcaaaaccccatctctactaaaaatacaaaaattaggtggggtggtgcatgcctgtagtcctagctaatcaggaggctgaggcaggagaattgcttgaacccaggatgcagaggttgcagcgagccgagatcatgccactgcacccccgcctgggcgacagagtgagattccatttttgagacagagtttcactctgtctcaaaaaaaagaatctcccactctctgctcaacattctctatgcttcttctctactttattgctttatttttctccataggatttatcatctaacatgctttctatttttattatttatcttatttattgtgtttctatccatcccctcgtactattgtgtaagctccatttggttggatctttgactttttttttaactgctgtatttttactatttaggactgtgccttgcacacagtaggtgtggtatttaactttatgtgtcaacttgactgggctttgggatgcccacatattttgttggacattatttctggctgtgtctgtgaggaggtttctggaagagattagcatttgcattagtagactgagtaaagcagatggtctccaccacgtgagcaggtatcatccaatcactgaggacctgaatcacacaaaagggtggaggaaggggaatttgctctctgcctcactgcctgagctggaacatttgtcttctgtcctcagactgggctttaccccatctactcccaggatactcagaccttcagactctggctgaattataacactgactttcctgggtctccagcttgcaaatggcaggctatggaacttctcagcccacaatcacgtgagccattccttataat

SEQ ID NO: 28350 - DNA, 2300 bp, Homo sapien
agagtctcgctctgtcgcccaggctggagtgcagtggcacaatctcggctcactgcaacctccacctcccaggttcaagcgattctcctgcctcagcctcccgagtagctgggattacaggtgcccgccaccacacatagctaatttttgtatttttagtagagacagggtttcaccatgttggtcaggctggcctcaaactcctgacctcaagcgatccacctgcctcagcctcccaaagtgctggcattacaggcgtgagccaccgcgcccggtccgagagtgtgttttaaatcacaagagactaaggggccttcaggcaagtttgtttcttttcagcaggtcttgggtcccttgagggaagggaagtggactctaggaaattaagcgactccctacttttgttcatctgagctatagggtggatgttttctgtccccttacataagcagcacttcctgcatttggctacagaacatttttctcacatggcatctcttggggcgattgtttcacaagagccctggtggtaaacactgcccccatccaatggccggtctggcccctgagactcccaggaccgagcagtgaccacaacatctgggtccgttgccagggaaaacaacaggcaggcctgggatggctcagcggccccagccaggcagccaagtcctcctcaaggtcaggctgtgtttagcgtgttccccaagtgtgggaggccaggagcaggggtgggttgtggaatccgggatgccacggttggaaaggcccctacaagacccaactcagcagcccttaacccctcattcctgctcgtagggcccagggacaggaggtggcctctatcacagcaaagccaggactggctaggtgggccgcaccttctgcaaagcaacagcctccaatgtggtctcagctaggggtggtgactggggacttctgggcatataaatacaaacaaaccacatggcttctgatcacaatttgacacaaatgctagagagacacagatctcagcccgtaacctcactgtgggctcattcttgtagacacagagcctaggactggttcttagctgtgtaatcacaaacaacccacaacttctagaagcctgggtttcctcttccttaaagtgggagacagagtatcacaatcctatatctccaatccttgaggccagatgcatgtcagagttcctgatttgggggatttttagaaaggtaatggggtgcaggtatcgtgtactatgtaacccacgcacccgcagcagccctcctcagtcaaacatattaatatttctgcagtgactgtaaatattcaaattaagcaggagacataaaaaccacaggtgaattcatgccagatcaggtcaggttttgccactaaatgaataaattatcatttttttttaagttttcattctgaggccaggtgcggtggctcacgcctgtaatcccagcactttgggaggcctagatggatggatcatttgaggtcagcagtttgagaccagcctggccaacatggcaaaaccccatctctactaaaaatacaaaaatcagccgggcgtggtggcaggtgcctgtaatctcagctactagggaggctgagacaggggaatagcttgaacgtaggaggcggaggttgcagtgagccgagatcgtgccattgcactccagcctgggcaacagagcgagacttcatctcaaaaaacaataataataataataataaaataaagtttccattttcagaggattctgcattcagagttattagccctttaatgctgtgcacctcatagggttgttacccacatcagcgtcacgtaagatgctgtggaggaaagcagtttcagaacaatcagtgatgacagctactgtgaatccactattcaacaggcgccccatcgcttgctcatgggctcctcaccatagctctaagccacaggagctattttcataccccatataggtccatcctataacacagccaggacagagacgagagactcaggcctcctgacttggattctgctctttcacctccttgttcatccaattagagaaactggcaaaaaggaaactgaaagtgacagctggagcccatgatttcctggaagagccctagagctttgctttttctctcctgcagcacttaaccgaaaccagttttgcaatcaattcctgttcaaaggccaccctactcttcctatccgtctttctccagcccagacactcacagccccctgccagaccaggggacctcggagaggcaaggacagaggttcaggatcttcc

SEQ ID NO: 28351 - DNA, 2300 bp, Homo sapien
cgcagataacacacatctctgccttcaaggtgaagctccgggctgccacaataaaccactcactgcatcagctgaaacctctgcactgtacctatctatgtagagcataggaagagagcaaagaaataaaaagcagaatgcctaaaataatgggacaaatcaaagttgaataattataacaaaaaataattaatatgaatatgaataacattaagaaaagtatcaaattgggtcaaaatcagatctgagtaattttctacatccaagagataacctgaaataaataggacacaaaaggccaaaataacaagttagaaaaacttacatagaaccaacaaaaaaagaaaacaatattaacatttaacagtattaatttgtcagattttgtcttaccatgtacttggcagcattccctgcaccaaatgcattactgtacaagtgggagattttatgataaaataatgaataataaatctcattactaaaatctttttattctattggctttttgttgttgttgagacagagtctcgctctgtcacccaggctgaagtgcagtggtgcaatctcagctcactgcaacctccgcctcccgggttcaagagattctcctgcctcagcctcctgagtagctgggattacaggtgcccaccaccacgcctggctaatttttgtatttttagtagagacttgttggccaggctggtctcgaactcctgatctcaggtgatccacctgcctcagcttcccaaagtgctgggattacaggcgtgagccaccgtgcctggcttctattggcttttattataaaactaacaagttactttggtaacaaagctcaataatatagatgagtgaaaagtgcaaaagtattttgtcaccctagccctaaatctccctccctgagctaagcctgttcacatttggtgtatctccttcgagaatattcccctactcctacatcacatatatagtacttaaaaaaaataagaaaagaatataaagaacatattcttcaacctcttttcttttacttaatatatcctggacctctttctaggtcagttgtacatagatttgcctcgttccttttcacatccataaacctttattttgtattgctctattttcatgtaaacagtccccggcatggatttttcaaattgtttccatttctttatacaacttcaaataactggatgaacatccatacacgtttgtctgttgtgttgtgttgtgccgttgtgttgtgtccgtggtgggtgtatttctagaggtgggatgctgagtgtcaggcacatgtacttctcatgttaagagacatcccaagaaggccaggtgcagtggctcacacctgtaatcctagcactttgggaggccaaggagggtggattgtttgagctcaggagttagagattagcctgggcaacatggtgaatctccatctctacaaaaaaaaaaaaaatatatatatatatatatattagctgggtgtggtggtgcacacctgtagtccccgccacttggggggctaagacaggaggatcacttgagcccgggaggttactgcagtgagccgagattgtgtcactgcactccagcccaggtgccaaaatgagaccatctccaaatgaaagaaaaaaaaaaaagaaagataccctaaatcatccttccaaaagccatagcagctgagcgcagtggctcacgcctgtaatcccagcattttgagaggccaaggcgggcggatcacctgaggtcaggagtttgagaccagcctggccatcatggtgaaaccctgtctctactaaaaatacaaaaattagccaggcatggtggcaggcacctgtaatcccagctactcagaaggctgaggcagaagagtcagttgaacctgggaagtggaggttgcagtgactgagactgcaccactgcactccagcctgggcagcagagagaagctccatcgcaaaaaaaaaaaaaaagaaagaaaagaaaagaaaaaaaaataggtgaggactgggagagacaggtttcaggcatggagaagggagtcatatttattaatcatattataagcttaaattttaaaaaatctaaagcatgccatgtggcaaacaaggaaatttgcaagttcccggttccaaggtgttacctggtaagttcttttaagctttcagaaaacaagcaattctcacgttgtacaaattgtcccagaaatagaaaaaatacgttacactattttttatacccaccatatgctattgctgggtggagatatagcagatccttggttttaatga

SEQ ID NO: 28352 - DNA, 2300 bp, Homo sapien
tgaattatattgccagtgtcaggcaggttgaataggggagcgatgaagcactgggcagccccactggggacaccaggtatcattcagaatgaattgcaaaggaataagaataattctttttaaaggggcatgtgtgtatctgaatcaagcttagccaagccaaatttatccagctatcagagttccaaaaagccgtccgtgtgtgccctcctacattagggtgtgctgtggccatgctaatccccattttttgttttatttcaaatcacacacagatagaatctgcaaactgcttcagatcaaacaggtctgattgtgtgtaaatacatatgtcctttttaatttttattattaatggttgcttcagttttgcatcagtgcatggttaaaagcaatacacatcagctatttcatgacttcatatctccaaatgaattatttctcctctttttttgtttgtttgtttgtgcagtcagctgaagaaatgttaacatctcactctaaatctctcagtggagtctctgttcccttctctgatataacagatgggttactgcttgttataattattaacattgtggtgtgggccagggctagggtgggcaagattgactatttctttgggctggggaggggccagtcgttagggtatggaatgttaactcaagtggtgactgactgtttccgtaataccaggtcgttgtggctgcacgctctagtaattgaggctgtgtacttcaccgagcttgtggtagagcctagggcaaaccgctgtcccaagagaatgctgggatagatagagttagccaatacgagtctgaacgtggtgattttgctggttgtttagctccagatgttggcatgcttagtttttaatgtgattaataaatgtggcgccatatccctccccacgcctgaaccctgtctcttctacctccttcccacccttgttctttttgaaaaacttaagaaacagtaatgaaaaccttggtgtttcaaactgcactttgttctcatgttttataaaagcctttagatttgctagtaagagtgaaagctgaaaaaacggtttctcagcctgaaatttctatgcactttgaaatctggaatagaaataaatatatctgaattttctttttctcacattttgtgatatgttttgttgaataaagcagcaaaaatactttcgagtaagtgtatgtgtgtgtgtgcgtgtgtgtgtgtaagagagagagagaggaatacatccatgatacacaattaatttttctacttttggagtagtcattagtgaattaccaagttagtttagtaggatattgcctatctatcctaaaatagttcatcttttaaaggtttctctgtaatgccattattataaagtaatcaggagaataatcatgttaaagtcatctgctttaaaaaaaactcttcatgtgttttttcttagtgctgatattcttgagccttttgttttcagtaaagtatttgccaaccctgttctgttttcttccacttgaaaagcagagaacttcatcatgtttaaacttcaaagtcagacttgacttatcaaagaaggaaaccgctacagatagattctctccatctccttctggattggaaggaagattcttttccatagtctgatccatttgaattgttttgattagcagtaacattactcctaaaccaccaaggttcctatggcttcctgtaggcctaggaaaatgaggggaaattggttctgtcagcaacctcacttagaacctgttttttaagaatacagcttaaagccatgatttgatagaatactcagagatcgtacctccagtacctcactcagtcttcctgagagtcaggtgtgaaacctacccttggttgagtacttttgaacctcagtatccctttgcaagaatttatacctctgccgtatggcataagacttcagtttttaatttttttacctaggtaaacatgaattgggctttaactgcttttgttgccttaactttaaaatttttttaatgttactttgatggttggagtaatactaaagagtaaaatgctgaattacccttgtttgcaaagaagttttactaaatagccctgctgtaactttacactagcaaacaaattctaaactaatggaaccatctctagttataatgaaaaattactagggttcattttagtgttaaaattccaactgtaattaacatttgctttgtttaacaaatgcttaaaaaaaaaaaaggtaaagaaatactttagttagtttaattatgttgtggccaggattt

SEQ ID NO: 28353 - DNA, 2300 bp, Homo sapien
cagtgaaactcacctgcccattttctgcttactcactttgtctttagaaaatttgactgctttttatctccttctgattggcttttcagttgcaaattcagagagtactatatattctgtgttccaggtcacttctaaaaagtgttaaataagaacaggcctagtacttatctatattactttactcagcgtttttcctaatatttgaagatctcattctttttaaaattattactatggattatgccacaagtatacagatatctgtaaaatgcacagaatagagcctgatatactatgttacatcagtttctccaggttccacagatggtcctgtatttcctgtgttcctttcagaattgttaaaatgattattaatttaggagcgggtgtaatgatgttgtattggcagtgtgccagccaatggtgttatacaacacatttttttaattttaaaattttaaaaattgaattcacaatagagatagggatttgccatgttgccttggctggtcttgagcttctgggcccaagaaatccaccagccttaacctcccaaagtgctgggattacaggtatgagacactgcgcctggccaatacagaacatttttaaaagcctggtactgcatgttgccaaacagtccttatggagacagcaaaaaactatgtattctcagtgtgatttgttattttgaatttagatttctgtagatgtttattttttaaatggagagctcgtgttgttagccgtgggcttgtaaaaaataaaaatagataaaaattaaaaatgggaagcttaattttggaattaatctttttaacctttgggtagtcttttagaaagtatatcctaaaaatacatagcataactaaaatatctcataaatccttcagaatgagctatttattagaatgctgtaaaaaattagaaaatcttaattttatgagacaactgataaactcatcattttataaattgttttatttgaatgtgtgataatataaaatagggaaattatgaagtttatattcagaggttaaagatttttccaagatcactagtaaagggcagaattagaccaacttctggactgaaccacatctttgatgcattttttaattatattattttaataagagaactttaaagaaactcttattgtcagtattctcctaaacctgtagctacagcattctataacaattactatttacaataatgacacaaatttctagggtatatataagaaaggatttacctttttcaataaaggctgaaacatagaaggctggagaaaacaaaaggtgaattttcagttaaccaaaattttattgaagctggaagccttaagcaaatttgcatgcacctttgtgtatctcttaagtttcttaagcagtcatatttgtagacacctttttcagagtctccaggtattttttatagtaggaaaaaaatcatttaaattacctctcattacctgtgtcctctcttttagtcctttgctctcactaggctggtttggtcttccaggacaagcaagttcttgcatattcctgttccttgaaaaaccttccagttagtggtcatgtaatagcttttcacttcttcacatctttcttgttaaatccactgcatctataaactgtacatcagtaaaaatgttttattaatattaaaaataattttgtttcatttcttatttgacattcatggctggaatctcttaaatctgtatgaactatagtaagctgctatgaatgcttccagtgctatataattaattccatcatcgcatccttaaaatatgccagcacatggcgcttgcccctccctacctcctcccccctacacacacacacacacacacacacacgcacacacgcacacacgcgtgcgcacagcgtacaccaaactgccattctccagcaggcctgcttctggagttgggagatgtcagcctgctgggagggggtggggggaggaggaagaggtggggctctactctgattaattaccttaggcattcaggggtggggcttccttcagccatctgcctgagatatgggagggagctggagaaagaaggagggggagagactgccagagaggaagagaaaagaaaggaagaaacattagaaagaaaaaggaaggaaaacggtataaagagagatcaattacccacccttaaatagctagattggggggggaggggggtggaaaagaaagctgtggaggtgtgccccagcacggctgctttgaaaggtttatcatctatccgtttggtttatggagaaaaa

SEQ ID NO: 28354 - DNA, 2300 bp, Homo sapien
caggctggtcttgaactctttgacttaggcagtccgcctgcctgagcctcccagtgggctgggattacaggtgtgacccactgtgcccgacccaagtgttaaaacttatgttgaaaaatgaattggggctgggcatgctggctcacacccataatcccagcactttgggaggctgaggcaggtggatcgcctgaactcaggagttgaagaccagcctgggcaacatggcaaagctccatgtctacaaaaaaagttgaaaaaattagccaggagccatgacatgcgcctgtagttccatctacttgggaggttgaagtgggaggatccttgaacctagaaggcagaggttgcagtgagctgagattgtgccatagcactccaacctgggtgacagagtgagaccccgtctcagaaaaaaaaagtgaattggtattgcatgtctttgctaaagagatgtatggaaatatacatgaaggactattttctgaattcatgttttttattgatcaggacacatgaactttaatactataaaagcatccataatattgtagagtgtaaacttgaaagtggaatagattggcatcatcagccaataactcttgagtttattgtggaaaattagtctttttatttctagaatttttgagtaaatatattatttaaaattttaaggaaatacccagtcttttctgatgagggaggggactcaggagtaatttctgagttgaaaatattttcattttttgtttctatttttaaaatcattttgataaatgggaaaaatactgaaagaatgatgttgagctattgatccatgcatggaatttctttctgttaataactgaggctacattattctgaagaaagaccatatcaagaaaagagagagaaacctttcaagtttataatttgattttttgtagtgtgttttgtcttataggtaaaagattctcctttttttttccatcagtattatttcaaattttggtttgactaagttattagtcttcaaattatagcaattaaaaaaattttacagaaagaaatgggtaaaaggcaagataaagtataagagttataattcaaatattacattattttgacatttttctgaagagctgatgatttaagctatacctgggcatggtttcagcagaacctaggtgagatatcttaatcatatatctaaagattaagattctttattgtgtatatcctctagtctttttttttttcaagagacagggtcttgctgtgttgcccaggctagagtacagtggcatgatcataactcactgtaaccttgacctcctgggtttatgtgattctcccacctcagcctccgaagtaggtgggagtataggcacatgctgtgtgccaccatacccagctaatttttttggggcggggctataggcagggtcttaatatgttgaccaggctggtctcaaactccaggcctcaagcaatcctcctgactcagcttcccagagtgctgggattataggcatgagccactgcttccagcctatatcctctagtcttaaatgagagtttatagttatcacattatgttaggtaaagcaaatgtggtcgtattattattattattattattagagacagagttttgctttcgttgcccaggctggagtgcagtggcacagtctcggctcactgcaacctccgcctcccagattcaagcagttctccagcttcagcctcctaggtagctgggattacagtcatgcaccaccatgcctggctaattttttgtatttttaacagagaaggggtttcaccacattggtcaggctggtctcgaacacctgacctcaggtgatccacctgccttggcctcccaaagtgctgagattacaggcgtgagccaccgtgcctggcctagtcatataaatcagagaccatgggaatattaataatttttaaagtacttgtattgaaagtaaaatctgttttggttcctttaaacttttaacaaattataggagcagttaatgctaatttaaatgtgtatgaacgattggaaatttatctctaaattagtaagcgaaaaccagccaccaccccattccaccgcctggaggtactagttttgtcttaatggctacacacacacacacacacacacacacacacacacacacacacacacgtgtgtatatatatgtatatgtatggcatataatggtatgtgtatatataatgtgtggacatatggcatatattggtgtgtatgtcaaccaatacattacgtatatgtgtatacatatacatac

SEQ ID NO: 28355 - DNA, 2300 bp, Homo sapien
ttactgttgtactgttccagccccagccaggttaaacccaggttcaaaggccaaatcacacactggttggaaatgaccttggaaatcatctaacccagcgtttctcaacctccgcactattgacatttggggttggataactctcctggggggaccgtcctgtgcatgataggatgtcaagcaacattcctggcttctacacactagatgccagcagcacctccccactgtaacaatcaaaaatgccttcagtcggccaggcgcggcagctaactcctgtaatctcagcactttgggaggccgaggcaggcggatcacctgaagtcaggagttcgagaccagcctggccaacatggtgaaaccccatctctactaaaaatacaaaaattagttggtggcgcacacctgtagtcccagctactggggaggctgaggcaggagaatcgcttgaacccaggaggcagaggttgcagtcagccgagatcgcgccactgcacttaagcctgggcgacagagcgagactctgtctcaaaaaaaaaaaaaaaaaaaaaaaaaaaaatgccttcagtcactgacaaatgtgggagtggaggtggtggaatggcaaaatttctccttggttgaaagccactgatccaaaccatctcattttacaaatgatggagctgaggtccaaagagatgaagtaacttgtttaagctagttagcaaagccaagattagaatccaggttattcacgcaatatccttttatttctataacgtacagggcacgatatggaactcagaggaagtcactgcagtccttgtcctcacagtctggtaggggagagaatctattgcacagatatctctatctccacgaagttggtaagtcataaagtgctcctcaggcagcaaggtacgaagaaagagaatatgttctcgtgttctgaattccggatctgccacttttttgctgcaggatttaactaaggttcagtttcatcatcaatgaaatggagatcatggtatctacttatatcaccagtttgaaacgggtctgtggatgcattgtgcaaactctaaagctcttacaaacatcgggtattattactaacttcattaggaatgtgagttatattagagtaaaagctctcagaactggggtgaaccatagaggggtggcttcattcctcgaccttccaatttgagacattttttcttctgcgggaggggaagcaggcaaatagcctgcctctcacagagtgcccattccctctccgggaaccaaggtgctcaggcgagtaaactcaggacttaactctgtacaactagtaccgcaagcaggagccactccctggccttcgggtctctcaagccccgcctgctccaggatacggccccgcccagaaaggagacagaccccgccccccccgcgctgccccgcactccagccgcgctgtgcctccaggacaatcccaggcccgtgccggagattcccgagcttccccgatcgcttcccggcctccctcgggcagccagcgaggagactacggagattgccgagggggcctggccccgccccccccgcgggccgccaccgcccccctcgccgtagcctcccgcgcgggctggagttctacatcccggtccctccctccctccctctttctctctccccgccttcccggtgctgccacagtggcgggtcggaggatcccggccagtcagctcgttcctgcctcgcgcccctcctccccccaaaataaacagccctccccacgcctcgggagcccggaccgcccccttcctccctcggccggcgtgctgtgagggagagtgtgagccagcgcggccggtgggcgagctccgggagtgcgagaggcggggcggcgcggcgggccgggccgggtttcgcgtgtgcgtgcgggggcgcgagcgagtgctcatcacgacccgccagtggccccgcgccgacaacccggcgggcgggcgggcggggagcaagcggtcaggcaaggagcggcggccgcgaggcgcggaggggcgcggagtccgctcgcgcgcacgcacgcacgcacgcgggggcgggggcaggcgcgcgcccgcctgtcgcgacagtcggggccgaggcccagggggaggtggcctgtcgcgggtcgcccggctcccggaggcgaggggggcgcgggcggatggcggagggcgcccagccgcatcagccgcctcagctcgggcccggcgccgccgcccggggcatgaagcgggagtcggagctggagctgccggtgcccggagcgggaggagacggagccgatc

SEQ ID NO: 28356 - DNA, 2300 bp, Homo sapien
taaaagttattggtggcatgttgggggatataccccctctctaatgcagcaaatacaacactcattgcaacttctcttagccaagcagcgaaacatagcacaaacatcttgacccaaagcgaaaggaagcattttagcaaaatatgtttcagttccccaagctaaaatcaagcacatattaaaagccatgctgaacgtaaatcatccaggtcacagcactaagatattaccaggaattctgcgctgggatggatcctttaactgaggagattaacagagctggagttctggaccagtaatctcagttcttctgagagtgagcaaacaattgcaggctaactccaaaatgcaagctcaaagcaaagtgtattgaagcacagttagacactctcagagggacagtgggctaatttctgtgaagtgaagtcagcccctctatatagagtttaaggtgcttctgtgcggtttgtggagagaagttgaggttggggctgtgtctgagtaaaggacgatgtcatctgattggcagtttatggttatataactaaaattaggcaatgcatgtttttacccataattttcacagaaaagcccactctggggcttttgtataataaaaccacattttattataatgatggtataatgaacttggggtgacctgagggcacagtttcatgttactgggcatgtgcccctttagggaatttccacctgtgccctagtttctctttcttcaggatgtgctggccacaaactataccaccaacttcatcagttaggggggtcttagaatggctctggggctgaacttaggtgggccaggagctgttgcagtgacaggctttctgctctcttttctcctcccagctgctaatgtctacttaactgcctgttgggagctgaaaaggccaaagggattgtgaccaactcagcatttcactggaggctatatgatcaaacagcaaactgtttatcatgaatgcgggatgtgggtaaactcacactgcacccgccgccagaaggtttcctgagggccatcactccctggtgctgggctccttgaagttatctgttgggatatctagcacctattatttgaaggatgcagtcttgcaagcctgctgtgaaccaaacggctgactgacaattacctgacaatcacccccccacctttttctcgtcatctcttttacctaataaactcagagagcttgaaaagctcagagcccttgttcactagaagcaaggaaccccctgaccccttcttcctaatatactcttttgtctttgtcttttactcccacatccgccccccactttgttcagtcaacctgggactgtggccaattacaacagcctaacaaaagtgccacaggagtggaacatggggcagtgggctctgctgaagaggatgctagggggcttctcaggggaggaaatgctagatttgcattctgatagaggagcgtgacttttccaggtgaaggtagcaggtgctcctggcagaagaacccacataaggaagtgtccagaagccacacaggtatggcgttcgacaagagcaggtctggaacggtggctcatgctgaggcaggaggatcatttgaggccagagtttgaaaccaacctggtaaaaatagtaagatttcaccccttcaaaatcattttttaaaagtagccaggccgagtggctcatgcttgtagtcccagctactcaggaggttcatttgaaccctggaatttgaggctacagtgagctattattgtgccaccgcactccagcctgggtgacagagccagaccccatctcaaaaacaaaacaaaacaaaacaacaaaataaccccaacagcaatacaatcaatatgcaataagcgtccacccggcatgtgtgatggactgtggtaatgctgatggcatggagggagtgaggtgggcatctggggagtgtggtgttattgggggtggggagtaatctggagggtctcatagtctttcagtggtaggtctttcttcctgaagacacagcaaacccccaaccctaagtatgggaggcaggtgggttggccaagaaggacgtctggggctgctcttggatcagcaggagggtgggaccaagggtgctgctggaccaaggatgggactgggccaagggtggggctgggaagcatcctgttttgcatgtttgatcaggagctgctgccaagttgtgactttcactttcccttttgggttccagggtatatctcagagcctggagaacgtgtctggttattatgcagatgcacggctggaggtg

SEQ ID NO: 28357 - DNA, 2300 bp, Homo sapien
ttctagctttgtccattgtattccagttttattatttgtccaaaattcatctaggctggctcgtgaattctttcttggctgcaagtctcaaaagaagcatcattcttgtcttctttctctcatttttctcactcggaatcaccagaaattaaaaccgtgcttccctgaacaccctacagactgaaactagacaacttcatctgacaggaatcagatgaaactcatgaccagagactcatttgcatctccaatgctttctcaaaaagattttgtaaaagggagagataatgtcaaaggaaaataaaatatcagggccccaaactctctatgccaaagaaaaccgttaagcagggaaattgaatcagtcaaaaaactgcccttctttttgtccctaaacaggtatctgccaagacagaaggcaacatattccccaggtggtcttcctcatggatttcccacaagaaaattccttgtgagccccaacatcttttcccttaaaacagagcctgtggaattttaccatgacaatgcaaattagtaacttaccttgacaggtacatgacaaaaccaagactagaaattaccctgctgctcacttcaacacaaatgcatatgtgactgcttcctctaatctatgttcattttattgttgttgttttgttttgttttgagatggagtctccctctctagcccaggctggattgcagtggcatgatcccggctcactgcaacctccacctcctggattcaagcgattctcctgcctcagcctcctgagtagctgaaactacaggcgtgcaccaccatgcccagctactttttgtatttttagtagacccgaggttttgccatgttggccaggttggtcacgacctcctgactccaggtgatccaagtgcctaggcctcccaaagtgctgggattacaggcatgagccaccaagccctgcctgtttatttttatcttctgtaaaatacacatttactgagcatgagatgaatgcataattactgttcttctatccatgccttttacatgcagcacatagattcaggaagtgctaatcaaagcctcacaagaatgtgacaactcttctcactacctgtcctgtctttttttttcatccctcctcctccttcccactctttacctttgaaatattgaagcccttaaaaccctcttttgaaaacttgtgggccacagatccgactgtgacttgtgtctcttttttttttcctgtgggcatcctcaaccatgacaaaataaaccactaaacggattgagatctgtctcagacgcatcttggtttacaaatcttggctcctccccgagttgctggttgaaagccacagcctcatgccttgcctcagtttcctcacctgtaaactcagatcatactcctggcccatttaagagatggttatcaaattccaattaaatagagaagtgggtatatttcaaagtgtatcgtacagttcttgtgtaatcaccctcctgttcctccctgaaaatctggcaggtgtatggggtggtggccacgaggctgcagggacatttgcccaggatgaaacagttcccagtgaaagggtcatgttggtcagggttcagcccctctcaaaacccttctgcctggggtaaagcagaaaagtccgccagcaatccgacagcacgccttcttagccacgggactgtggctgagcagtgggcttaggccccttccctctaagtgttaccaataatcctgcactgggatggattcttaacagaggtggggattaacagagctggagctctggaccagcaatctcagttcctctgatagtgagcgaagaattgcagactaacaccaaaatgcaagctcaaggcaaagtgtattgaagcacagtaatatactctcagagggagagcggaatgatttctgcgaagtgaaataagcccctctttacagggtttaaggtgcttttatggggtttgtggggaggagtcaaggtttgggttgtgtctgagtaacaggatgatgtcatttgattggcagtttatggttatataactaaaattaaactggcatggttttacccatcatttatacagaaaagcccactctggggaaaggagggtacaaccacatgtaaattttattataatgatggtataatgaacttggggtgacctgagggcatgtttttgtgttactgggcatgtgcccctttaggagacttccacctgtgccttactttctctttctttgggatgtgctggccacagactttaccaaaaactccatccattaggatggcat

SEQ ID NO: 28358 - DNA, 2300 bp, Homo sapien
gggaaactgtagggagaccccctgaaactattgctacggaataaaagatgaaatgctcctgattattgtaaatacaaaattgcatgcaggattgtgtaaagacaatgccaggttggactgccagaacgaaccaacagcacgtgatgtgcttccccctgcagagagcctatgaatggatgcaggggggcgcctgtccatatggacaagctagggctataaatgctatcatcttgccgtggctcttctaggcatctttagggttcaggtatactcccttctgagaatttctagtctaaccggttatctagcttcacgtcctgtttccatggattgtcagtaaccagcttttgttgcaattgttactgctgattaatatcttgctaatcataggttatggaaagattgtgtttctgttttaaggctctgttagaaattactgacgcacacactatattgtaaattcttatctctgtatactgtacttctacatacaaatgcactgtacttctacatacgaatgttatgttaaagaattacttcatccccatgtgaccatcccacctcgtaatcaaatgaccctaaatccctcactaacctacccccgccctcactaaactgaataataaatgctggtatatccagtgcattgttgaccagaaggcggtgacccccctggacccagctttcactatcttgtgtgtgtctattatttctcaacctgccgatccgcctaggagcaaagagagagccccgttgcactgggggctgctggccagatcccgcaataggaaacatggctgagacaggggagtgagaaggtcgcattgcagaatggtgcctgtggcatgacgccagctttgtaatcatgagattcaaaagccacctgtggaattgtgagtgtaactacaggagtgagagcttagatctctgtgtttgtagaagcagaatcaaacctggacactgttggattactaaaatcacccgtttttcttcaatagcagagtcacaagggcagatgttggcttcccgtctgctctccaagagctgtgcgactctgggcaagtcacctcccctcccagcctaagattttcccctctcagaaacctgatagagctgccaaaagtccatgaaatcaggggggtaatttctgtgaaatctgagtcgtggtcttatttttctttttctttttttttttttcttttttctgagatggagtctcgctctgttgcccaggctggagtgcagtggcgcaatctctgctcactgcaagctccgcctcccgggttcacaccattctcctgcctcagcctcccgagtagctgggactacaggcgcccgccactacactcggctaatttttgtatttttagtagagatggggtttcaccatgttagccaggatggtctccatctcctgaccttgtgatctgcctgcctcggcctcccaaagtgctgggattacaggcgtgagccaccgctcccggcctgatttttcttcaccaaaaagagatgcccatcaagatagaaagcactatagctgaagcctgtaatcccagtgctgtgggaggcagaggcgggaagatcacttgaggccaggagttcaagacagcctgagaaacacaggagatgctgtctctatgaaatcaaaaattaacaaattagcccagcatggtagcgtgcacctgtagtcccagctactcagaaggttgaaggaggaagatcacttgagcccagcagatctaggcagcaatgagctaggatggcgtcaaagccctgcagcctgggtgacacagcaaaacggtttattaaaaatgaaatgaaaatggtgatttctcaggaggagcacactgtctcaacccctcttttcctgcccaaggaggaggccccgcagcgacatggagggagctgctttgctgaaaatctttgtcgtctgcatctggtgagcttggctcagagccctgaggtgggagggagggctccctgtctgggctgcacaattgggcagggcttgggctgggccaggagccatgtgggtttttctaggaaccaaaatcacttcccggaattgaccaactggtagactcgcctagaggggacgcactgtgtcctagttgaggctaacagtcagtatccagcctcaacattcagcagaggccccagatcagcgtctgagccaggccaacaatgaccaaggaggatgggatcctgggtgcagctcatcacaagcgtcgggtgagtccgaggccccagctctctgccctcctgctcctctgctctctcctggtcctcccagttctact

SEQ ID NO: 28359 - DNA, 2300 bp, Homo sapien
tttttctctcatttttctgacttggcatcaccagaaatcaaaactgtcctttttctaaacccctgcaagcaaacggaaggtggaatactttgtgttacagaattcagaccaaccccgtgactggagattcttttgcttctacactgttttctccaaaagatattgaaaaacaaagagaaaatgtgaaaggaaaatcaaatctcagggccccaaattcactataccagtggaaccagttaagcctggaaacagagtcactccagaacctgcctttgtttttgtttctaaacagatatttgcaaagatggaaggcaacatataccccagttggcctgcctcacaaattcctcacaaagaaaatccttgtaggtccccaaattttcaccctgagacagactttgtataatttcactgtgacaatgcaaactggcaacttatcttgactggtacctaacaatgacaagagtggaagtgacccttctgcccacactcagacaaatgcacatatgcctacttcctctactttctgtttatttttatcttatagaaaatgtagattaactgtgcacaagaagaatgaataatggactgttcctctaaccccctttcacatggaacctatggattcagggagggccgatcaaagcctcacaaaaatgtgaccactcagctcattacctatcctgtcttttttccttccctccttccacgcctgcctgattttacacatttaaatgttgaagccctcaaaaccctctgggaataatgagtgggccccagatcttcctgtgacttgcgtgtctttttcctgggtgcatcctcaaccttggcagagtaaacctctaaactgactgagacgtgtcccagaccctctttggttgacaagtcttggctcctccctgagttgctggatgaaagcaacttcctcgccccttgcctcagtttcctcatttgaaaacttagatcataatcctggcccattgaggggatgattataaaattcaatcaaatggagaagcatttgcaaatggaatgtattgcaaagtgtattgtgcagtccctgtgtaatcacctttctgttcctgtctcaaaagctggtgtgtgtgcgtatgggtggggggaggtggccacgatgcccccagcgatgtttgctcaggatgaaataggcccccatggaagggtcaggttggcttctgaggttcagctgtctttgaggcccttctgcctggggcaaagcacaaaagtccaatagcaatctggttgcatgacttcttagccatagaagtgtggctgagcagtggtctctagtccctccaccctgtgtgcctcgggagtggaacacggggcagtggcctctgcttgggaggatgctgggggatctctgacaggaggcaatgcctgattttgtcactgaacgatgagcatgatttttccaggtggtggaagcaggggatcccggcagaagaccccacataagcaaatatctagaagccacaagccatggccttcaacaagagcaggcctggtgcggtggctcatgccaaggtgggaggatcacttgaggcctggagttcaagagtagcccagtcaatatagtgagacaccatctctaatataacttttttaaaaattagctgggtggttggctgatgcctgtagaaacagctactcaggaggctcaggtgggaggatggcttgagcccaggggtttgaaactgcagtgcactatgactgtggcggtgcacttcagccttggctacagagtgagaccctgtctccagaacaaaaccaaaataaccccaatggccttacaataaatatacaataaggatccacttggcatgtgtaggagactgtgcaaatgctgatggtatgggcaggagtaaggcaggcatcaggggaatgtggaagcacgggaggacggggagtaatctgaagggtcccacagtatgtcagtggcaggtctttcttcctgaagactatagcagacccccaaccccgaggatgccaggcaggtgggttggatgaaagagacctggaggtctggtctcaggctgctcctctaagcgcagcagcaaggagggtggggctggactgcaggaggtgctggggagcagcgtgtttgctgtgcttgattgtgagctgctgggaagttgtgactttcattttacctttcgaattcctgggtatatcttgggggctggaggacgtgtctggttattatataggtgcacagctggaggtgagatccacacagctcagaccagctggatcttgctcagtctctgtcagaggaagat

SEQ ID NO: 28360 - DNA, 2300 bp, Homo sapien
tcaaacaaatcagcaagaaaaaaaaaataatcccatcaaaaagtgggcaaaggacatgaatagacaattctcaaaagaagatatacaaaatgaaatggccaaaaaaatatgaaaatgtgctcaacgtcactaattatcagagaaatgcaaattaaaactgcaataagttgccaccttactcctgcaagaatggccataatttaaaaatcaaagaagaatagaagggtgcagtggctcacacctgtaatcccagcactttgggaggccaaagcaggtggatcacttgaggtcaggagttcaagaccagcctagctaaaatggtgtgaatatggtgacaagggaaaacttttacactggtggtgggaatgtaaactagtacaaccactatggaaaacagtatggcaactccttaaaaaactaaaagtagaataccatttgatccagtaatcccactaccgggtatctacccagaggagaaaagttattatataaaaaagatactcgcacatgcatgtttatagctgcataatttgcaaccgaaaaaatatggaaccaacctaaatgctcatcagccaacaagtggatgaagaaaatgtgtgtgtatatacacacacacacacacacacacacacccctatatatgtatatgccatggaatattactcagctgtaaaaaggaagggaataatggcatccgtaacaatctggatgaagttggacaccattattctgagtgaagtaactcaggaatggaaaaccaaatattgtatgttctcatttattagtaggagctaagctatgaagacacaaagtcacaagaaggatacaatgggctgggcgccgtggctcacacctgtaatcccagcactttgggaggccaaggcaggtggatcacttgaggtcaggagttcaagaccagcctggccaagatggtgaaaccccatctctactaaaattacaaaaaattagctgggtgtagtggcaggcacctgtaatcccagctactcggaagctgagatgggaggatggcttgattgtgccacttgaagtagctatgattgtgccactgctctccagcctgggctacagagcaagactctatatcaaaaacataacagaaaacataacctcagaagcattacaataaatatgcaataagcatccacccagcatgtgtgggggactgtgctgatgctgatggcatgtgtgggagtaaggcaggcatctgaggaatgtgggggaacggaaggacggggagtaatctggagagccccacggtcagtcagtggcaggtctttcttgagctcagaaaggttaggtaactagttcagatcagacagtaaaacaggggcagagcctggaattgcactgaggcttgagtctgacttctctcccccacctgctgtgcccttaaactgcagagatcggggcgggggttggggggcaagcggctcagatgggttcaaaaaactccccaggctcaactctggttctgactgcctgagacatgggcagctgacacagcagaccttgaatcctgaggatgtgaggcaggtgggttggatgagagggacccggatgtctggtctgcggctgctcctctaagtgcagcagcaaggaggctgggcctggactgcaggtggtgctggggagcagcgtgtttactgtgcttggtcatgagctgctgggaagttgtgactttcactttccctttcgaattccagggtatatctgggaggccggaggacgtgtctggttattacacagatgcacagctggacgtgggatccacacagctcagaacagttggatcttgctcagtctctgtcagaggaagatcccttggtaagttggggatagtgtgatctacccccatgtccttattcttgcaatagctctataagggaaggatcattcagcttttgtagataagctcagagaggttaggtagctggttcagatcagacaggaaagcagtggcagagccgggatttgcacccaggcttgagtctgattgctccctccctcctgctgggcgggtaaactgtagagagaggtggggaaaacagcttagatgggttcacaaagctccccgggctcagctctggttctgacaccctcagacacggccagctgaccccagaagaaaggtaggtgttgggggtgcccatctctttgggaaatttgaaggaatcaaagaaggtggaggaggggaggtgacctggagcccggcatgtccttgtggccgggccacacccaggctggccccagggtgctgctgctgaagcccaatgggaaca

SEQ ID NO: 28361 - DNA, 2300 bp, Homo sapien
gtcaggagatcgagaccatcctggctaacacagtgaaaccccatctctactaaaatacaaaaaaaaaaaaaaaaaaaaattagccaggtgtggtggtgggcgcctgtagtcccagctactcgggaggctgaggcaggagaatagcatgaacccaggaggtggagcttgcagcgagccaagatcgcaccactgcactccagcttgggtgacagagagagactccatctcaaaaaaaaaaaaaaaaaaaaaaaaaaaaggtacataatggcagaatggtaccggtataaaaataggcacatagatcaagggaacagaatagagaacccagaaataaagccaaatactttcagctaactagtctttgacaaagcaaagaaaaacgtatagtgcggaaaggacaccctattcaacaaatggtgccaggataattggcaagccacatgtagaagaatgaaacagtatcctcatacaaaaatcaactcaagatggatcaaagacttaaatctaaaacctgaaaccataaaaattctagaagataacatcggaaaaactcctccagacattggcttaggcaaagaattcaggaccaagaacccaaaaataaatgcaacgaaaacaaaaataaagagatgggacctaattaaagtaaaaagcttctgcacagcaaaataaataatcagcagagaaaacagacaaccctcaaagtgggagaaaatatttgcaaactgtgcatttgacaaaggactaatatccagtttctacaaggaactcaaacaaatcagcaagaaaaaaaaaataatcccatcaaaaagtgggcaaaggacatgaatagacaattctcaaaagaagatatacaaaatgaaatggccaaaaaaatatgaaaatgtgctcaacgtcactaattatcagagaaatgcaaattaaaactgcaataagttgccaccttactcctgcaagaatggccataatttaaaaatcaaagaagaatagaagggtgcagtggctcacacctgtaatcccagcactttgggaggccaaagcaggtggatcacttgaggtcaggagttcaagaccagcctagctaaaatggtgtgaatatggtgacaagggaaaacttttacactggtggtgggaatgtaaactagtacaaccactatggaaaacagtatggcaactccttaaaaaactaaaagtagaataccatttgatccagtaatcccactaccgggtatctacccagaggagaaaagttattatataaaaaagatactcgcacatgcatgtttatagctgcataatttgcaaccgaaaaaatatggaaccaacctaaatgctcatcagccaacaagtggatgaagaaaatgtgtgtgtatatacacacacacacacacacacacacacccctatatatgtatatgccatggaatattactcagctgtaaaaaggaagggaataatggcatccgtaacaatctggatgaagttggacaccattattctgagtgaagtaactcaggaatggaaaaccaaatattgtatgttctcatttattagtaggagctaagctatgaagacacaaagtcacaagaaggatacaatgggctgggcgccgtggctcacacctgtaatcccagcactttgggaggccaaggcaggtggatcacttgaggtcaggagttcaagaccagcctggccaagatggtgaaaccccatctctactaaaattacaaaaaattagctgggtgtagtggcaggcacctgtaatcccagctactcggaagctgagatgggaggatggcttgattgtgccacttgaagtagctatgattgtgccactgctctccagcctgggctacagagcaagactctatatcaaaaacataacagaaaacataacctcagaagcattacaataaatatgcaataagcatccacccagcatgtgtgggggactgtgctgatgctgatggcatgtgtgggagtaaggcaggcatctgaggaatgtgggggaacggaaggacggggagtaatctggagagccccacggtcagtcagtggcaggtctttcttgagctcagaaaggttaggtaactagttcagatcagacagtaaaacaggggcagagcctggaattgcactgaggcttgagtctgacttctctcccccacctgctgtgcccttaaactgcagagatcggggcgggggttggggggcaagcggctcagatgggttcaaaaaactccccaggctcaactctggttctgactgcctgagacatgggcagctgacacagcagacct

SEQ ID NO: 28362 - DNA, 2300 bp, Homo sapien
gcaggagaatcacttgaacccgggaggtggaggttgcagtgagccgagatcacaacactgcactccagcctggcaacagagcaagaatctgtcaaaaaaaaaaaaaaaaaaaaagttgttgaagaacaaggagaaaacgtgaaaggaaaatcaaatcttgggaccccaaaactcactggaaacagttaagcttagaaacggagtcactccaaaacctgcctttgtttttgcttctaagcagatatttgcgaagacaaaaggcaacatgttccccaggtagcctccttcacaaattgctcacaaggaaactccttgtgggtcccagcagtttttaccctgaggcagactttgtgtaatttcattgtgacaatgcaaattagcaacttatctttactggtacatgataaataacaagacttctgcccaccctcagaaaaatgcacatatgcctgcttcctctactctatgttcatttttatcttatataaaatgtagacgaactgtgcatgagacgaatgaataattgactgttcctctaccccctcctttcatagacaacctgtggattcaaggagggctaatcaaagcttcacaagaatgtgaccactcacctcattacctatcctgtcttttttcctttcctccttccactcctgcctgattttacacatttaaatactggaggcctcaaaaccctctgtgaaaaacgagtggaccccagaacctcctgtgacttgtgtgactttttcctgggtgcatcctcaaccttggcagagtaaacatctaaactgactgagacgtgtcccagaccctctttggtttacaagtcttgcctcctccctgagttgctggatgaaagcaacgtcctctcttcttgcctcagtttcctcatctgcaaaatcagatcataatcctggcccattgaggggatgattataaaactcaatcaaatggagaagcatttgcaaatggaatgtattgcaaagtgtattgtgcagtccctgtgtaatcaccattctcttcctgcctcataagctggtgtgtgtgtgtgtatgggtggggtgaggtggacacgatgcccccagagatgtttgctcaggatgaaataggcccccatggaagggtcaggttggcttctgtggtttagctgcctttgaggcccttctgcctggggcaaagcacaaaagtccaatagcaatctggttgcatgacttcctagtcatggaagtgtggctgagcagtggtctctagtccctccaccctgtgtgcctcgggagtggaacacggggcagtggcctctgctggggaggatgctgggggatctctgaaaggaggcaatgcctgattttgtcactgaacgatgagcatgatttttccaggcggtggaagcaggtgctcccggcagaagaccccatataagcaaatatctagaagccacaaggcatggccttcaacaagagcaggcctggtgcggtggctcatgccaaggtgggaggatcacttgaggcctggagttcaagagtagcccagtcaatatagtgaggcaccatctctaatataatttttttaaaaattagctgggtggttggctgatacctgtagaaccagctactcaggaggctgaggtggggggatggcttaagcccaggggtttgaagctgctgtgcgcgatgactgtggcactgcaattcagtcttggtgacagactgagaccctgtctcaaaaacataaccaaaataaccccaacggcattacaataaatatacaataagcatccacaaggcatgtgtgggagactgtgcttatgccgatggcacgggcaggagtaaggcaggcatcaggggaatgtggatgcacgggaggatggggagtaatctgcagggtcccatagtatgtcagtggcaggtctttctccttgagaccacagcagacccccagccctgaggatgcgaggcaggtgggttggatgagagggatctggatgtctggtctcaggctgctcctctaagggcagcagcaaggagggtggggctggactgaaggtggaggggagcgtgtttgctgtgcttggtcatgagctgctgggaagttgtgactttcactttccctttcgaattcctcggtatatcttggggactggaggacctgtctggttattatacagacgcataactggaggtgggatccacacagctcagaacagctggatcttgctcagtctctgccaggggaagattccttggtaagttggggacagttgacctgcctccatcttattctcacagcttttgtagataagc

SEQ ID NO: 28363 - DNA, 2300 bp, Homo sapien
cagctctgatacgccatatcatgtaacaagaataaccttagtttaacaaatttttttttgtttgtttgtttgagacggagtctcgctctgtcgctcaggctggagtgcagtggcatgatctcggcttgctgcaagctccgcctcccgggttcacgccattctcctgcctcagcctccccagcagctgggactacaggcgcacgccgccacgcccggctaatttttgtatttttagtagagacggggtttcaccatgttagccaggatggtctcaatctcctgaccttgtgatccacccgcctcggcctcccaaagtgctgggattacaagcatgagccactgcgcccggccaaaaaaaaaatgttaagtgtaaaaaaaaaacccacaaaaactttaaaacttcattgtggtcaaggttgtgggcatagatgctctgattgctggtggcatttttttactggtgtggtcgggctgcacacagccagtcactctctttgatttggggaatctcaatttcggatttatctgcaaaaggaaaaaaaggctatttgacaaaggtctttagtgttaaaagaagtaacaggagaataacaaaaggaaaggtgtttcctgcctgtggtggggatggaccggcaggctgggcactggttttgagtggcaggtgcgcattaggggtggcaccatgggcactggcttccggcccacaggaggggacagaaagtagaaaatgaagctcagcttgggctcacgtccacggtgacgaacactgtcaaagtgtgcattacggggtgggatacacagatgattgtctttagttgcctttttgccctgtcaccacggttagttggttaaatacagcattgagtggagcaccagccatgagccctgttggcgaggtgacccatgagggttggggtggagggccaaggagctgggtggggtgccaagcctctgtccccaccccaggcccagatgaaggactgcatgcgcgagctggatgacacccgcgcctctcgtgaggagatcctggcccaggccaaagagaacgagaagaagctgaagagcatggaggccgagatgatccagttgcaggaggtgggtggggctgcaatggagagcggcaccgctgccctgcggccagcaggtggcagcgtggggctttcagctgaggacagggctggagtcctactgggctccaggaattggctggggatggctctcaggttacataaggattccctccagggttccgtttcatagcggggctccctcgtatgatcagagtgtgtgtgtgtgtgaaactggcatccctcacatgagatgaggctttgtggccaccaccacctcctgctgtgaatgctgcctggtgagaaggggtctgagcgtcccctcggccgccctgcccgtcgcacctgagcccgtcctgaagtgtttcccaggtctggagggtgccctgcagcgtgatgtgccggctgcgagtgcgtccagggtgtagccatctgcctgtggcctccagagctgactccaagctctggcttacccagaacagggaggggccgccctgagtgactctgtccacgtggtctccctggttaggccaggacacttcttacttatcgccataccctggcacctggcttgattcctagcacttaaatgtaagagttttataaacatatggtgtttaagctatatcttcaggggggcaccagccctgtgagctagagggtttctggaggaagggcttcgtggggaggtgggcctggggaagggcttgaggggagggtgcctggggctgggaaggatggtcttgtggggctgtggctgcctttaggtcacactctgggtctttgtggcaggaactggcagccgcggagcgtgccaagcgccaggcccagcaggagcgggatgagctggctgacgagatcgccaacagcagcggcaaagggtgagctgagtgagggggcagagttgggggggaccaggtgtgtccccagggtaggcccctcacttctcccgcccaccccgcagagccctggcgttagaggagaagcggcgtctggaggcccgcatcgcccagctggaggaggagctggaggaggagcagggcaacacggagctgatcaacgaccggctgaagaaggccaacctgcaggtgggtgccaggacttctcccactctgggctctggctggagccaccacggcagagctggccttggacccagccggcagaagcacaggccaagtgccagctgctccccaggcgcttaggggaaaatgtccaggcacctggacctga

SEQ ID NO: 28364 - DNA, 2300 bp, Homo sapien
ttgccttctgctagcattggacttgctgcagctcttgagctcccacattgactgacgaaggacgtctctaggctattttccttcttcttcggctgggtgtggtggcttacacctgtaatcccagcactttgggaggccgaggcaggtggatcacctgaggtcaggagtttgagaccagtctggtcaacatggcgaaaccctgtctctactaaaaaaacaaaaaaattagccaggcattgtggcgcacgcctgtagtcccaactactcaggaggctgaggcatgagaattgcttgaacctgggcggcggaggttgcagtgagctgagatcgtgtcattggactccagcctgggcaacagagcgagacttggtctcaattaaaaaaaaaaaaaagaaaagaaagttccttctttttgtatatagctgacctgcaaagcaaatactaataggtttcttgctcttggagcagggaggaagttagtaacagaagttgtccatgttatgacaagctggttcactagtaaaagaaaaatatccagaggaacctttggttcttgccctgggtcatgtgtcacccgtggagcctcggggtctgcaggctgttaaaatctgctcctgtcttttggagtgaagtcttagtgcatgctgcccccctggctttgagggaaacagatttgttctctgccacttacatcttaaaaggcacagccggaaagttccttttgtgctttttctttaaacaagaactagacaaagatttccttcctgagctggctgtgccttatgacatactagcatttattctgccaaacggggcagttggtggctctgtctggggacttgtaggagaggagctctttgacccttcctggggacctccatctgcctttatctgttcagtgtactggtttgcctgtacagtcctgatttatgcctgttgttccacagttattattaatagcactctctttcactttcagaagcatcccagtttggaggataaattatatgtcactcacctattgtcagactaagccagggattctcactcttggcactagtgatatttgaggctggatgattctctgttgggggtgggggatcttcctgagcactgtaggatttttagcagcatcgtggcctctattcacttggtgccagctacaccttccctctccagttgtgacaaccaaaaatattctcagacattgccatcaagtttccgtggggggcaagattattcccagttaagaactactggactaagcattgcagattagttttactttgagtgtcatctccgatcgatcagtagtggctgcctggagccctgtgctggcaaggatttgagactcgatgcaggaattctgagatggattagtgctgtctgccgtgggcacgggtggggcatcacagcatgtagtgccttggattaggccgtggaggtaggtgacagaaggtgccagaatgccaggaggttttgacattatcctgttactggatgccctggcggtccaggtggagagacgaggcatgtttatagacagagatttgtggccctagctacaaaacaagacatttggtgcctacacctgcgccagcacgactgagccaatgtcaggtgtcctgggagttttgtcaggtgtggcgaggtcggatcttgcagaaaggcggtggtgtgtgtcagtcagtaagtagttacagggcatcccagacgtgcccagcgtggccttgggtgacatggtcggttcaccctcctgcccctggctttcccatgttgttaattcgttgtcatggccgttcctgggtcttcctgccttggggattggactgttgctcggaactctgtgatggcaccaaaggctttgaactggccaaggccaggagagtgagagagcgtaaacgttgtgttgctggcccttgccaggcagcgggggatgggtgggactgtgtcccggggcaggcacaatggtctgctgtaaagttcaggtggaagcagctgtggtctgcaaaaggtctgcctcgcctaggaaatggtgcttctggatcccgggccagaccctctggggtctcccctatggggaaaggtgtgtatgtctctacaggagaactcactggttgaggaatttgacatgagcccagttatctccccagtgagtagaaaaagccccttctatgtgaattaggtagaatgccaggtttggttcactttcagtgactttatggtattaatattttaatgagttcccagcattttgggggaagcagatctgctttcattctaggcctaaacttgtctga

SEQ ID NO: 28365 - DNA, 2300 bp, Homo sapien
ctgcttaaccctccggagggtgacgaaggaagagatcctgcctcaagtctttgttcatgttgccttggtagaaaaggaggccgcactagtgccccattacctttgagcttgtgaccaggggactcctaaaagtccatggaccgcactgcagagtctctgcgagccccctaacgtggtatgcaaggcgttcaccacctctcacaagttctcaaaggggtccttgaccactgacctagacaaatagaagctttgggttttccatttgtagagtgtgcacacgtgagtgtcgcataacggatgcagcctgggggccgttaggatcaggatgggggtttgttctagtctaagttgtgccaccccaggggtgatcactttcctggggctcatcactgtagctccagcacagtggccttcccctccctgatgatccttcttgtatttaagcctttagaacaccgtcacttctgggtatctcttcagtgtggggctgggcctggagatgggaggggtgatgtttctgatgccagacttgatctcttgttaccttggatgctgaggaaggtgggctcctctttcgttcttgtgctcttgcccctgcacatcggcagggatgttcccgggaaaccctgtacctaggcaagtcacttagcctccctgagcctctgaggctctctccttttttagggggaggggccgcgtgacccttcactttgccaaggctggcgggatcagatgatgtaaacaccacgagatgaatgtgtcaggtgattgggttgctacagctgagtctcacttgcctggagtgggacactccccccgaccccccacctctcactgagtttccctttggctttggacttgagtttctgcttggcctggctatgtgatcttaggcagatcgttcctctccttcctagcgtagataagtcacggtggtgtttttcaagaactttcaagtgagattcatcggtgggtcgtgaagtgagtggcaaccagtttgtttgtttatttatttatttatttttgagatggagtctcgctctgtcacccaggctggagtgcagtggcaggatcttggctcactgcaaattctgcctcccaggttcaagtgattcttttgcctcagcctcccgaatagctgggattgcaggtgcccaccaccgtgcctggctaatttttgtatttttagtagaaacggggttttgccatgttggccaggctgtcttgaactcctgacctcaggtgatctgtccgcctcagcctcccaaagcgcctggattataggcgtgagccaccatgcctggcgggcaaccagtgtgtttagaaatgaaataaaatagacttgaatggaaaagaatcagagtgaatagcatgtgtatgtcacattgtgacagttttgttagacatgtttgtatttatgacaaaaagtttttaaattaaaatttaaaaaaaggccgggtgcggtggctcatgcctgtaatcccagcactttggaaggctgaggtgggcaaatcacttgaggtcaggggtttgagactagcctggtcaacatggtgaaactccgtctctgctaaaaatacaaaatttagctgggtacggtggtgcatgcctgtaatgccagctacttgggaggctgaggcaggagaattgcttgaacccaggaggttgcagcgagccaagattgtgccactgcactccagcctgggcgacggtgagactctgtctcaaaaaaaaataaaataaaaaaataaaaattacagcttaagataaatgttggggccccaaggatgagatgccctggcgcctctggcagccctgacttagggtggttcctgcctccaggcccgagctgagctgcatgttcagccagggctgtaaagggagccccttgccagatcagactcctttactaaagggcttaacaaaattctgggaaatgagctaccttcctggggtggaataaatcatgtcgagttgggttaggcaggatgtgacttcaaaccctcgaagtgggctgtgtgagggcagcgtctgtgactgactcattatgagctcagtggtgacacaggctgtcttgagaggaggcaaagatcatgggggaggggctggtgttcggggctgccccgagcccagctctgggagcttattttgtcatcacagtggcactgtgagttagacgatactccgatccaatgcagaagtaggggctggtgggggtgggggtgggggctgtcagctagacccactggggctccttgtagctgtccatgggggtagctgggatcagctccattttacag

SEQ ID NO: 28366 - DNA, 2300 bp, Homo sapien
cagcgcgtctcgcccccgcccgcccgccgccgcctgcccggggcgggaccgcggtggggctcgctcacctgaacctggatctgccccgggaacaggcgctgcttctcccgagaggactttctcgagcgctcgggcggcggccgggtggggcgagcgcacgaggcgggagctgcagcaggtcagccttgcttagccttccgtgccctgcccaggaaccgcggtgatctgcgcgcctcaccgcacccagctcggctcctcgccgccttcccgccccgccctcggagccgcgggaccattcccagccgggagccggctccggggcggagcctggggcacaatcccgcccccttcctgctacacccactgcaggccgcgcctggccttgatgggcagacgtattggcctgtggaaagggggtgggcggagcctctgcggccagatgggtggggattcaacatcctctttccgccccacctccacccgctccaccttcccccgcgcttcctaggcgggagccccgccctctagggcgggtccaacggacagccaggttctaggacaaggattgacacagggggaatccaatcaggaggcggcgactcggggcgcggagagctccgggccggggttttggtgccttgcctgggccggggcgaggccctgcgggagccgactgggaaggtctggaactctgacaccccgccccgcgagctgtgctctcagtctcatgtcatcccaccacaaggacagatattaagtaccatatatgggaaaaatgctattttacataattatgatccctgtgggggcgggcatggactcagccctggattccattgtgagcgtcttgagttcgattcctgaccctgcctctttaggatccgcacgttgctgcctttcagcctccaaaccttcgctctggccgttctctccacctggaatacccttccgagcctctcttcacctccatgtcattaactcgcatacatcctttcaggtacttgttacaaattgcactttttttttgttactgtccactacaagaggataaaaaatgttttcatttttaaatgaaaaatcttttgatccatttggaatttatttttggggtaaggaagaaacctaagataatttttgtaatagccacttgtccaaacactgttttctccactgattttagttggcaccttcatcgcctatagaactattatacttgaagctgtttctgacttgtatacattgatctctctgtgtgcacctgtgccaatcccaccatgctttaatgaagatacctttataatacattctatatctatgagggcaaatttctcatcattactctttcttactggaatgtgcttgctatcatgactattcttccaaattaacttcagaaaaaagctatgttctaaaggcaaaagaaagctgggaaaaaaagattttgcaactctgtgacaaattactatcagcaatatataaagatctcttcccagttgataagaaaaacctcggccgggcgcgtggctcatgcctgtaatcccaacattttgggaggccgaggcgggcggatcacctgaggttgggagttcaagggcagcctgaccaacgtggagaaaccccgtctctactaaaaatacaaaataattagccgggcatggtggcccatgcttgtaatcccagttactcaggaggctgaggcaggagaatcgcttgaacccgggaggcggaggttgcagtgagcagagatcgtaccactgcactctagcctgggcaacaagagcataactccgcctcaaaaaaaaaaaaaacaaagaaaaagaaaaagaaaaacctcaaagactccaaaataaaaatggccaaaaacaggaacaggtgattttaaagaagaattataaatggccaataattatttttaaaaagccataagaaatgcaaacaaaacaacataaaatgccattttcacctaattaaaaaaaaaatgctcaatattggtcaggtttatagatacagatgagaaagtaaattgatcaattctatctgagaattcatcttaaaagacattagaaaagtacacagatatgaactttaaagttctttgcagccgggcgcggtggctcacgcctgtaatcccagcactttgggaggccgaggcgggcggatcacgaggtcaggagatcgagaccatcccggctaaaacggtgaaaccccgtctctactaaaactacaaaaaatagccgggcgtagtggcgggcgcctgtagtcccagctacttgggaggctgaggcaggagaatggcgtga

SEQ ID NO: 28367 - DNA, 2300 bp, Homo sapien
cggctcactgtaagctccgcctctcgggttcacgccattctcctgcctcagcctcccaagtagctgggactacaggcgcccgccactacgcccggctattttttgtagttttagtagagacggggtttcaccgttttagccgggatggtctcgatctcctgacctcgtgatccgcccgcctcggcctcccaaagtgctgggattacaggcgtgagccaccgcgcccggctgcaaagaactttaaagttcatatctgtgtacttttctaatgtcttttaagatgaattctcagatagaattgatcaatttactttctcatctgtatctataaacctgaccaatattgagcattttttttttaattaggtgaaaatggcattttatgttgttttgtttgcatttcttatggctttttaaaaataattattggccatttataattcttctttaaaatcacctgttcctgtttttggccatttttattttggagtctttgaggtttttctttttctttttctttgttttttttttttttgaggcggagttatgctcttgttgcccaggctagagtgcagtggtacgatctctgctcactgcaacctccgcctcccgggttcaagcgattctcctgcctcagcctcctgagtaactgggattacaagcatgggccaccatgcccggctaattattttgtatttttagtagagacggggtttctccacgttggtcaggctgcccttgaactcccaacctcaggtgatccgcccgcctcggcctcccaaaatgttgggattacaggcatgagccacgcgcccggccgaggtttttcttatcaactgggaagagatctttatatattgctgatagtaatttgtcacagagttgcaaaatctttttttcccagctttcttttgcctttagaacatagcttttttctgaagttaatttggaagaatagtcatgatagcaagcacattccagtaagaaagagtaatgatgagaaatttgccctcatagatatagaatgtattataaaggtatcttcattaaagcatggtgggattggcacaggtgcacacagagagatcaatgtatacaagtcagaaacagcttcaagtataatagttctataggcgatgaaggtgccaactaaaatcagtggagaaaacagtgtttggacaagtggctattacaaaaattatcttaggtttcttccttaccccaaaaataaattccaaatggatcaaaagatttttcatttaaaaatgaaaacattttttatcctcttgtagtggacagtaacaaaaaaaaagtgcaatttgtaacaagtacctgaaaggatgtatgcgagttaatgacatggaggtgaagagaggctcggaagggtattccaggtggagagaacggccagagcgaaggtttggaggctgaaaggcagcaacgtgcggatcctaaagaggcagggtcaggaatcgaactcaagacgctcacaatggaatccagggctgagtccatgcccgcccccacagggatcataattatgtaaaatagcatttttcccatatatggtacttaatatctgtccttgtggtgggatgacatgagactgagagcacagctcgcggggcggggtgtcagagttccagaccttcccagtcggctcccgcagggcctcgccccggcccaggcaaggcaccaaaaccccggcccggagctctccgcgccccgagtcgccgcctcctgattggattccccctgtgtcaatccttgtcctagaacctggctgtccgttggacccgccctagagggcggggctcccgcctaggaagcgcgggggaaggtggagcgggtggaggtggggcggaaagaggatgttgaatccccacccatctggccgcagaggctccgcccaccccctttccacaggccaatacgtctgcccatcaaggccaggcgcggcctgcagtgggtgtagcaggaagggggcgggattgtgccccaggctccgccccggagccggctcccggctgggaatggtcccgcggctccgagggcggggcgggaaggcggcgaggagccgagctgggtgcggtgaggcgcgcagatcaccgcggttcctgggcagggcacggaaggctaagcaaggctgacctgctgcagctcccgcctcgtgcgctcgccccacccggccgccgcccgagcgctcgagaaagtcctctcgggagaagcagcgcctgttcccggggcagatccaggttcaggtgagcgagccccaccgcggtcccgccccgggcaggcgg

SEQ ID NO: 28368 - DNA, 2300 bp, Homo sapien
gaggccgatcagggtgaagtgactatggcataaggacaaacaggactggtccgcctgtgaaattcagaatgtgaattaggcaggaaaattggctctctagaaaatactgtggaagtgctgaataggattgataggtggctgtggaaaagaaagtgctagagacacagaaaaccgatacaaaaatgggcagggcggccaggcgcggtggctcacgcctgttatcccagcactttgggaagccgaggcgagcgataacttaaggtcaggagttcgagaccagcctggccaacatggtgaaatataaaatttctgtaccaaaaatataaaaaattagccaggtgtggtggtgctcgcctgtaatcccaagtacttggggggctgaggcaggagaatcccttgaaccctggaggtggaggttgcggtgagccaagatcatgccactgcactccagcctagctacagagcaagactccgtctcaaaaaaaaaaaaaaaaaggctgggtgcagtggctcacgcctgtaattccagcactttgggaggcccaggtgggcagatcatgaggtcaatagatcgagaccatcctagccaacatggtgaaactccgtctctactaaaaatataaaaattagctaggcgtggtgaggcacgcctgtagtcccagctactggggaggcagagggagaagaatcccttgaacccaggaggcagaggttgcagtgagccgagatcgcgccactgcactccagcctgggcaacaagagcgagactctgtctcaaaaaaaaaaaaaaaaaaaaaaaaaactttgatcaacaatttggaaactgcctgttcttttaaaaacgctctttcagctgctgctaatccgagtgtatattcaggacaacttgaatctctgctccgagttgcagtcttcgaacttgacccaaaaaaactccctgcttaaattaggctcgcctcagttttcatttgttttcctttaggcggacacagacgagggccacttaaaggatggcccctaaactcccggttgagttcttttacatataaagggcatcatgcctttgaggagcttagctttacatattaaatggagaaacagaacctgtcaacatctgtaggaagtggacagcgccagttataaacaggaggccaggcaaggtggctcacgcctgtaatcccagcactttgggaggctgaagcgggcggatcacttgagctcaggagttccagaccagcctggccaacatggcgaaactccgtctctactaaaaatacaaaaatcagcccggcgtggtggcgcgcgcctgtaatcccagctacctgggaggctgaggcaggaaaatcacttgaacccgggatttggatgttgcagtgagcggagatcacgccactgcactgtagcctgggagacagagcgagactctgtcattaataaataaatatatgtaaataaaataaagcaacaagagtttgcaaaatccaaaaccacggggacttctcaactgccttttctcccttaagtaccctccattgctacccctgctccatcacctcctcttccggtccctcctctagggcccgcccaccccttccgtttccgccccgccccgcccccgccttcgcccagaccagggcccgcccgcctcttccaatccgttccccgacggcctgcccattgcttccggtccgtagctgaggccccgccccttcaactgtgcctcagcccgccattcccattggcggaaaatcccagacgcccctcaaattggagagggacagatgggcgctgtggctcacgcccgtaatcacaaccctctgagaagccgaggcgggcggatcacgaggtcaaaagatcgagaccgtcctggccaacgtggtgaaaccccgtctctactaaaaataaaaaaattagctgggcgtggtggcgcgcgcctctagtcgggaggctgaggcaggagaatcgcttgaacccggaaggcggaggttgcagtgagccgagatcgcgccactgcaccccagcctggcaacagagcgagactctggctcaaaaaaaaaaaaaaaaaaaaaaaaaattggagagggacgctcttccgcctgcctgtacccggaagtgacgttatgtacgtccccccccgaggaagtgacgacaggcgtgcccttgacaggcagggagggctaggctgtgcatccctccgctcgcattgcagggaggtaggagccctgtgggggtggctcgaggtggtgtcgcggctgaggcatgccgcgagcgcgttcctgcgcaggctggcggccgggcgg

SEQ ID NO: 28369 - DNA, 2300 bp, Homo sapien
aatactaaaatatcttttaaaaacataattctatttattgcactaaaataatccccaaccaaaaattgatacttgtgattttaggagtaaatgggaaataaaaaggaagtgagagagatgaattcacgcatgttgggtgacttcagtgggctgagcactgaacacacgaccctggcagggccgccagcaccccgaaaggtgggtgtgaaatctccattttcctcaagagtgtaaaactctgaggctcagagttttggtgattttctcaccattatgggaattaaactccaaggcccaggagctttcctgaaagacactttctacaaaggtcttctcttctttcatagaaagcaaactggtgccctttctgtggagaggagtctaaaatgttagatgtggccaggcacggtgggtcacacctgtcatcccagcactttggtagactgaggtgggtggatcacctgagggcaggagttcgagaccagcctggccagtatggtgaaatcccacctctacttaaaatacaaaattagccgggcatggtggcgggcgcctgtaatcccaactactcgggatgctgaggcaagagaatcacttgaaccttggaggtggaggttgcagtgagccaagcccacaccattgcactccagcctgggcaaaaagagtgaaactctgtctcaaaaataaataaataaataaaaattagatgttcctgctcctgtggttaaccttctgagaaggacagggtgttggttgaaattcactcagtgaggcatacagtattcagttaggtggttaggtgagtctatttgaaagaatggagtcataatcttacagctgagctttaaaaaattagtattattattttttttgagacagcgtctcttcctgtttcccatgctggagtacaatggcgccatctcggctcactgcagcctcgacttcccagactcaagccatcctcccacctcagccttctgagtggctgggacttcaggcgtgcaccaccacacccagctaattttgttgtttttatttttgtgtggtagagacaagttttcgccatgttgcccaggctggtctcaaactcccaagctcaagcgatccacccacctcagcctcccaaagtgttgggattacaggcatgagccaccatgcctagcctgagcatcaaaaatgtgaaaatgtagggaattacggggagtaatctttatattctgccactcaaagacattcaatatttatatttcttttttctttttaaagacagtaaggcaggctgggcgtagtggctcatgcctataatcccagcattttgggaggctgaggctggcagatcagcttaggtcagaagttcgagaccagcctgaccaacatggtgaaaccccatctctactaaaaatacaaaaattagccaggcttgtaatccctactacttgggaggctgaggcaggagaatcacttcaatccaggaagcagaggttgcagtgagccaagatcgtgccactgcgctccagcctgggcatcagagtgagactctgtctcaaaaatcataatacaaatgaagacggtaaggtggactttattccaggttagaggactacaataataagtgtagggaccactgcagaggggtcttacagtacgggcaaaggattggactcaattctgggagtcggttcctcctggaacccaggaggcggaggtcgcggtgagccgagatcgcaccactgcactccagcctgggcaacagagcgagaccctgtctcaaaaaaataaaataaaaaatatttaaaaaaagaacttagagacagatggatttaggctgtgaaagagagggcgaaatcaaagatttctgtaggcgcgtctctgatggaaacagagctgtgaagggggggaggtttctggggaaggctccgtgttggacttgacgttccttgtgtgaggtggggccggtgggactcccacgtgcagatggcctgaagcaggggcagatggactctggcctggagaccaactccagctgtgctcactcctttgcctgttgtcttggccgcttttacactaggggcagaattgagcagcatcactgagtcgtgtatgacccacaaagcagagaatatggattgtctggccctttccagaaaatacctgctggccctgctctaaaggcagctgccatctcctcccctcatgtgttcaccacctaggcgtttgcgctgggccatggagaccagtgtgtatggcgttctcaggggtcaatgaggcctgggcatccctcccagtgaccagagataaaa

SEQ ID NO: 28370 - DNA, 2300 bp, Homo sapien
cagcgcgctggacgcgactacgcagtgttcgagcgggccccgcggcccggcagcttcttcacacgctacccgcggcaccgcaagctcatcagcatcaacaagcggtacacgggcaaggctaacgccgagttcaacctccgccacgactggaactctctgctcagccacgacccccggctgctcttcagacactactcgcgtgcctacttccccgacgcccgcgacatggtgcgctacctgggtgacttcgcggacacgctggggctccgtgtccagtacaacaccaccatcgcccacgtcactctggacaaggaccgacaggcctggaatggccactacttcatcctaactgaccagaagggccaggtgcatcagtgcaggtaaggccggtgccagagctcacctgcggaagctgggaccttccccacacgaaccacacaccttgattggccagtaggtatgggaggaatggacgaaaaagggtatttcgcttttttttttttttaagacggagtctcactctgtcgcccaggctggagtgcaatggcacgaggtcagctcactgcaacctccgcctctctagttcaagcgattctcctgcctcagcctccccagtagctgggattacaggcaagcaccaccacacccggctaatttttttatatttttggtggagatgagatttcacgacgttggccaggctggtctcgaactcctgacctcaggagatccacccacctcagcctccccaaatgctgggattacaggtatgagccaccgcacccggccttcaattctatttttgaaaccactctgtgatcaaagcattcttctgcaagccggcaggatccaagtccccagctgccctcccctggatggcgatcctcaccaatggaaggagcaggactttggaatcaagcctatctgtgtttagactctggctctgctgcttttaggagctctcaagccatgggcctgcagggcctgtgcctcctcacctgtaaagcaggccacataccacctccaggttgcttggaggagtcagaaagatggtgcacagatacacttagtacagggcctggtacagaattactgctcagtggatagatgtatctgtcagaggactcagaaaggggaaagtagaatgtcaggtttcatttcatcaccagcagtcatacctggtctgactgctatgtgcaaagttaggtgaattctccatttctcatactgtcatcttctcctctctcacagggcaaatttaacccccagtacagtgctagggaaaatactgtgagctcagggagaggcaagggcagagcctctcaagtgcactgggatgagggcgtaaacagatgaatgaatgaaaaatgaatgaatgaatgtcctattttcttttaggggccggcggttggagccaggcaggtgggtgggtgggtccagggagtggttttcacttagtggtcttatagctaagagactaagccatctttcctctgtccccgcctgcagcgtcctctttgtagccactggtttatcagtccccaaccaggttgacttccctggctccgaatatgcagagggttacgagtccgtgtccgtggaccctgaggactttgtaggccagaatgtgctgatcctgggtcgtgggaactcggcctttgagacagcagagaacatcttgggtgtcacaaactttatccatatgctcagccgctcccgggtccgtctgtcctgggccacccactacgttggagacctcaggtaggccacatccccgcatgtgtgttctgtgctgggagcccagagtgtggaaagagcctccccaaccctcccctgcccttcctgaccccagctgcactgcccagctttcctctgagtctctctcccctgcattctctgtgggctcagagccatcaacaatggcctgctggatacctaccagctcaagtccctggacgggctgctcgagtctgacctgacggatctggccatcctgaaggacagcaaaggcaagttccatgtcaccccgaaattcttcctggaagaagccaacaccaaccagagtgccgactccatcaccctcccccaggacgacaatgacaactttgccatgcgcgtgccctatgaccgggtaatccgctgcctgggctggaactttgacttctccattttcaataagtgagttccatgcggaaggaggtgggctctcctagcaaaccctcctgacccctccctaggggaacagggtggctgttcagtaggctggcgacagagctctcaggacagcacccaaagaatgg

SEQ ID NO: 28371 - DNA, 2300 bp, Homo sapien
attgcctcttgcaaaccatggccctgtccaacaggattaacagaagcaagtggaagtgactcaagctcattccctgaaaatactttgcatcagtttccactgccttttttttttttttttttttttttgagacggagtcttgctctgttgcccaggctggagtgcagtggcgcaatctcaggcactgtaagctccgcctcctgggttcacgccattctcctgcctcagcctcccgagtagctgtccactgcttttatctgtcctgcatggggctaccaagttgactgctgcagtaatcctacattcagaaactcccagtagcatcctgttgcttacaatctaggttcagcctactcgtagggccctaccatacttgacgaattctgtttaatttcccactactgtattcaccacataagaccagcaattattttaggaacttgtttgccagcacccattctcataatcttcacaaccactaagaaacagacatccccaaattgcatgactatcaaaacatctcatatgccccataaatatatacacatatgcccccaaaaatttttttgaaaaattggccaggggccatggcacacacttgtaatccctagcactttgggaggctgaagcaggatcgcttgagcctggaaggtcagggctgcagtgagccatgattgtgtcactgcactccagcctgggtgacagtgagactctgtctcaaaaagaagaaataagacatccctactttatttttggcaaagtattctgcctgacctctctggttgcaatgcttattcaacaaatgcttaaacttccgtatgtcagatactggacaatttctgctctgagggagcttttctctgatgttgacacagactgaagaaagtaaatgacattcggccaggcgcggtggctcacgcctgtaatcccagcactttgggaggccgaggcgggcggatcacgaggtcaggagatcgagaccatcctggctaacacagtgaaaccctgtctctactaaaaatacaaaaaattagccgggtgtggtggcgggcacctgtagtcccagctactagggaggctggggcagaaaaatggcgtgaacctgggaggtggagcttgcagtgagccgagatcacgccactgcactccagcctgggcgacagagtgagactccatctcaaaaaaaaaaaaaaaagaaaaagtaaatgacattctttggtaggtacttgtaggcctgagaggtcaggaaaatttttctaaggagtccccagctacgatttttaattcaaagaatctccagccatgcaaatctgcaggctcgcagttctttccacctgcccttcccccaagaacactcagccccatttcactggactttgaaggttcctacactgacttcgtatttctccccatgtaaatctcatgcaggggccacttgccacccctgggaagccaaccttcatcatccagttcacgttatcttcctcctgccatttatcttgcctccactgagttttaattccaggctccacttcctgtgattgtaaacatatcccttcatccctatgtctccatttgaccagtcagctaccaaatgtcggaaacaatgccttgcccacctctcctatttggtggaagattaggacagtcgtgtatgttacttggtaagcagtacactgagtcactgtagcaaacgcttgttaattggcttatcggtcctggctccaccacgctggtttccagtcccacaaaactgggtaggccaactagttttagcgtttggctacattcatggaatatgagagctaggattagctccaaaaatcacgtgctcccctccctccgtgtagagaggcaccttttaaaacgaaggacccagttccccatcccggatctccagaccttccaccctcgcgggtgcgcgctagccccaggcccctctaccagcccccggagcagcgaacgcagcacgcgcgcgcctctcccgcgctgggccggagcaggcagcctgccagctggtcccggcgtgccgcgcgccgcgcacgtgaccccgccccctgccattggtccgggcgcgaggggcggagccgccgcggagcaagcgagccaagcgcggcctcattagaccacgggttgcagccggagcggctgggaggttcgcgcgtttctcagggttcggtcggaggcggggaggccggagctgcgggcgtagggacctggcggctcctgaagcgcacgcgggcgggcggcaggtgtgcgcggcatccctgtcacgtggccgaagagcctggggcgcgcgg

SEQ ID NO: 28372 - DNA, 2300 bp, Homo sapien
tgtaatataatggaaagaaggctggactgacagcaggcaaccctggaaatcaaatctgttttgaaatgatgaggtcagctgcttgagtaggctgagcttcaaatttttgcctctaaagtaggggtgggggggtggtcaatggtgttaaattatctggtatagggcctaacacgtaggagctcagcaatatttatttaatacaaattgttctgagaccaccaccctttttcttctgtcctcttcctatagtttctattagaaagatgaaacttctaggttcatcctgtgttgctgtcacccaaatgtcatctctgaaggaagcctcaatctccccagcatggggctttgaggagagtttactaagttcagcatacctgttcttttgattgctctccagcctccaagaaacatttgatttttgtttttttgagacggagtcttgctctgttgcccaggctggagtgtaatggcaggatcttggctcactgcaacctccgcctcctgagtagctggtattacaggtgcccgccaccacgcccagctaatttttgtatttttagtagagactgggtttcaccatgttgaccaggctggtctcgaactgctgacctcgtgatccgcccacctcggcctctcaaagtgctgggattacaggcgtgagccaccgcgcccggcctccaagaaatacttgtgtagtgaattttcctctaggaactcgccttctaagcattttcagaaggttacaacggaagataaatgcataggtttttttatagaagtgtcgggcagccatctgctatacagcgccggttttttaattcccaagagggctatagcattatgcagagtgcagactctggggtcagactgctttggttcacgtttttcatccactagcatttcaactttgggcaatttcttcatttctctgtgctttggttttcttatctggagagtgcggataacattggctcctacctcacaggattgttggcaggactgtatgaatgaatgagtggtaaacagtaagaacagtgcctggcagtattcatgaacatttaacatggcaactttgggcctgaggtctgtggggacctccttggccctctggcagttcttctgcctggctttatgtccgcttgcactgcacacaggatttgcgttgatggcagaaaattgaaacaatgagaaaggaaaattgaatttcaggatatacttaaagatctttttttctcagcactctatatacataaatgcacttttgcaagtctgaatacttgtgtggcattatacaaagtgcttagaacaaggatcttgtttattttgcagatggaaaagactaaggtggctggacgtggtggctcacgcctgtaatcccagcactttgggaggtcgaggcgggaggatcatttgaggtcaggagttcaagactagcctggacaacatggtgaaaccctgtctccactaaaaacacagaaaatagccaggcggcgcttgcctgtaatcccagctactcaggaggctgaggcaggagaatcgcttgaactcggaaggcggaagttgcacgccactgcaccccagcatgggtgacaaagtgagactctgtctcaaaaaaaaaaaagaaagaaagaaaagactactaagtcttagggaagttgagtttgtatgaattggtgaaggtatatctcagaaccaaaacaaggttactatatttgaaaaaacattaggacattttatcaaatctgacaccattaaatttttttaaacacttatgtaacacagaaaaagaaaaactaccaatcaatacaacaccctgtcaaacacaaggtgcagcctcattttaaagatgttacagtaaaaagagagtgtcgtggaattaatgaaatatgaaaaatcagttttgtttgcattcttctcagttttaagtacatattcacagtataattaacaaaaacagtagtagtcgctcaacagttgagggttccattttgcgtgttgctttttgagttctatcatttatgtctttgcttacttcatatggagggtgttttgtactctgaggccttcgttcatgccgctactcacatgatttatatttttcagattttggaagatggcaaagttcatgacacccgtgatccaggacaacccctcaggctggggtccctgtgcggttcccgagcagtttcgggatatgccctaccagccgttcagcaaaggagatcggctaggaaaggtacatgcctgtcagcaggagtctgaatctttgcagctgtggctgctactctcgagtccctgtt

SEQ ID NO: 28373 - DNA, 2300 bp, Homo sapien
aaaaaaagaatgtggcagagcctagacttcaggtatattttctaataaaggagacatactaggcggctaaggaaacctatgtcaggtagaaaggatctgaggtttgaataaagtcatgccctcagattatctttcattgttttaaaattccgaaagaaagacaccaggaggaactccatagcctgggagttgctgagaggacagcactgttatctactgtagtaaagcagttcctgagtcgtcacttcagaatcacagctaatgcggagctcttgggctccagcataaacatatccgtataatctatcaaaatgagacccagaatctgaatttttaaaaatactatcctggtcaggtgtggtggctcacgcccgtaatcccagcactttgggagaccgagacaggaggactgcttgagcccaggagtttgagactagccttggcaacatgatgagacttcgtctccacagaagtttttttttttttttttaattagccaggcagccggacgcagtggctcacgcctgtaatcctagcactttgggaggccgaggtgggtagatcacctgaggtcaggagttcgagaccagcctggtcagcaaggtgaaaccccgtctctactaaaaggaaaattagccgggcatgttggtacacgcctgcaatcccagctactcgggagactgaagcaggagaatcacctgaacctgggatgcggaggttgcagtgaactgagatagcgccactgcactccactccagcctggaagacagagcaagactccgtctaaaaaaaaaaattagccaggcatggtggcatgcacctgtagcctcagctgctccgcacgctgaggcgagaggaccactttagaccaggagttaaagaccagcccgggcaacatagtgagacgctgtctctacaaaatttttaaaaatcattagctggccgggtacggtgactcatgcctgtaaccctagccccagtgggtggactgttgagctcaggagtttgagaccagcctgagcaacatagcaaaaccccatctctaccaaaaatacaaaaattaggcaggcgtggttgtgcgtgcctgtgtacaccaacgactcgggaggctgaactgggaggatcgcttgtacctgagaagtcgagggtgcaataagccgtgatcctgccactacatttcagcctgggcgacagagcgaaaccctgtctcaaaaaataaataaaaataaataaaaacactgttccagaaatccctgtcctacaattaagtttgagaactgcggaagtatggtttgaactctggcggttagaaccctaaactaacagtctgatctaggcaggtcacttggcacttctgagcctcagtttccacaactataaaggcggaggagtaacaataaggaccgcctaagacaccgacggacctcccctgcgctgagtttcacattaagcaggcaggtagaacaggcggggagtcgcgggtgacggtgggatacatgggggctgaggcgcgccgcgaagcattgtgggacacagaagggcgccagtcgctccccgcctcgagcttcgattgcgcggccgccaagtttcagtgatgaacgccctctttgggcgtccccggataccgcctgacgtagtgccaatcacacctctcgcgtctcggcgcctcggaggctaatgaggacgcctggcgaaacgcagtaacggatttccgggtggaccttcgctttacggctcgtgagttcttccgcccaacccagaggaagcgggagagcagtttacgacagcgccggtcgtgtttacggcggcgcccgctgcgcgcgcatgtttcctcttttcctggtttctcaagagtgctgctgctaacgcggtccccggcacgcaccatctgttgccatcccggccggccgaggccattgcaggtgagcggcgtgtttcataggttcctgcggccctccggagccggttcggactaggtccagccttcggggggcctcccggaagagacctctcttagtcccttcctgctgttgccgtccctccgctgggcggggcaggaatccactttcgggggccccgcgtcccgcacgctactgaacgcgggacacgaccttgtgggtgaggtccttggccctcggccctgctcagtgcccatgagctgggtgaatttgattgtcacttaactcacctgggttaagacggaggggtaacaacaaagtctttctgaagtggccgaaaactccctgactttttgagtgaggtcttaggggtaccaggctgagcggtgtttggcccctgtt

SEQ ID NO: 28374 - DNA, 2300 bp, Homo sapien
tgcactccagcctgggcaacagagcgagactctgtctcaaaaaaaaaaaaaaaaaaaaaaagaggttgaataacctgtccaagttcacccaaatgataagtggaattactaagtcctttcacacacatttattttcacccccacagcgccctctaattatcatcttcaatttacaaataaggaaacaaggcaaggaatgtgaaggccacacatagctatcaagtggcagagctggctgggcacagtggcttatgcctgtaatcccaacactttgggaggccgaggcggggggatcacaaggtcaagggattgagaccatcccagccaacatggtgaaaccctgtctctactaaaaatataaaaattagctgggcatggtggcgcatgcctgtattcccagctactcaggaggctgagacaggagaatcacttgaacccaggaggtggacgttgcagtgagctgagatcgcgccactgcactcccgcctggcaacagagcgacactccgtctcaaaaaaaaaaaaagaaaagaaaagaaaaaaaaaagaatgtggcagagcctagacttcaggtatattttctaataaaggagacatactaggcggctaaggaaacctatgtcaggtagaaaggatctgaggtttgaataaagtcatgccctcagattatctttcattgttttaaaattccgaaagaaagacaccaggaggaactccatagcctgggagttgctgagaggacagcactgttatctactgtagtaaagcagttcctgagtcgtcacttcagaatcacagctaatgcggagctcttgggctccagcataaacatatccgtataatctatcaaaatgagacccagaatctgaatttttaaaaatactatcctggtcaggtgtggtggctcacgcccgtaatcccagcactttgggagaccgagacaggaggactgcttgagcccaggagtttgagactagccttggcaacatgatgagacttcgtctccacagaagtttttttttttttttttaattagccaggcagccggacgcagtggctcacgcctgtaatcctagcactttgggaggccgaggtgggtagatcacctgaggtcaggagttcgagaccagcctggtcagcaaggtgaaaccccgtctctactaaaaggaaaattagccgggcatgttggtacacgcctgcaatcccagctactcgggagactgaagcaggagaatcacctgaacctgggatgcggaggttgcagtgaactgagatagcgccactgcactccactccagcctggaagacagagcaagactccgtctaaaaaaaaaaattagccaggcatggtggcatgcacctgtagcctcagctgctccgcacgctgaggcgagaggaccactttagaccaggagttaaagaccagcccgggcaacatagtgagacgctgtctctacaaaatttttaaaaatcattagctggccgggtacggtgactcatgcctgtaaccctagccccagtgggtggactgttgagctcaggagtttgagaccagcctgagcaacatagcaaaaccccatctctaccaaaaatacaaaaattaggcaggcgtggttgtgcgtgcctgtgtacaccaacgactcgggaggctgaactgggaggatcgcttgtacctgagaagtcgagggtgcaataagccgtgatcctgccactacatttcagcctgggcgacagagcgaaaccctgtctcaaaaaataaataaaaataaataaaaacactgttccagaaatccctgtcctacaattaagtttgagaactgcggaagtatggtttgaactctggcggttagaaccctaaactaacagtctgatctaggcaggtcacttggcacttctgagcctcagtttccacaactataaaggcggaggagtaacaataaggaccgcctaagacaccgacggacctcccctgcgctgagtttcacattaagcaggcaggtagaacaggcggggagtcgcgggtgacggtgggatacatgggggctgaggcgcgccgcgaagcattgtgggacacagaagggcgccagtcgctccccgcctcgagcttcgattgcgcggccgccaagtttcagtgatgaacgccctctttgggcgtccccggataccgcctgacgtagtgccaatcacacctctcgcgtctcggcgcctcggaggctaatgaggacgcctggcgaaacgcagtaacggatttccgggtggaccttcgctttacggctcgtgagttcttccgcccaacccaga

SEQ ID NO: 28375 - DNA, 2300 bp, Homo sapien
atcctggaataattaggatttaccaaataaggattcttagaaacaacatattcttttttaaataaggagatttgcagatggtggtgtgtctaggacttttggggagtaaggagaagaggagggaaaagggaagagcatttttgaattcttcattgcgaaaagagaaacagcatacacagaagcaattattttaccctctcatagatggcaatgctaaatcggatggtaaatcctaatgactccaaagcaggcagaacacctttgacttttagagacaatctcttgtcgttttcaccatgtcatagattattccaatgaggatgtttgaggggatgagggggtggcggaggcgagggagtagagtatgggttttgcttattgattttctttcctctgaaactaacccaaccaaccttgattggtggtggaaggagtgaactaagaaaatggtggaatgtaaaggggacttatttggaggagggtggggaggggggagtgaaaggggaggggtggggtggagaggggggaggagatgggaagtcaagtaccttctaggcagcaggttctccataatccggaatgggtcataacttcctcgttctttttgctggtttcattctcactgacacttttggtcttgcaaacccctctggagtagagccaatagtcggttcccacagctatggtcatcaggctgaaggcagcgaaagcaccaacggtggttaaaagcatttgaacacctcgatcaaacagccccataattcttcattatataaacacccaaccgacttctggttctcgggagagtgtgtgtgagggtgcaagtactaaagccaaaaaaaataaataaaaataaaaattattccactactaatataatggatatatgtatgaatagagaatatggagagttataaaaaaagggaggtaagaaagctcacggaaaagagtgtaaattataaagatcacacgggaagaggcttgccttttgagatcagaaactgttccagttgcagtgttttttttttaaaaagaaaaggaaaaaaaaaataaaaagacaccccccacccccccaagtgagatgccttaatctctttttctaaaattctggtctccagtttccatatgtgatagttaatttggagatggcttccacagtgaaccagggaacagccgaattctcaacaccatttctcatggtcgggacctagacagttagagactgtgagagccgagatgcaaccttcggtcttcgttctcggctctgcggcctgcgccatgaaaatcctttgcttcgccagttctcttccttggggggtctcggcgctttcgtttcagaccagacttcccagtattctgtaagcccttgagctcagctgcacaggtgcgggggtctcgctttccatggttttgcccgggcagcggcggcggcggcggcggcggcggcagggcgggcaggcgcggcggcggcggcggcagcaggacgagcagcggcggcggttattgttgttggtggcgggggtagtgttggcgaagtgggggagagagggggtttctcctggagaatcgaggcggatttccctccccctatctgcaaagctcctggaaacgagggagccggcgtcttgctgcagggtgggccgcgcgcctgccccccactcgctaccggctgggcgcccgcggaggcgctcccacctactgcattacgggtggtgctgaaccggacagctccctgcgccgcccgctccgcgcgctccccggctggctcccagggccgcccgccaggaggggggcgctggccagagtcctccctccccggggcagcaaggccagcgcagagcgggggccgcctttcctctttttacccctctcccaaatcctaaaatgagcgctctcctgggctcccggagcttagaggaaggcgtagctagagatagctcgcgctctctctctctctctctctctctctctctctctctctctttctctctctctctctctctctctctccccccttccctccccccttggtgtttcttccagctcagcctccttctcattccatctctacgtgcccagagcttcaaatacaaccctcccatcacagtcagacgggcacaaaacttcaaccagccgtttctctgcctggaagcggcgaacatgtaacctggacgggtaattacaaacacgtctttatgtgttttttaaatcattgttttcactttgctttgctggggatttgttttattttgttggtccgttagatgtatcttctttcggttttcctctctcttctcttt

SEQ ID NO: 28376 - DNA, 2300 bp, Homo sapien
gctgggcgaagaaacaggtagtttttctatgtcaaaaaaaatacactggtcatacctgcagaccaactctgacctgagcgaaggaagttaggcaatggactttacaccaaagaaagactgtttttaattcactcatcttttatatacctctgataatcaccagaccactgagaaagatgtcaagcaaataatctcaagaaaaaaagtagagggagagagaagaaagtactgaataattgaattatgggattgaaacctctcaactccccctgcctcaatagactcatcatactcacatcctctccagggtcccccccgcaacacacacacacacaaaatatcaaaaacatgaacccatctcatgcctcatgtgctcttactcacttaaccataaaagtgatcagagaaaaaaatgtaatccgtagcagcaggaattaatgtgcttctttctaccagaggtcacgttaaggaaaagttgcacataagagaaatgaaaggtgacactgtaattaacccacaaacaatgattcttctgagaaagaggggagggtttcggtgttccagtgttcatggaaggaagattttttatctcttcccaaccagtttatgaatgacataggatacttagaaggattcacatttcacccacttcccctgagaacatgtttatccttgcaatgaaaatcattgcccaagccccagctacgagtcgcccttttgcacccttttccacgaataatcttcccaaaatgtctgcttgtagaagcaagatttggaatttcacggaaaactacagagagacacagagcaatgcacaccccctggtaagccagagagagacaaagagaagagagaggaaaaccgaaagaagatacatctaacggaccaacaaaataaaacaaatccccagcaaagcaaagtgaaaacaatgatttaaaaaacacataaagacgtgtttgtaattacccgtccaggttacatgttcgccgcttccaggcagagaaacggctggttgaagttttgtgcccgtctgactgtgatgggagggttgtatttgaagctctgggcacgtagagatggaatgagaaggaggctgagctggaagaaacaccaaggggggagggaaggggggagagagagagagagagagagagagaaagagagagagagagagagagagagagagagagagagagagcgcgagctatctctagctacgccttcctctaagctccgggagcccaggagagcgctcattttaggatttgggagaggggtaaaaagaggaaaggcggcccccgctctgcgctggccttgctgccccggggagggaggactctggccagcgcccccctcctggcgggcggccctgggagccagccggggagcgcgcggagcgggcggcgcagggagctgtccggttcagcaccacccgtaatgcagtaggtgggagcgcctccgcgggcgcccagccggtagcgagtggggggcaggcgcgcggcccaccctgcagcaagacgccggctccctcgtttccaggagctttgcagatagggggagggaaatccgcctcgattctccaggagaaaccccctctctcccccacttcgccaacactacccccgccaccaacaacaataaccgccgccgctgctcgtcctgctgccgccgccgccgccgcgcctgcccgccctgccgccgccgccgccgccgccgccgctgcccgggcaaaaccatggaaagcgagacccccgcacctgtgcagctgagctcaagggcttacagaatactgggaagtctggtctgaaacgaaagcgccgagaccccccaaggaagagaactggcgaagcaaaggattttcatggcgcaggccgcagagccgagaacgaagaccgaaggttgcatctcggctctcacagtctctaactgtctaggtcccgaccatgagaaatggtgttgagaattcggctgttccctggttcactgtggaagccatctccaaattaactatcacatatggaaactggagaccagaattttagaaaaagagattaaggcatctcacttgggggggtggggggtgtctttttattttttttttccttttctttttaaaaaaaaaacactgcaactggaacagtttctgatctcaaaaggcaagcctcttcccgtgtgatctttataatttacactcttttccgtgagctttcttacctccctttttttataactctccatattctctattcatacatatatccattatattagtagtggaataatttttatttttatttatt

SEQ ID NO: 28377 - DNA, 2300 bp, Homo sapien
ttaaagaaagaggcaagaaacatgaaaagtggctcaacagttaaatacaggtttattttggagcataaacctgagaggggcttctggccaatttcagtcaggagtgctctctcttacagactaagagtatttaagggtttagggcaagagagcttaccacaggcttggaatgtttctgtgtggaggagaagtttactgtggggttggaatgtctccggtctgagggtgggttatgttggggctgacatctctctgaccagaggggaggttatcttggggctgcatgtctctggtcggggggtgggtttatcttagggttggaatgtttctgattggagatgtcacttgtggtttatggtcattctgacattagccattaggctgatgccctttgggttgaatttaggccgtttttgatcaaggagaactttaaaatggcagtgcttgtccaagatggctatgctccggctctgtcattacccacctcgcaaaatgaaggaaccaaggcttcggaggctgccctgatgtgtgtctgtgtcttagctacgtggagctgcctcgggagggtgactcaccaaatggggtcctttaagggattaacagggtcactcatggtgaacaggttggcctggaggggagccggcaagaggaaggcagaagaccagaaagaggctttttgctcactcagacctggatgtctgagacagactcacgtgatgtcaccaaagaagaaaagcagttacgagaaatgaaggagaaacagacctttaccgtagcgccaggaatgaatcccaaggaaagaacatctcagacaacttgcatttactctggattcggggctgaaaccatcagccattcatagagtgtgtgtgtttattcccccacacaaggctggcagccactctgagatgcagagtggcggagaggtggaatgttctaggtgtctggagggaatgtggaactttcgcacaggcacctttgctgaggggctgctcttcccttcagcatcagccatcagaatcccaggggccctgagaaagtgagaacaaggggtacattcggccaaccagtgacagtgatgataaaccaaatctgtccagataagcttccgctctcccatccaccccacaatcacgtgtgcacctactatctcccaggcactcatacgtttctctccttccatctccacaaccaccccacaaggcgggttctcctaggcccatcctgaggctgagggatgaggtgacttgtccaggccagggatttaggtctctgaccccctaaccacgtgcaagaggcacccccaacccagtaaacgcgtacagagagcctccctgggtgacgggcaaacgaggttagtgatgcattctccttttgcagagagtaaatggactaagagcaaagtacgacttcaagtttccgagtctcaccgcttagccccatcaaagtgtatttgttctccctttgttcacaaacatcactttaataaaacaccttcatattttagattttaacgctcattacatctttgagcttttaaaatgagatttccctgcgggatgcggggcaaggactgcacttctccatgcactttaatagccgcgctgtgcagaacccgggaaccggggaagccgcgagaaccgcgcgaagtcagagcaagtcaaaacgacctctacagcggcggcctggcccactgcgcaggcgccgctccagaccgcctagagcccaacctgccccattgtaggcgaacccacttctagaaggacagcgggagtggcgaatccctattcctcccgaagatgggtcaagccagactctgaccaatcagaaagcttctcttgtcaccgcttctgactgcttgacgtggaggcttctttatctcgggactctcaggcgcagcgggggcgggatataaagctggttgacgtcaattacaaccactcgtcaagcagactgaacttgaagaactgataactctacgaattgcatctcaagaaaaggctgttatcccagctctctactcccattggatttttgtgagaccttgagggtgggagcttttggcggcaaccaatcgagggtcagcgaggaggaggaggaggcggggcaggtgggctatggttgcttggagagtgcatccggcccggtacttgtgatcggaggagagccggatcgtccttccttgaaccctctgggtagggctgtgctgaggggctgggcggggagcacaggccgtgtccgctcgcttgcaccttttcagactgccgtgtcaggcctcgagccgggcccacctggagccc

SEQ ID NO: 28378 - DNA, 2300 bp, Homo sapien
actaggtacgcagtaggtgctcaataaatgcaccccccccccaacacacacacacacacacgatatggttcagcccattcagatttgcttaattagaggtacatgaagaagacctatggggacaaagaggaaggccatctgggctcctgagaattcacccacagtaggtgctgctcccgtcttccggtcttattctggaagcaggatagtgtggtagaaaggagcaagtgctttggagtcagagaaccggggctgaaatcctacctccattctgtgatcttaggcaagttgcccaatctctctgagccttgttcttccatcattagtaaaaaagagagggttttgcctacctcttaaggggatacaagaatcaaagtgcgatgctgtgcacacagaacccagcacactgttcaacaaacaagtgtaattattttcccaggccccagccagcgatcttcctcaagggttcatcctcaaggttctcctgcatcccggctccctgagctcagccatgcccacgacttgacgagatcaactccttgacttctctgatgacaaagcccccagggtccagccctgacctcactccagagttcagacacatctccgccagggtgtccttcaggtcccctaaacccagcatcagctcttggctcttccactactctctgggggatttgggtaagtcaccctggccttggtttcttcatctataacatgatgtcatttgtagaagtttgtagccgatcaccacggaggctgtcccagccctaacatcctaggattcaacaccacttactctatcatcccttcgactgagcactacctcctccctacactccctgccttcaaagtcaacaccttccttcttcagcaaaccccaccttgaatatttagggtcagcttggatttgtccctcttgttcatgccacagccccaattctggaagcttctctccaagaggtgctcccctatctgcacactccttcctgttgccaccaccagcaacctagctcaggccccagcaccacacctcaaggaggccccagtcccagcttcccccatgcagcctgccctcggccctttctatccatggagcttccaaacagcctttgcatggagcctgggattcctcgtgtcactgtgaagaactagaccccaccattgacaatcttcgtgccctggagattcttttcaggttagggatgaggagaggaacatttcatggtggtcagattagatattcactacgtatttattgaattcatttggtcattcatgcttctcaaaacacatccctcagctggtcctctccaatccaaaacagacaatgtcagagatctctttgcaaatcatgaagggcttgggcctttgtgcctcaatgtcacacgcatacaatttcagggggtccatcttcccctcgccctagaccatctatagggcacagtttacctctgattgagctcatgttacaggtggaaagactgagaaagagagaggaagggacttgtctgagaatatgcggaacatttccttctaccaggcactagatcctcgcacaaaagtgctgagtccgctcccaaccccaggcccgtggctttgagcagcaggtcacttaacatctaacgtctttatgctgtttcctcatctgtgcgagagcagctatgtctacctggcaaggctgtagtgagagatcatatcagcataggaatggggctcagccccatgcacagaggacagttcttgtttcattcttttccttgctgtttctcttcctttcctggcagaatatggaggaaggaagcatcgctgccatctacagtggtcacggaaggcttcatggaagaggcgagccctgcctgggcctcaattttgggtgctggagggaagcaggggccaagagttattaatagtcttggcctgatgggcccagggaggctgaatgtgatacagacacccagcaccacggttggggagtacctgacaccggaaggggagggggccggggctacggggagtgccacctcccaaaatagccagagcagaagcctatataggtggccatcccacctccaggctcacttcccgacaggacttcccaccagcccagcctttcagtgcaggctccagccctccacccccacccgaggtgagtggcagctaccgaggttggaggatagagggatgcagcaggatgagccagctggaagggagagctacatctcccctgtccgtagtgacccggggaggggggtgcggtgggggtgctggaggcagggcagctgtggaatgtagggctg

SEQ ID NO: 28379 - DNA, 2300 bp, Homo sapien
cagccaccttccccagcatgcactctgagtgggggtttccttactcccgagcgctctgttaccatctgcacaccgaggactctgcggtcgctcgctgggcaccaggccgtgtgtcccagctgcctcctggaccccctacctctccctagctgttccccgagcccctccaagccagtggttcctttccctccacagcggcccctcctcctgagctctgtctccaccatttacggaagacagaaacctggagtcaccttggccttcctgtctccttggcctgccacagccgatctgtcaggaatgtatttcacctccttaagttccctctaactgcctctcctcctccatccctacagcctgggcttaaattcagattttcctcctctcctgcctgaataatttcaacagtggcccacctggtcttgtcctccatccgtcctgcgggttgtcatccacaccagctcctgggaggcctttcctgaatatgactaaccccacacatcccatccctccaggcctcacggtggctaagaaaacgagtccatatcgctctcattcagccaggctccagcctaactccagactcattcctctcctctcccagctaaaactactggggcaggtggtccctcaagccccaatgtgcccaggcctttgcatattccagtgcctccaccccccacccccaatatctctgcttaaccaattcctagttctccttaaagactccacacgccatccactagaaaggtatcacaagggttcgaaatggaacatctgcctggcacacagtaagtgcttaagatgatggaattaggagtgttatggtgggtgccctggagccctggggacgataagaaagatcacgaggtgatctttagaatcttagaatgggcttcacaacgatcttagaaggggcttcagcctcagggtaaagtttgatgctcagaccacttccccttccacttaatagcaggatctagactttctccagcacccctcccaggtctttccaaaagtcttcttcttctctgatgagggagggaaagggtcttttctccccttgttcctctgcccccacacactcccatctgaaacccctacctcccggagccctgcattgtagggcgtggacctgccccttatcccccgaaaaccctatctacagactctaacggaagggcagaaggtgtagggatgaccaggggatgaggggctctgcacatgcccctccgtagggcactcataggcctccgctatgctggtggccgtggtgtcctgagactctcctctctgccatcctcagagaatcgacttcccgaagaaggctcaaggataagccccgggctgctggctctcactgcacccccgtcgtcctctccacctgctcccctcaccttggggaccctgtggcgggggggtggggggcgggggcgggtctgagctcattggttttcttttcactggtgctccgctctgcgtaatgtaggttttctttttcttttctttctttcttttttttttttgagacagagttttgctcttattgctcaggctagagtgtaatggcacgatctcggctcactgcaacctccacctcccgggttcaagcgattctcctgcctcagccccctgagtagctggaattacaggcacgcaccaccacacccagctaattttgtattttcagtagagacggggtttctccatgttggtcaggctggtctcaaactcccgacctcaggtgatccacccgcctgggcctcccagagtgctgggattacaggcctgagccaccacacctgaccattgtgtaggtttgctgcccttctgaatatattacctttcctcgaagcaaatcccgccttccacagtgtattaccatctcacatccattgatgctctttctcttctctttgtccttgactgacggactatcctttatatacacatacatacatatacatatagagatagatagatgatagatagatatagatatagatattttttctttctatgtcaacaagggctcaggagggaggagagaccaatgcttgtaacttttttccacaaagtagttgattgctttctgtatgtgcaactgtcttttatccagacttttcccagaaggcctctccttttcagcaaaaacaacaccaaaatgaatcaaggtattttcctgaacttggaagtcatctgctcccttctcccccaggaatgcaccagaataagcatttcacttttgaaagtttgcaatatgtatttttttcttttctttacagtattcctcccacaga

SEQ ID NO: 28380 - DNA, 2300 bp, Homo sapien
acagccacaatgccaccactatacacattatatggtcttttatagacacaacacaaatgcacttacacttgcctatgcgagctgtatgtgtttatacacaaatatgtgtttccaactataggcatatactacacacacagtttacacaatcacctacaaattctgtatcatgcttgcttgctaaaattgttttgccacttcctgtccttcctgaccaactgtaggccaatgtcctcctcttccctcagttatggctgtgtgcttgcacctgttggtacttacagacacctgcactaataaccctgctctgtgtttcatttcatcctctagcctgggagccccgagacaccagcaactcatcagacttattgtttgtattatttctagttctttgggtgtgaattcttcatgatgtggaggctctgagctgtctttcacagctcacgatttgtagttttggtctgtgagttgacagagtaggccctgcagagtcactgactccaagctgtttttatataatgcctcagcttaggatttctgcaccacgtgggtagcttatatcggggccttacaccagtgcagagggcaggcttgaggctgatctggtacacacgtcccttgttccacccatggactgtgagaggacctcagctcctgccgtgactctaggctgatggctgagaaactctgttcccataatcagttctgacacccactttacactgagaactcagatttgactttctgctaacagcaggacctgtggcctgtacctagtcccagatttggcattaaaatctcagcccaacaatgcatatccaatcttggttttcccatgggctgttggccacgttcctctccccctggtatagattcctgacccctctctttgatcctacctaaaaattatgctttcttgttttttttagctgggacttgtatgtttaaagtagtttaaaacaactttctgctctgcatgtatgaatacgagtgtgtgagcgtgtgtagctggcagggagttactgggtgtggctgtgccaatgactcctgtggacctcttctcagagaagtcccttcagaatcaaatacccatacctgttaggagctgcagtcactgactggcagcgtttcattcattcactgaatattggttgagcacttgcaatgtgccaggcacgctgctagccaaggaggcagtcattaaacatacagataaacaaacaaatgtgagatgacaatagttatgagtgctctgcagtagacgtgcagggacctgtgagagaatgtagtagggagggccttaatttagggtgtgtggtcagggaaggcctcgctaaagatgtagcttctaagctgagatgcaaaggaggcagtgaagagctttttccagcagagggaacaccatgagcataggccttggggcggacgtcttagaacattctagaaacggaaaggaggccagtgagaaaaagggagctcaggagcagaggctggggaaggctgcagggcctcaggggcattggaggcaggcagggcaaggactctggactttatcctgagcacagggtgatggggcaggagagtttaagcagggagggtgaaactcactctgattggcagccctgtgaaagaggattggctgggcatggagatctaaggatgaggaaaggatatcccagagtgccagggcgcgcaaaccaaacttcacactctaggaagacagaggccagaggaaccaggagggcttcctggaggaggtggcatttactctgggcctaagagatcacaggaaaatggaggccagcattctaggcctggggaagagtttgggcaaaggcttggcagtaagagaataaaggtggggcttgatgggccagaggataagtgactcctcaaggtcacaagacaccctgatggctgggaccccatctctgatggagcaaggcttctgatacccaactgaggcttggcgccaaggactgacatcaaggaagtggattcctgcaaacctggcacccgagggtccacttcctcaatttctgtgcagctgggaggtgaggtaagaggaagtgtgggccacaggctaggcccagagagcctggaggaggagcctctgccagactggagagaagcaggcctgagcctccccaaaggcagctcctggggactcccaggaccacaggctgagacgagacgcagggtggctggaggaagtgagaggtgaactcagcctgggactggctgggcgagactctccacctgctccctgggaccatcgcccaccatggctgtggcccagc

SEQ ID NO: 28381 - DNA, 2300 bp, Homo sapien
agcttagcgaaactcaaagggggtttccacatgaagggtatgtgagagttctttgtatcattcctttaacgctctgtattttgaaatagtttcagaataaaaatggaaatggaaaaaaatgcaatgttaacatatacgagttactactttcaacaagttatcttccttttcatgcctcaatttcttcatctgtaaggtgaagacagtaacagctacataaaggttattgggaagagatggagaagcccccagccgaaggtctgctcacagcgtaaatgctcaagccctggtcattatgagtactacgttcttgccaacattttcttgggtttcttagtctctaaaagatcgtcaattgcaagacacggtattttacataccactgaaggaaaaaacaaacaaacaaacgaaaacattcaatgaattcctgacggtgtgattcttctcgcttagaacttttaatacttattgagagaactctgttagactcattcaaatgtagatttttatcccctgctgctctatgatgacttttaaaaggaaagggtcagtcaagtgaattggctgaggtgttcctaaagctccttcacattttgggtctggtgtccggagtgattttgactcagagtctcgggttcttcgtttctccaccagacagcatcctctgtgctcctgagggcatccaggcccgcagcctcccagtcccacagaggacctcagcaaagacaggcagagtggggacacctgggagaaaagagagcccgggacgtcactttaattccatcctctccagccctggagaagcccctgcagggtttttccatgccaggcagggacctcacactgaccggagtgcctgagagaaccacacatgccttcctctaccctgggctttctctgctagggtgaggccctgccagctcttcctggccaaccctgcccttcctggtaggaggaaagcaaagaacaacaatcaggccagaattccagtggcttcgaggcaggttcctgcccctccatttcctccattcccctcattcttgccctccattcccctcattcctgcctgctgccctttctcctgggaggcagccccatgtaggagaaatatgactgcgttttgttgtgtcttggcactgtgattcatcttgtctttattcaaacttttcatatttggttcaccgtgaatagtttctgcatcagttgggatttttttaaaccatattgcattaaaatattacttacaacaattactgaatttttaaatgcctgtttaaattttgagcacgagagactgcctcactcacctgaccttaattctgctggccctgctgtgctcagggagccactcattcattcattcattcattcattcattcattcattcatctattcatttgcacacagtcaaaggtgcaatttctcctctgtaccaggccatgtgctaggtatttgggagggaagtgcaagccggacacaagccagcactgaagatagtgtcagaagaaagacagccatgaacacacatgaccatatgacacatggtggggtggggcggcagggcaaagaggacatcggggaaatcaacatgccaccagctaccacttgtagggggttctcctgtggccagctctgagctaaggtcttcctgcacagaatctcactggattccctcaacagtccttccaggtttgtagatgcttctgcaaaagtaacagacagatggatgtcccgaggcttggggaagtaacacgcagatgatttgcacaaggacacgctttaagaagcagtggacttggaagtccaacacagatctgtctggctctgggctcaaaccagctatggttattgcagccacttccacctgcatccccatcaagcagtcagggaaggctgcatggaggaggccctgcgtcagctgaggcttgaaggaggcctaggagtttataggaaggtaaattggagtaggaggctttctggaagtaagaaaagtcacgtgcactattagcaaagtaggcctgggccggcactgcttcctctttctgcttctctgtttcctgatgacatcaacataaataggaaacgtgggaggctcactctgcctagaggctccagaagaagactggtctctcccaccacacagaggtatggcccggcgtccaggagcagggctgaggggtggggtcagagcaggggggaatgtggggagtccaggatgaaaaaggacagggggagcctggggggcgtcctgtgggtagctgtgccctggggacttggaggagttagggcttggcctctta

SEQ ID NO: 28382 - DNA, 2300 bp, Homo sapien
tacgaagtggagcttctagtggtaacctatacatagatgtattcatatccgtaaaaccttttgaataatgcctggctcatggaaaacactgcaatattgtcagccactatcatgaattctctctgtgtatgtgagtattgtttgtgctctttgatgatattgatttgttttaaccttttaaagtaaaagacactaacctgtcctccataattctggttggtatggtctatatgttgaagtgcacccaagtttatgttgcaacctaatccccaatgtgagaatatctggaggtagtgcctgtggcaccctataaaataccccagcgagctcccttgcttattccatgtgagattatagggagaagactgcaaggaacaggccctcaccagatagtgaatctgcccgcaccttgatcttgaacttcccagcctccagaactatgagaaataaactttgttactagtaagccactccatctatggtatgttgttacagtagcctaacggatgagtacattggtgcaaagattttctgtttgcactccgtcctttccttttatggttcagtcagtttgacaaattacagaagatttcacttttatgtacttctgccagcctttgtctctgtgatgtctcctatgcttttaagcttaaagagttcaaaggcattcactcctctggtttgcagctttcataggatgtaacattttacatttaaatttataattaacttgttatttggggaatggtgtaaaatggggttttagataggcatttttatgttgttaatcaatgattttagcatttttttaaatttaatatttcatcgcttcacattgattcctgattccttctcagtctggggtcaagtagagtttgtttccagccagcatgtccattgatagattctgtgtgtgtgtatgtgtgtctgtgcatgtatctgtatgtgtgtgtgtatgtctgtgtgtaggtggtatatgcgagtgtgtatgtgtgtgtgtgttgtgcatgtatgtgtatgtgtgtctgtgtatgtgtgcctctgtgtgtgaatttctgtgtatgtgtgaatgtgtgtgcatgtttgtgtgtatatgtgtatatatgtgtatatacatgtatgtatctgtgttgttcatgtgtgtatgtgtgtctgtgtctctgtgtgtgtgtttgtatgtgtgtgtgcatgtttgtgtgtgtatatgtgtgtatattgtatgtatctgtgtgtgtctgtgtctgcctctgtgtgtgtgtctgtgtgtgcatttgtgtgtatacatgtgggtatgtgtgtgcatgttttgtgtgtacgtgtatatatgtatgtatctgtgtgtgtctgtgtgttgtgcgtgtgtgtgcctgcgtgtgtccgtgtgcttgtgtgtgtgtgtgtgtttgcatgggcatcttgagtgaagcttccaacaatctaacagaagaaaaggagccacacttgtctgttctgctctcttgggtacttcccagaccagtgaaatgaaagggaggaaacccccggcctccgaggagaaaagggaactggcaagcagagggtggggggatgacggtaaaaggagcaggggtggggagagcacaggccctgtggaagtgaggacatgtgtgtgtacatgtgttcatgtccaggggatgacactgtggcatccaacagccgtggaccagcagcccacggggagcttagtaggagtcaaatcctaggcccctgtctcagctgctctgctgtctagcgcattgtgcagtggtaggtgtcagtgatccaagtggggacccagtccctcaggccacacagcgcatgtccattgccttcatgccgcaggagactgagaggtcatgcatgagggccacttctctgggttgtccccacaacacgggcggtgtccctgggacacgtggaaggggaggggcagctcactgctgacatctccttctgcaggcctggaggaggcagaggccaggagggagaggtcccaagagcctgtgaaatgggtctggcctggctcccagctgggcaggaacacaggacttcaggacactaaggaccctgtcatgcccatggccagcacccaccagtgctggtgcctgcctgtccagagctgaccagggagatggtgctggcccaggggctgctctccatggccctgctggccctgtgctgggagcgcagcctggcaggggcagaaggtgagtcccgtggctcccacccacttccctgtccctgtcctcactgctgcaccctgggggagggccgcagcgtatcctcaggatcctgcccgccag

SEQ ID NO: 28383 - DNA, 2300 bp, Homo sapien
tcagccttccaaagtgctgggattataggcatgaaccaccttgcctggccttacaatgatttgttaagctaaccatgattcatgtggcttggggtatttttacttaaaaataaaacaagtttttagaaaggaaaaaaatttgaatatggaaattttaaaaacaaaaccaaacctgggacataatgtagcatcaaagactcttctttcataaatttctttttccatctgcctgtgttccttcatgttttccctttttccctcttgccctggtgtattgaccctctccttaggtgcaggcaagaaacttgctctctctctcctcttgcctcctcgtccctccccttcctcttccctccccttcctattccctccccttcctcttccctttcctctcctctggcattcagtgcacccctctgctgtagctcccaccgcaattaactgaaattctctttttgtgtgtctgtctctcctattgtcccataagcagcttgagagcagaggtgaggtaggttttgtgcagttttgaatcctcaaagcttaccatactcccagacatatactagacatccagaaaataaggtttaaactcaacaacttttccttttcccataacgtctcaagttccacttaatgattttcaatgattattcaaagaggactatatatcttttaagaattaatttgtcagaaaagggatttctggctgaaagaattacagattgagtttctgtttgtaagtccaagagcctgcggggttatatgcctgctgcgcatgtcatttagggagtggaatttcaattgacttccgtttttcctttttgtaaaacactgtttgtaattttaccacaaatgcacatttatgtaataaaagcataattataatgttcatttaaaatgattttttccatctaattcacattcacttagcagtttaaaaagcataagatatgtttactgcaaattgcatctgaaatgcttccctatgtttgagaatgaagtttcagctagaacagtgactcctgagatgtactctgctcaggtgtttccaaacttggtgaccacagtccctctcatcctgcatgctcctccaccttctgactttgcagctcctcctataaggatgtggaatctctttcccctccccttgggtctgggcctccttgtgacttcctttggccagtagaaggcagtgggggtgaagctatatgatttctgagactaggccttaagaggccttgcagcttcttttgctctcttagaagtcagccatggtgtaaagcagtccaggctctcctactgtagaggccatgtggagacagaaaccctggaggatgggaagccatgtggaggggaataagccagtgaagccctctctcactccaccctcgtcaagctcccagctaaatgcagccacatgaatgacctcacctgctttgtggagcagaagaaccacccaggtgagcctagccaacccacagaatggtgacaaataataaatggttgttgttttcagccattaagcttgggaggtggtttgttaggcagcagtcaatcatttgttcttatgacagacatttgtttgctggttagattggatgtaacctgggatcacatgatcacacattcacaatgtcagaaatgtccccaacaacagacacttggcaatttggaattaataaacccagcttcagagaatccctgtttcccagtcactgtttctcaactttcctacactgccaccaagtatgagccagcgtctatccctctcacattcctcaccccattaatagactccctgtttttcttgtatctcgttaatttctggtatgtttcctaggacctgaaaacataaccaactgtctttcatcttaaaaaaaaaaactcccccttccctcaccccaatcaagtatccaccttaggcttccataccatctctttctcctctttctaatcaagcttttccaaaaagctgtcttcatattcccatttcctattcactcctctctctatttattatgacctggctttagaatggtcttccgccagcatcacagaggagctccacatcacataaccagatggattcacccctgccttgacctctcagacacaacaccagcaccatggccactcctagagccttaaaagtctctccatttttatgcctcccaccacactctgctttctccttcccgctctgactttcccttctctgttcccctcctggcctcccgagcacctcagccaggcccttaggcaccagtgtcctcaggggtctccagggctcctcttctcat

SEQ ID NO: 28384 - DNA, 2300 bp, Homo sapien
acaacaacaccagaaatctttccccagtagggattcattttcaattccttctttatgtgggttactgactgcctcagtaccttttattgaataggctcatctttcctcccggtgacctgcagtggtacttctgttatccatcaggttttgacacatgcatagatcagtttcaggctctattctgtccattggtctaatattacatttttaatcaccaaagtattataagtagcctgatatctggtcaggcaatactcccactaccacccctccaccaccatcaccagttaatgtcttgggtttctaggccctttactctcccatacaaatgttattaataaacagaaatttccatgaaaaaccctgttgggattttgattggaaatacattgaatctacagctcaatttaagggctgttgtcagctttataatgaattttctaatatatgaatatggtatatacctccattaatttaagtcttccttcgatatctctcagtaacattttgtgatttttttttttctataaacatcatgcaggtttttttgttagacttactcaggagaatctctttttttgctgctgttgaaaatgatatctttttaaaattatattttctaactttgctgctgataccgtatacacaaatgcaatttttgtttttgtatattaatctcgtatccagaagctttatgcagctcaccaattaattccagtaattagttattgattctttaggagtgcttttgaatagtaataatggctacatttatgcatagtatttaacatatgccaggtactgctctgagtactttatatatatattttattctgcacatgaatcccatgtggtaaatgctacaattcccatttttttttccagataaaaaataattgagtcatggaaaagttaaataacttaattaaggccacacagatagggacggtcagaattgggatttaaaccctgccagtcagaggctagagtttaaattcctaaacactaggcttttcttacctttatatcagcatctggctgacctctctaggacaatggtgtctataagcaggaaaaacaggcatccttatctccttcttgattctaacattacatcattaaatataatatagtctgttttcatactgctgataaaaacatacctgagactgggtaatttataaagaaaaagaggtttaatagactcacagttccatgtagctggggaggcctcacatcatggtggaaggtgaaaggcacgtcttacacggtggccgacaagagagaatgggaaccaagtgaaagaagtttccccttataaagccatcagatctcatgaaatttattcactaccatggaaacagcatgggggaaaatggagctggctctgggtcttagtctggctttgggtgtcctgagagtttggtgaacttcatgtggggagagtattggcatggccgtgagtcctgggtgtataggcttcccacagacagggctgcgggggaaccatgtgggatggcctgcaggaatatggccacggtgagtggccctttgtgtattttctgcctcccaactcaccgtggctccagcttcagaaggaggtcagagcagaacacccctgtgggctaacatgaaggtcctcatctgctccatgcagcagggctgggaggggagagtagagggtcagcccatggtaaggacaagccacatacaaatcaaaaccttggctgggctcacctggacattgtgtctttgagtcacagagcaggcagaatggtagcttacgtcctgtccttttccctctgtgtccaggtatccagggatccctgaaccagcttaccaaggattttctttttttcacttctttccattgttggaattctgatttcctctatttggtgtcttcctctttcttggtttgctctcttgtctttggggtggattccatctcccagcttgatgtgactgtcattggagaacacagccctgtaatgatttcaatcctttgaaattgttcagatttgctttagagcccagtagatggtgatttttgtagatgatctgtgtgtgcttaagaataatctctccaggccgggcgcagtggctcacgcctgtaatcccagcactttgggaggccgaggcgggtggatcatgaggtcaggagatcgagaccatcctggctaacaaggtgaaaccccgtctctactaaaaatacaaaaaattagccgggcgcggtggcgggcgcctgtagtcccagctactcgggaggctgaggcaggagaatggcgtgaacccgggaa

SEQ ID NO: 28385 - DNA, 2300 bp, Homo sapien
aataaggtgcaatggtagaaaaggttggaaaataggagtagggagtgtggggtgggctgggatgctttttaagaaaaggtggtctgggaaggtgagcagagtcttgaaggaggtgaagaggcaagccatgtaggcatgtgggggaaggaagttgcaggagaggagagggaacagcccgtgcaaaggccccgaggagggactgtgcttggtgtgcccaaaaaacagcagagcctggcatggcagggacccagggagcacttgggaaagtgagaggagcagaggtcagagaaaaatggtggacaggttgggtagggccttgcagataaatgggaggatgtcagcttttactgtggttgagctggaaggttttgtttagaggggtgacatatgatctaatataggtcttaacaggattgctgggctgttgagtgagaagactgtcagaggatatggtggactccagggtggtccccatattatctgccccctcgtgttcatgccccgtgtgaccctctccctttcactgcgggtgggacccgtgacttgcttttaaccaacagcctacggcaaaggtgatggatgccacttctgtgactatggtacacaacattgtaatgccccatcttgcaaggggactccctctttgctggctttgatgaagtcagtgtcatgttggtgttggggggcccacatagcaaggaactgaggatggcctctggctgacagccagagagagcctgagaccctcagtctaacagactgcaaggaactgaatcctcccacagccacatgagcttggaagcatattcttccctagtggaacctcagatgagactgcagccctggccaatacttggattgtagcctgctaagaccccaatgcagagaactcagctaagccatgagtagacacccgacccaaagaaactgtgagataacagttgtatgttaagcttcgaagtttatggcaagattgtcgtgcagcaatagataatacttaggcaagagatgagggtggcttggaccagggagtagggggagttgtggaggtggacgaaggcatccaaatctagtgtacttcgaaggacttgctgatgggttgcttgcggaagtagcttagagttttgtgatgtctctctctgtgcaaggcaatgtgctacattttgcaaaaaattgttttattcgcccatcacccttatccttagtgttgggtgatatctgtttcacatgtgaaggaagttcagctaaaggacttggccagtctcttatctaataagtgacaggcccagattctggggactccaagtttaaccacagcactctctgtttcctggggaaatcctgaaaggctgggcttgcaggaggcgttcactatacccactctttgtccaggctgagcaacagccagacaggaatgggccagtgctggcaccaatgacttctgcctccttcttctctgcagaaaagaagtcacttaattttgttgatctccttctgtagcccttgttgtttaggaataggagagaggacccttcctttagttttactcccaggtccctgatccctgggtgtccaaatcagacagctccagatgcatctttctccttccccattgacctcgacctacatttatgctgttatacacatccatgcctttaatattctcatcccttcaaaactgttaagttcctaggcatccttcaagatccaactcaaatggctctttcataagtccttcctcctttttcctacacagagctagttcttctccctacttagtgctttgagctcccaagaacatcttttgcacttggtagcatctgagccccctgtgcctggcacacctggcatgtagtgggggctcaactgacattctagagtggatgagagagtgaacaataattgaagcccctcctgccttttcctggcctcaatcctggctttctcctggcctcttttccctacgggtgggcctatcagccctctgaggtaacagagccctgtgtatagtgatcaccatggcaactccaatgaacatcttggggagggccacttcccagcaaccatccattggtcttcaccagtagttctgcagtggggatctgcacttctgggcttcagcacacatcagtgtggttcacgtgtttcctgctgttatgaaagagattggagaggtgaggcagagacttatgaagggccagggttcttccaggacatggggtttcatcttccttctccccattcagagttgcttgtgagtgaagactgcctagactggacttaccttcccgccctctttg

SEQ ID NO: 28386 - DNA, 2300 bp, Homo sapien
tggcatgaaatggcagctgctgttacaactctgccgacgggctgcagctgcctggaaaggttatggaacctttgcaaacagcaggcaggggccccaggagagctagatttggggagagggggatcctgcggggagggacactgttgatgtctataagggtttctgcgggacgagagaggcctggagaagctggatgtgtccgtgggaggtttctgtacagcaatgcaaacgctggctcaggggcatgacacccttaggtatatcctagtacatgtggggcagctggtgcctgggagtggaggtggtggacatgtcaccagtgacttctgctcacacagatgctaggtggcttcttagcacatggctatgaggacacattcttgggtccttgtgcatccaagctgaaaaagcctttaggtttgtctccactttctggttttatcgatggaaagactgaggcctacatgggaggattgaaggcatgggacggaccctggagagggtcccagtcatccttactccctatccttccatggggcaatactccccagggaccacccagcactgggacacctacctactgcatccggctccggctcggtgcccaggaaccgcccttgagaccttgaatccaccagctggaacctcttagattcaaggttctccagcacctgctcgtaggtcttgagcagggagcggtccagtgtggctttgaagacggccggttctgggcgtgagggctcggatgtcaccgggtggccctccttcagccagttccggaagccaccattgagcactgatacggtgcggtggccaaacacacggaacatccaccagacccggggagcatagaagctgcccaggtgttcaccatcatacaccaccacgtgcgtgtggttgctgatgcccaggcggcccacatactcggcgaagccagcctcgctgggcagcatcatctcgtagggcgacgccgtgtcccggcactcttctatgtcaaagaaagaggcgccgggtacgtggcgctcgaggtactccttgcgggcctctcgggtgcctggtgagtaccaggacgcgtccagcacccgcaggccgggccccagcttgccagtcctgatggactccgccagccacttggtggagaccagcgcccggtagagcacctgatgaaccatggcttcagctctgcgtgtcacctggcacgggtgggaaccaggaaagagagacaggcgtgaggaaggaagtcggtgtgtgcagtagggtgaggcctgggagaagctctttctccctccgcactcccccgggttccttgtttacagcaagccagcgaggctggggcgtgcagcgggataagtttgcagattccctctggaaagccggccccgcccctcccagccggcccgggggcccagcgcagaagcgggtggggcaagagtttccgaggactccaagtaggggcgcttcctggggcggggatctggctcctagaagttacagtactcgatcccgccaggaaagagcaatgaaagcatgcccgggatggggggcgatggcatcttgggcttagaatcccctttccttccaaggcagagggggtgggcgcacggctaggaagctccgcgagccgcgcacacgccatcgcctgcggcctccccaggcagcccgagctcgcccgcctccagagtgcccgagtccggcccgtagctcgctgccctctgccctaggtggatcaggggttcccggggcaccccgtcccactctcgcaacgctatccttccccgggcagcaggtggcccgaccggcggcccaggcgcccggccgctgcccccgccccgcactcactcgccccggacgccgcgctggcgctcgccccggccggctggagaagttggccggttcaaacccccggccgcagctccccaggcggcgcgcaccatcgcgccaccgccagagggggaccctgcgccgcccgccgccatcccgcgcctcccccgcgcggccgcttcgcgcccggcacctgccaacctcgcgcgcggggcctccgggacccgcgggggtctgagggggacgccgggtggcgcgggggccgcgcgggcctgggctgggcggagcgggcgtacccccacggcccggccagtggaaggcgcgggcagcagcggctccgagtggccgcggcggtgggctgtgccggagtctcctccctttggtccgctgcaggttggtggcgggaggaggggacagctgcgggcgcggggagggggcgccgcgccgcgggggccatggcggagccaggaagccgggag

SEQ ID NO: 28387 - DNA, 2300 bp, Homo sapien
ctgggaggcagaggttacagtgagccgagatcgcgccactgcactccagcctgggcaacagagtgagactccatctcaaaataataataataataataatattgcattatttcttccattactctcattggtggccctggaactgccagcagcaaatctaaaatcttagaatttcagggcttggtgggacttcagagatctgaggtcaccctgccccagtctccctgcttgattggcacttctcacaaaggtctgtgggccataaaggagggtgtgaaggcaggctgtgggtgtcagggaggggtagaaaccaggtgcctgtgtgattcagaagccgggatcactgtaggtgagggtgccctgggagtggaggaccccaggacgtaaccgccccaggctcatgtcagaaggatacacagctgcactgaagcaagcgtgagccgcaggctggatccagggtaccccttgaggagcagagcttgggagctcctcttggacctccccagcctggtccctcctgcccaccccctcccccaaccaccagacactaggctttgaggattgctgtgagcattttagaacaaaacctttttttaaaaagagggatgaggccagggatggtggctcatgcctgtaatctcagcactttgggaggctgagatgggcagatcacttgagcccaggagttcaagaccagcctggacaacatggtgaaaccccatctctaccaaaaatttaaaaattagccgggaatggtggcacatgcctgtggtcccacctacttgggaggctaaggtgggaggatcgcttgagcctgggaggcggaggttgcagtgagctgagatggcgccactgcactccagtctgggccacagaaccacagcctgtctcaaaaaacaaaacaaaacaaaaggtcagggttgggaaacagggaaagcttccaggctggcctctgcaaaagctagggaggggcaatggtgtcccccagtttgcaagagcccatggcgagcttttcaggaattttgccaactggttgttaaatacagctattattaaaaattgaattacatcaacttatgattaaacgggctaagttcaaaacaggcaattttttaaaaagcatgaaccttcagggaagagccaggtaaacaaaggcagctggtaccacgtgggcttcagaccagggatcaggcccggcctcaactctgggtgtgtcctccagcaactcgctctgccgctctctcctgtcttagtaagtttctggcctactcctcagggttattgtgggaattaagtcacaccacgggagtacccagcaaagtgccacaccaagcagggctggacaatgttagttcctttcactcactaacaagttattggctagtgtctcttcctggggcctctgggtcagcggggtctcgtctccctgtcctcctctctctcccccgccctctctggtgccaccaggtcacccacttccacccaaggctccccacccgccactcgccacgaccccacccggcaggccgccccaagcggacagtcacccttagtgccaacgtagcggcgcgccttctctcctagactaagccccctcttccgcccaggtcccgcgcgggagccccgcgccgagcacccccaaagagccactccctccccctccagaaaggcaagccgccacgccgcggcagttacccgggtctcggactcccggcttcctggctccgccatggcccccgcggcgcggcgccccctccccgcgcccgcagctgtcccctcctcccgccaccaacctgcagcggaccaaagggaggagactccggcacagcccaccgccgcggccactcggagccgctgctgcccgcgccttccactggccgggccgtgggggtacgcccgctccgcccagcccaggcccgcgcggcccccgcgccacccggcgtccccctcagacccccgcgggtcccggaggccccgcgcgcgaggttggcaggtgccgggcgcgaagcggccgcgcgggggaggcgcgggatggcggcgggcggcgcagggtccccctctggcggtggcgcgatggtgcgcgccgcctggggagctgcggccgggggtttgaaccggccaacttctccagccggccggggcgagcgccagcgcggcgtccggggcgagtgagtgcggggcgggggcagcggccgggcgcctgggccgccggtcgggccacctgctgcccggggaaggatagcgttgcgagagtgggacggggtgccccgggaacccctgatccacctagggcagagggc

SEQ ID NO: 28388 - DNA, 2300 bp, Homo sapien
gcatgagccaccatccctggcctcatccctctttttaaaaaaaggttttgttctaaaatgctcacagcaatcctcaaagcctagtgtctggtggttgggggagggggtgggcaggagggaccaggctggggaggtccaagaggagctcccaagctctgctcctcaaggggtaccctggatccagcctgcggctcacgcttgcttcagtgcagctgtgtatccttctgacatgagcctggggcggttacgtcctggggtcctccactcccagggcaccctcacctacagtgatcccggcttctgaatcacacaggcacctggtttctacccctccctgacacccacagcctgccttcacaccctcctttatggcccacagacctttgtgagaagtgccaatcaagcagggagactggggcagggtgacctcagatctctgaagtcccaccaagccctgaaattctaagattttagatttgctgctggcagttccagggccaccaatgagagtaatggaagaaataatgcaatattattattattattattattttgagatggagtctcactctgttgcccaggctggagtgcagtggcgcgatctcggctcactgtaacctctgcctcccaggttcaagcgattctcctgcctcagcctcccgggtagctgggactacaggctcatgccaccatgcccagctaatttttgtatttttagtagagatgaggtttcaccatgttagtcaggctggtcttgaactcttgacctcgttatccgcccgccttggcctcccgaagtgctgggattgcaggtgtgagccaccacgcccgacctaaaccgtttttaatgattattaaaaccagccagatgtaatgcatggtggttgcccctctacatttattgtttaatcttggctctaagaggtggaggtgagaagctccattataaggaacagaaaccacccagagaccctacacacccacatcacacaaccagttaagcagtggagtggggtttacattgatttggggggctctctggctcctaaaccagggctctttctactgtaaatggatgattgggtgagggaaacaaggatcctcaagaataggggacagtgtttgggggtgcacaggggctgctgtggttcccacaatagggttcctcaggaaggaacctgcagcatctgccagcacagcgccccctagctgtgctgtaacgcagataatggggatcaccccttagccaaacaccccttggcagcctccctaccctaaagaccgtgctgaggcttcctgggcccctggaaaagtcagattagtctggacttcctcctactccaggaagccttcccacctcttctgctgccaccccaggcaaacataggggccctctgtgctcaacactgaattctaaactatcctcaatttcactctctcttgcctgcagcctgacgtttccccccagggcttggcaaaggcaagagtgcctcggtgtccggcacaaggcctgaccgcatgggtgaagtaggttcctaaaagccagctgcggccagactgtgggggtgggcacagggtgtcaccctagaactcattaggccctggtcatcatggcacctggggcaggggaagtccagcctgaggggtcaaattctggctgcaaatcctgaggctgcctcctgtgaccacgggcaaggcacttattcttctaattgccagtggcctcattcataaagcaggcgtcctaatacccgcccaaggctgcggtgcctagcatgtgacctggcccacagaggcactcggtccacagatgttgttctctacctgcccccttcatttcgctggcaggactgcatgcagtgggtgtcaaggttgggcctcacacaggggataagtgagggctgatctgcagcccatactccacacacccagccatgtgccctggtgggggctcagcctctgcctggcagaaggggccctttcctctcacctgcacaacggtggcttcccagcacaaagggcttaaagtgtttgggaagtttacacccaggaaggctgtgggctggcctggcatagtgggctggcgagctggtgcactgtctctggtatgcaggaaagatagagaggagagggagggaggtgcgaagtcactgttgctgctgctagaagggccagagagagcccaggctggacaggcaaaacctggcctcgccagactcctggagcctgcacagagtgtgtgtctgagaagtccggattctggtgccagactgactgcctagtgagaagcctggcaccgc

SEQ ID NO: 28389 - DNA, 2300 bp, Homo sapien
cacaatagggttcctcaggaaggaacctgcagcatctgccagcacagcgccccctagctgtgctgtaacgcagataatggggatcaccccttagccaaacaccccttggcagcctccctaccctaaagaccgtgctgaggcttcctgggcccctggaaaagtcagattagtctggacttcctcctactccaggaagccttcccacctcttctgctgccaccccaggcaaacataggggccctctgtgctcaacactgaattctaaactatcctcaatttcactctctcttgcctgcagcctgacgtttccccccagggcttggcaaaggcaagagtgcctcggtgtccggcacaaggcctgaccgcatgggtgaagtaggttcctaaaagccagctgcggccagactgtgggggtgggcacagggtgtcaccctagaactcattaggccctggtcatcatggcacctggggcaggggaagtccagcctgaggggtcaaattctggctgcaaatcctgaggctgcctcctgtgaccacgggcaaggcacttattcttctaattgccagtggcctcattcataaagcaggcgtcctaatacccgcccaaggctgcggtgcctagcatgtgacctggcccacagaggcactcggtccacagatgttgttctctacctgcccccttcatttcgctggcaggactgcatgcagtgggtgtcaaggttgggcctcacacaggggataagtgagggctgatctgcagcccatactccacacacccagccatgtgccctggtgggggctcagcctctgcctggcagaaggggccctttcctctcacctgcacaacggtggcttcccagcacaaagggcttaaagtgtttgggaagtttacacccaggaaggctgtgggctggcctggcatagtgggctggcgagctggtgcactgtctctggtatgcaggaaagatagagaggagagggagggaggtgcgaagtcactgttgctgctgctagaagggccagagagagcccaggctggacaggcaaaacctggcctcgccagactcctggagcctgcacagagtgtgtgtctgagaagtccggattctggtgccagactgactgcctagtgagaagcctggcaccgccgggtcaggctagtgcactttttcttgtttgttttttgtttttgagacagagttttgctcttgttccccaggctggattgcaatggcacgatctcggctcactgcaacctccgcctcctgggttcaagcagttctcctgcctcagcctcccgagtagctgggattacaggtgccctccactaagcccggctaattttttgtatttttggtagagacggggtttcaccatgttggccagactggtttcaaacttctgacctcaggtgatccacctgcctgggcctcccaaagtgctgggattacaagcgtgagccaccgcaccaggccaggttagtgcacttctgtgagcctgagtgtcctccttgaaacggtgacaataatataccaggcctcttaagatcactcattcaacacatactggagagtctactgtgtcaggcattgttctaggatattgttaggattcagtggtacccagcaaggactcagtaaattccagctactgttcctattaggtcgccaatataaatgcttgatgagtgaatgaatgacttccgtctgggacttggttgcaaataaagccgagctgcatcttagggaggggtggagactttgcccctgtttgtgccttgaagccagcagggccttgccctaggatacctccacccaccctcctgcccagcaagtggaggtgaggggcgtggcctggggctctccgggaggtcatggtcattgggtcactcggagcttgtgtttatatgaggcctggcagagggaggcccctggctacccacctttgtgcccgggttcaccaccactggtttctgcgttccctggactctgccctgcacgggccgcacctcccccgccggccctcgcccatgctccagccccagccctagccccaacagcggcctctccctgcttcccttctgacatcctccctgtcgcccaggcccgcagcccgagtgtcgccgccatggcttcgccgcagctctgccgcgcgctggtgtcggcgcaatgggtggcggaggcgctgcgggccccgcgcgctgggcagcctctgcagctgctggacgcctcctggtacctgccgaagctggggcgcgacgcgcgacgcgagttcgaggagcgccacatcccgggcgccgc

SEQ ID NO: 28390 - DNA, 2300 bp, Homo sapien
ccatctcattcacccattcatgcattcaacatagtaaatgccagggactgtgctaggtgtttttttttgttttctttctttcctccctcccttccttccttccttccttcctccttccctccctctttctttccctccctccctccttcctttcctctctctctctctttctttgacggagtctcactctgtcacccaggttggagtgcaatggcatgatcttggctcactgcaacctctacctcccgggttcaagtgattctcctgccttagcttcctgagtagctggaactacaggcgtgagccaccatgcccggctaatttttgtatttttagtagagaaggggtttcaccatgttggccaggctggtctcgaactcctgaccttgtgatctgcctgcctcggcctcccaaaatgctaggattacaggcgtgagccaccggctgttttttggttttctatcgttttatttttttaaaatagagatgggggccaggcgcagtggctcgcacctgtaatcccagcactttgggaggccaaagtaggaggatcacttgagctcaggagttcaaaaccagcctggccaacgtggtgaaaccctatctctactaaaaatacaaaaattagccaggcgtggtggtgcatgcctgtcatcccagctactcaggaggctgaggcatgagaattgcttgaacccagaaggcagaggttgcagtgagctgagatggtgccactgcactccagtctgggtgagagagtgagactgtatctcaaaaaagaaaaagagagagagagagagagagagagagagagagagagagataggggtctcactatgctgtccaggctggtcttgaacttctatgctcaagcgagccttggcctcccaaagtgctgggattacaggtgtgagccaccgcacccagcctacgctagatgtttatagacatttcataacttaatcttcacagcaatgctctggggtcacaactgttgtaaatcccatttggcaagagagaaagccaatctcagagaggaagttgctcaggacacacctagtgaattttaagtagcaggattccagtacacctttgatccactccctgccaaggagaaaagctttatgcagaaagcagggcattgggtggtaacagggaaacttctcccagcacagggccaggctgcccagtgttcgggccagctgcgtgtgacattggatcagtgagaggagccccagacctctcccccataggccaggaccaggactgaaaccagtaaggagaggaagctaaggagacagcttcctcgtcagcccttgtccctccctggtcccggaccacatgaggaactgctcccttcccccatcctgaggtccacagaatgacggttcccctccgagttaactggggaataactcagaaagccacccgcagaaccaatccctcctccttcttagggaggacgtggaaaaactgagaaaggccaaaagccagaatggaaactcagttctcctgactcggatccagggcgtgctctactcttcctccttagaagtctttcccaaggatccctgacattccatggtcagggagcaggaaagagaccttggtgggtactcactcaccagcaatgtgagtagggcggtcacttcgcttctgtggcttcatctgtaaaatgggtatagcccaaaataccagactcacagggctgctgagagcttaaattcataacacatatacacaaagtgtctggcatacaggtgctcagccaacctcaagtccagctatgtcgttctccaagaactcaggtgagggaaagaacccactcccacccaccccgcccccacccctatacacacaaagggcaaatgaaaaaatatgacgaaacacatgcgggtcaatgctatggggattcctggaggggaaagtttcttcccttatcagctgttggacgacggagacggcacaaaggaaaaacaagaatgctcggacccatgggatgactgcagatttggggaagccctcattcttttcccagaggccgggagttcgaccttccccatacacagtgatttggccagagggcatcttcaccaccccagactgcgggcctgcggggaagggcgaagcggggcgggaccgggggcgggagcagcgcggggcgggaccctacccgcggcccacgcggagccaggaggcgcggactacagctcccggcctgccccgcgtgcggtccccgcccgcccccagcgcccgggaggaggatgcagacgccgcggccggcgatgaggatggaggcc

SEQ ID NO: 28391 - DNA, 2300 bp, Homo sapien
tggaggctggggtgagctatgatcgtgctaccatactccagcctgggtgacagagtgagatcctgtcccttaaacaaaaggggtgcgacgggaatatggtgtcctcctctggcagagggaggggacgagggactgaaagaagggcaaggagccaacccatcacctgggatcttcccaatccagcaaaccttctcagattttgaggacagccacctcagtcagaggtggccagcccaggacagacaggcagctctgcgctggggactcaaacctgccatgtggcctcatgcaagagtctcagcaccctgttactggtctgtttcttgcctgtttctcactagggatgctgtgaacatttgaggaagtgggcggggctgtcccacccgttgccggacgtttaccatttaccattccctggccttggccccataaaagccagtagggcccactccacatgcaggaatgtcctagcttagttgtggagggggatgtcatgcccagtgagggtcccctgcagtccctcccttccttgtatctgatgggggccgctcaacagagtcactgtggcttgacaccaaagacccttagctgggaacgatgccaaggggagctggagggagccaggaagctgggagaagggccagggcccttcacatccacctgggaggactttgagcattactaaagagccccgtttttggaaacccgctgtgtaaaatcccaagatacagcccaaaggaagccccgcctgcatctggggtgcattttatttatttttttatgtttttttttttctcaagcagagtcttgctctgtcacccaggctggagtacaatggcatgatctcagctcactgcaacctcccctgaccaggttcaagtgattctcctgcctcagcctcccgagtagctgggattacaggtgcccaccaccacagccggctaatttttgtatttttcatagtgacagggtttcaccatattggccaggctgatctcgaactcctgacctcaggtgatccactcacctcagcctcccaaagtgttgggattacaggcgtgagccacggcacccggccctggggtgcattttaaagctacacggtatttatggatatagtaagaggagatgaacttcgcagtagtctggagcctttgctctcccggtgggtgggtcaaaggctttctctgtactgtggggaaacctgcgtcaaaggccaaatacattgggatgtttgcttgaaagggtctcaaaatagagttggaaccctggagcgtggagaggggcgacattcagttgctatttaatcatgatttgttaattaacagctcatttatgggaggcatcttagattcgtggaaaaagcagggagtcagacatctagactcaacctccacttccctgctgtgtgatcttgggcaagcggcttagcctctctgggcttcagggtttttttaatctgtaaaatgcgtctgggagtgaatgtcaggtattcaaatcacactgggaaaatggggctaggaaaagccctagactgagttagtgctagaacactctgggtctcagtttccttatctgttcaatgggtgcagaactggaggtttaagtgagataaagcaggtgaagtacccacgtggtgtgggctggaggaagaaaacatgggacaatggttccacatccctgggtgacctgaaaattaagtgtgagatgtctcatgagggcacgaaatgaatattagtttttgttcccttcctctgccacaagactttgagagcagaaaggtgagagagacggtactctgtgaaggaaggcaggtccccggcccagcgcagtgccagctcaggggattctggggcgggggctaagtgcatggactgtgtgggcgtggtgggaagctccgtgaaccagaaccaggagcaagaaacagcattccttgcgtggacgggaaatgagggcaagaggtcagatgtctacagaagtctgcaccccatgtacttcagttctgtctgtgggtgcagcctctagggaggtgggtgtttaggtactgagacctccgtctgtcctctgaccatagggaagccagtgggaagcaaaggtggggttcttgagccagacccagtccagctctggtgcctgccctctggtgcgagctgacctgagatgcacttccctcctctgtgagctgtctcggcacccacttgcagtcactgccgcctgatgttgttactcttccactccaaaaggcagggaagtcctgcttccgtgccccaccggtgctcagcagaggctcccttgcaaat

SEQ ID NO: 28392 - DNA, 2300 bp, Homo sapien
catgcttcacactacatacaccttacactacacacacacctcacactatgcacacacctcacactaaacacatgcctcatattccacacatactgtgagcatgcacacacacacacacacagctgcacacacctctcatgctccatacacacctcacaccatacgtacctcaaagacacacacaccttacactgcacattcccagcacccacactgcacacacatgcacagtccatatgcccacacaacacacttcacacaccccccaccccacaccatacaaacctcacagacacacctctcacacaaatcttataccccacacacaatccctacgctccacacacacacacacacacacacacgcacattctacacatacataatctacacacacaaattccagactgtctctcttacacacacactctgggacccatatgcccacagcacacagcatctcaggcgtgcaccccgcattctggcctcaggatgtagactcgctgaaagtcagccttgtctgagacagacgcccgctgccctgcacgcaccctagaaagccctggctcccatccggcacttcggcacgcatatggctcaaacccatctccacagcaacgctgttccatagaacaacaacgcaggtcacacttgtgacttaacctgtctaatatccacatgcaacaaggggtgtggtggcccgcgcctgtaatcccagctacttgggaggctgaagcaggaggatcatgtgggcccaggagctccagaccagcctggcaacctaatgagaccctgtctctgaaaaaaaaaaaaacaagagagccagaagaaaattgcttttaataatacattttatttatcccatgatcaccagtgttatttcaacataaaatcaatataaaaattgttatcgcgttggttgacatcctgtttgcacttggccttggaaacctggtgtgcgtctcccccgtgcagcttttctcagttcagactgactcaagagccacgggtgaccagcggctaccgtcatggacagcacagcgctacggaaccaggtaggaattcatgctgcgtgcggtcgctcatgcctgtaatcctagcgttttgggaggtcgaggtgggtggaatcacttgaggtcaggagttcgagaccagcctggctaacatggtgaaaccccatctcttctaaaattatgaaaattagccgggcatggtggtgggcgctgtaatcccagctacctgggaggctgaggcaggagaattgcttgaacccgggaggcggaggttgcagtgagccgaaatcacaccactgcactctagcctgggtgacggagtgagactccatcttaaaaaaaaaaaaaaaaaaaaaaaagaacgaggtaggaattcaaataattcccagctaaacagaaaatagcatcaaaccccacccctgcctcccctttctcctctccagtccccagagtatatgggcccagcctccttttctctctctcaggccagcagctcctttagtctcgcctgtccaggtaagcacctggactcacccttgtgagcccctgcactcacctgcaccggcctctgcacagtccccagtccttggctgtccctacctcatgctctcggggaccaggggctgtaaccaggcaggcatgtcaccaggcaacgggcctcgggggagagctcagatctcccgcacctgcctgccagcctctggggtgcccatgcgggggtgggggaagatggggcggggcaggcactgccttctcctacctcctgcctgtttacctgtacttagtcacagtgctgtccaggacccagcaggaggagttccatggagcctgaggccacaggccacaggggacaagggccagacaccctggtcatggctctaggccattgatccagcctgggctggctgggtgggggtggggaggccttggcctggacaaacagaggctcctgaggcctgtgtgcaggcccggcacctatctgccgctcccaaaggtaagcgggggcctccaggacaggggaccgggatctataaatgacctagtgacagtgtccaccctaagagctgggcctggctccctgcagcctgagccacctaccctgctccgaggccaggcctgcagggcctcatcggccagagggtgatcagtgagcagaaggtgaggggcccacagagctggggaggggagggaccacgcagggtgacaccaggtgtgtggacaggcacagcatcagtgctgggtggttggtggcctgggattcaggtggcagggacaggaggaagggag

SEQ ID NO: 28393 - DNA, 2300 bp, Homo sapien
ccctgtcccatcccagccaatccataagcatctcacacttcacacccgctgcacactccactcacacgcctcacactccacacatgcctcacgctccacacacacctcacactccacacacgtctcacactacacacacgcttcacactccacacatgcttcacactacatacaccttacactacacacacacctcacactatgcacacacctcacactaaacacatgcctcatattccacacatactgtgagcatgcacacacacacacacacagctgcacacacctctcatgctccatacacacctcacaccatacgtacctcaaagacacacacaccttacactgcacattcccagcacccacactgcacacacatgcacagtccatatgcccacacaacacacttcacacaccccccaccccacaccatacaaacctcacagacacacctctcacacaaatcttataccccacacacaatccctacgctccacacacacacacacacacacacacgcacattctacacatacataatctacacacacaaattccagactgtctctcttacacacacactctgggacccatatgcccacagcacacagcatctcaggcgtgcaccccgcattctggcctcaggatgtagactcgctgaaagtcagccttgtctgagacagacgcccgctgccctgcacgcaccctagaaagccctggctcccatccggcacttcggcacgcatatggctcaaacccatctccacagcaacgctgttccatagaacaacaacgcaggtcacacttgtgacttaacctgtctaatatccacatgcaacaaggggtgtggtggcccgcgcctgtaatcccagctacttgggaggctgaagcaggaggatcatgtgggcccaggagctccagaccagcctggcaacctaatgagaccctgtctctgaaaaaaaaaaaaacaagagagccagaagaaaattgcttttaataatacattttatttatcccatgatcaccagtgttatttcaacataaaatcaatataaaaattgttatcgcgttggttgacatcctgtttgcacttggccttggaaacctggtgtgcgtctcccccgtgcagcttttctcagttcagactgactcaagagccacgggtgaccagcggctaccgtcatggacagcacagcgctacggaaccaggtaggaattcatgctgcgtgcggtcgctcatgcctgtaatcctagcgttttgggaggtcgaggtgggtggaatcacttgaggtcaggagttcgagaccagcctggctaacatggtgaaaccccatctcttctaaaattatgaaaattagccgggcatggtggtgggcgctgtaatcccagctacctgggaggctgaggcaggagaattgcttgaacccgggaggcggaggttgcagtgagccgaaatcacaccactgcactctagcctgggtgacggagtgagactccatcttaaaaaaaaaaaaaaaaaaaaaaaagaacgaggtaggaattcaaataattcccagctaaacagaaaatagcatcaaaccccacccctgcctcccctttctcctctccagtccccagagtatatgggcccagcctccttttctctctctcaggccagcagctcctttagtctcgcctgtccaggtaagcacctggactcacccttgtgagcccctgcactcacctgcaccggcctctgcacagtccccagtccttggctgtccctacctcatgctctcggggaccaggggctgtaaccaggcaggcatgtcaccaggcaacgggcctcgggggagagctcagatctcccgcacctgcctgccagcctctggggtgcccatgcgggggtgggggaagatggggcggggcaggcactgccttctcctacctcctgcctgtttacctgtacttagtcacagtgctgtccaggacccagcaggaggagttccatggagcctgaggccacaggccacaggggacaagggccagacaccctggtcatggctctaggccattgatccagcctgggctggctgggtgggggtggggaggccttggcctggacaaacagaggctcctgaggcctgtgtgcaggcccggcacctatctgccgctcccaaaggtaagcgggggcctccaggacaggggaccgggatctataaatgacctagtgacagtgtccaccctaagagctgggcctggctccctgcagcctgagccacctaccctgctccgaggccaggcctgcagggcctcatcgg

SEQ ID NO: 28394 - DNA, 2300 bp, Homo sapien
agagtgaaactggacaaatcacattatctgacttcaaattataccacagagctacagtaaccaaaacagcgtggcgctagcgtaaaaacagatgcattgaccaatgaaccattggtcagaatagggaacccagaaacaaatccacacacctacagtgaacttattttcaacaaaattgccaaaaacatacctttggggaaaggccagtcttttcaataaatgttgctgggaaaactggatatccatatgcagaagaatgaaactagaccctcatctctcttcatatacaaaaatcaaatccaaatggattaaagacttaaatctgagacctcaaactatgaaactactaaaaggaacattggggaaactctttaggacatgggactaggcaaagatttcttgagcaataccccaccagcacatgcaaccaaagcagaaatgatagatgagatcacatcaagttaaaaggcttctacacagcaaaggatgcaatcagcaaagtgaagagacaacccacagaatgggagaaaatatttgcaaactatctgacaagggattaataactggactagataaggagctcaaacatctttatggaaaaaaattatagaaatcccatcaaaaattgggcaaatgatctgaatagacagttctcaaaagaaaacatataagtttatgaaaaggtgctcaacatcattgatcatcagagaaatgcatgtcaaaactacaatgagatattatctcacctcagttaaaatgacttttatccaaaaggcaggcaataatgaatgctggtgagggtggggagaaaagggaactctcgtacactgttggtgggaatgtaaattagtacaaccactataaagaacagtttgaagagtcctcaaaacactaaaaatagaactactatatgatccagcaatcccactgctgagtatatacccagaagaaaggaaatcagtatatggaagagacatctgcattcccacatttgttgcagcactgttcacaatacccaggatttggaagcaacctaagtgcccatcaacagatgaatgaataaagaaaatgtggtacatatatgcaatggagtactattcagccatgaaaaagaatgagatcctgtctttgcaaccacatgtttgaaactggaggtcattatgttaagtgaaacaggccaggcacaaaaagacaaagctcacatgttctcacttatttgtgggagctaaaaattaaaacaattgaattcatggaaatgggaagggcagtgatggagatgggaagggcagtgggggttggaggggtggggattgttgttgggtacgaaaacagaattagatcgaatgaataagatctagtatttgatagcataacagggtgactttagtcaacaataatttattgtacatttaaaaataactaaaagagtatacttggattttaacacaaagaaaggataaatacttgaggtgatggataccccatttaccctgatgtgattattatacattgtatgcctgtatcaaaatagctcatgtgcctcatgaatatagacacctaccacatgcccacaaaattaaaaactaaaaaaaacagtcatctctgaatgctaaacggagtaaggggcttcctggaaggctgggtgaaatgggagtctcggaaagatggtgtgttgcaggctgggaggagggtgagacgctggggtcacctagagggacctgcttgtgtgaagcctacgtattagtgggtatgtgtgtgaccggatggaggcgtcagaggtgttgggtagcctgtgtgagttggcgtgggggtgatgtaggaggggagagagggagggcctgcgttcccttggctcctgtgtgcagctaggcccctatttgacaatgtgtgtctgtgtgtgtgtgtgtgtgtgtgtgtgtgtgtgtgtgtgtgtgtgccgcccccagcgtaggaggcagatctttatctggccctgggtgcttgaggagtttcaggctttctcataagcctcgtctccccgcctctccaccccaggccttgcccctctatcctctgcacaggaagtgggctggctctgggcttttagtctttgcggccccagcagccagagctcagcagggccctggagagatggccacggtcccagcaccggggaggactggagagcgcgcgctgccaccgccccatgtctcagccaggtgatgtccccctgcctccctcccggcccctgtggaccagccagagggctgggagtgaaagtcacagagaagactttcagctctgactcagttcccccagca

SEQ ID NO: 28395 - DNA, 2300 bp, Homo sapien
tccatggctgggctcaaagctttaaaacatctaatctaagataccttatgaaacaaagccaattttaaaaggagcctgtatggcaaataattatacttgctgcactttatgcaaataatgaagccaagtataataagactaaagcttattttgcaaataaattggtcctaccatgatttgtttttaataaaaaatgggagactggagagagaaaaacggtgtttcaaaaaatatggtacacctgtcatagattctagtctcatccattgtttttgagttttttgtctgcaatttagactgaccttgcttctttctgtgaaccaaacagtcatctcttgactgcttctcgtcagaaacaagagggatggataacataaaaatctggatcagtatctaattctgagcatgtattggaatcgtctagcaactccgtatcagctcatctagcaattcctgtgactaagaatgcctaacctcctgggaatgcagcccagtaggtctcagcctcattttacccgataagtcacaggcattcttgcccagttcatggaaagccttcttatttggattacttgggataattttacttattttactttgctgttgtagaatatattgctgctatactctttgtgtaagaatgcaagataagcttactcagtgcttccttaaattgaacacattaatcttccagatatcaccttttgttaggactcagagttacaaatgactctgaacacaccaacattttcttactcagttcctctctgcaccaaacccaagagactctaatagttaggcaggaatatcatcgcctctattcagcctgaagaagttacagaagatggatcttcatgcctctacaacccttaagattaaacgttccctcgtaaaagagagtagggaaatatgtcagaggtgttcaaaatagggcaactccatcttgaataggggctgggtaaaatgaggctaagacctgccaggctgcattcccaggaggtcaggcatttgtagtcacaggaagggataggaagttggcaggactggtatcacaagatacaggtcatcaagaccctgctgagaaacagtatgcggtaaacaaaccagccaaaacctgccaaatctaagattgcaatgaaagtgacatctggtcatccttattgctcattgtatgttaattaaaatgtgttagcttgctaaaacacacttctaccagcaccaagacagcctacaaataccatggcaatgtccggaaattaccctatattgtctaaaagggggaggaagcctcagtttcaggaaattcccacccctttcctggaaaactcatgaataatccacccctgtttagcataggatcaagaaataactataaaaatagccaactagcagtgcttgggggtgctctgcctatggagtagccattcttttgtttctttgcttctctaataaacttgctttcactttgctctgtggacttaccccaaattctttctggtgcaagatccaagaattctctcttggggtctgatcagtacccctctctggtaacacttgcatgatacctgaggaggtcagcctggtcattcacccaacaaacatgggttaagccctcccatgtgcctggcacaaagggggctgaggactgcagttctggaacacctaggctctgagaggcgacgcgactgtggtagcagggccaggattctagcctgtgcctggagggccaacacctgcaccttctctgctacccaccctgcctctgtgactcagagcagttaagcactttagctcagggtggactcagggctgcctcccccttcctgagcaacctaggggctcctgtgccccatgcctgtgtccatttcccaatcatcagggggcctcagactcctgcctgctctgactttctaggcctttgaatcaagcaagaccccactggatcaccaaagagttaagcaaaggaaatccctgcctccctttatctccgcagaacccagaggctgaaagggagggagcagggaggaggggaagtgggaagcggctctgccctctccctccgccctccctccgccctctctccctccatcccctcctctctccctcctctgctgggcctgggggtctgggccagcaacaagttagtattgcagacatgggccaaggagccagaggccatgcagtggctcagggtccgtgagtcgcctggggaggccacaggacacagggtgagtgaccagaggctcctcaagcttgggggctggggtcagagcctggaattcctctcctccctccttgct

SEQ ID NO: 28396 - DNA, 2300 bp, Homo sapien
cgtgcctgtagtcccagctactcgggaggctgaggcaggagaatcgcttgaacccaggaggcggaggttgcagtcatcggagaacataccactgcactctagtctgggtgacagagcgagactccatcttaaaaaaaaaaaaaaaaaaaggtgcctgggccacactcagggtcccctggggtcccagacacctcaggttctggctcacactctcctggaacccacatcctctgtcaccatcttacaggtggagaaactgaggcctacggtggggtggggtgtatcggatcctagcaggggaagagctgggatgtggcctctccaccctcctgtccgctttaaaggccagcaaatgtgtcaatatttgctcaggggaactgctggctcaacaggccccagagcctgcctggtgtctccctctgtaagatcaggggttgcctctgagctccagccaggaccctgcgcctgctcttcagaagggaggggctctccctgttgggccttatcaaacggcagctgccagagggagaacggaacaaacgcacgatgcccattacgtggtcggcagtgaaaggtgagctcctggccacgcaatcgggtttgaaccccagcgccactgcctcttagcgctgagtgcctttgagccagcctcagaacctctcgtagactcagtttcctcatccgaaaaaatgggctcccacgcccatctcaaaagcctgtcgcagggctgcggggacggctggagcgtggctctgtgctccccaggcccggcagggggcgccgcgggtcctcaggcctcgcccagtagccgcgtggtatccgacccgcagctccgctcggctggactcgtctctattcggcgacccttggctccactcggccaggctcggctctactcggctgtattcggcagcactcggccagactcggccttgttccgatctgctcggcttcgccctacgccggaagtgcaaaggcagtttcccggcgcggctgtggctccgccctccgggcgcgaggcccgggtgggccagagaggcaggtcctcgtccctcgggcccgtggcgctgtcgtggatgtaggggttccgcttgcctgggccctgggctatgcagagggagacacgaaccagggtttgagggggaagcgggtggagagggaggggctccccgagcctggcgtgggggcgtctttcgccttcgttttgcagggagaaagggagaggttggcgccagccgcacgccccagcaggcaggctctgccactgttctgtcgtgtcgggggaggaagttgctgcccctcagtgtccctgagtctcggtttcccctccaacaatcagcaggtttcccgccggggcagagggcctggcgcggagctggcgctctccagactcagtttccccttttgtaaaacatgacagcccgcccaactccgctgaacacctttgggatccgacgtcctgaaagcccaggacggggaacctggttccggagagcgaaactttccccggcccctgggcggttcaacgtgggggagtcggtagaaccaggcccggggctctcctcgtgggaggaagccggtttgtgtgtggggggtgggggttgctgcggggactgcgggggtttggaggaagaagcgagtgcatgggcgccctggcctgccccaaagttccctgaggggacgggctggtgggacgggcgggggccggggaccggggagcggggagcgtcccgggttcccgggcgcgggggctctgcccagcaggaggcgctcgcgtcttcctttgttgaaattgatctctgcgcttgaacagttagatctgtgacttgccactcagagcctacatagcggacgccaggaatcatgtttactgtcctgtctccctttttgacaggcacacattttattttttaaatacatgaagcgcgccgtgctttgtaagcgctgactgaatgtgcctattttcacaccctctcctgaccctgggctggaacgtgggcgagtgcaggatggtggccaggggcttggctcttggtcagtatgtgcctcatctatctcgtctgtaaaatggacagacgaggtaacacgtgtgcctacgtcagagcattgttggaaggattagaggagtcaagatatggaaggcccacagaatggttggggagaaaagccagcttctggaggcaggggaaagggtggggagtggctggggaagcagggcctgtaccctgggtttctgcattggggttactcctttgctgctgggagtgatagcagggtgatgagagccaccctgggcctgc

SEQ ID NO: 28397 - DNA, 2300 bp, Homo sapien
gctcccctgagcactgagcacattcttctctccaactccctgcaggagccaaggccagcgggcgtgggtggctgaaatctccccggtaacagggtctgcgcccctcctgctccctctccgggcctcctcccttaacctgcaccccgcccccaccccccacacctgctctccggccctcagcccctccctgcttactccctccttcacgggctccatgtcaccatctgtggcacagtccctctctgtcactctccctgccaccccctcattctccttcctccctcctgcctctctctgcatctctccctctcacccgtgtctcctctcctctctttccttctcgtcttctccctgtcacgcatctctcatcactccccctcattctgcctttcctcctactcacggtctcctctccctctccctctctctctctccccctccctctttctctctctctctctttctccacctcctcccgaccccctttcccctctatttctattggcttctgtgtcccttgctcccctcttctcttcctcaccctgggaagcttctcccccctatccttgcccctgcccccccaggatgtgtcctggagatggggggtgacgtaccaggctctggttgggaagtcagggccggagaccagatgggagaggctctgtggacagccgtggccgagggcctgggagggaacctgagcccgcaagcggtctagaagtgggtgccttgtggggaccctagttaggagtgccctgggggcacctggggactgggcagggagaggggacagcagaatgataaccagcctggcggcaaggagggaagccctcaccccatgggcaggtaaggaggctggggcccggatgatgtcccgaagggtggggtcctggaagcccatcctctgcccaggatgaacttgggaggctggggctggggaggcagagggtggggactcccagggaggcaggagggaggccttcctgtgacctcccggtcggctgcaggggcaggggcgttagtctcagaatctcgtgccatgattctaggatctcggaatcacagaatcgcaggctgtcagggctggagggagccagatgtatcatgtcgttggcttccccagctcacgtggcagctctcctgagctccccctccatacccggcactgtgcttggcacgcctccgtttaatctctgcaaacaaccctgggaggtgggtccgcttgtcttccatatgacgaaactgaggtgcagcggggagaagtgacttgcccgaggtcacacagcaatttggcatcatcgctgtgcagcagagcccaagcccccagcgctgggcctgtagggtgtgctcctgggatcaggccccaggcctggggtgccagtgagtcagtcggcactggcaagcataagccaggtgtctttggggggaaggccgaagcatgtagaggacaagcagagagccaggggccatcgccctgcactattcaggactgtcatggcctttgatccttctcagcctgaggccttcagaggagccagtgtggccaggaggtactgatggtttagaagtagatagaactgggttcgaattctggcttcccactctccagctgggtgaccctttgcagcttactcaacctctctgagcctcaacttcttcctctctaaaaactctccctcttgggcttcttgaggatctcatgatgtgagtctgaggcttccatccggggacaatgtcccaccttggagctctccttgttgaacggcttggctgttcacatttatggctgttctgggtgatgtcctaggttctggggttaagaaataaatcattcagggcccctgccttcaagagccagtgttctagcgggtgggagatgggcaaatggagaatgattggggtgcctggcctccctgaactgttagggctgtgcggctcaggacagccactcaccctctctgtgctgtctcctcctgaacagtcctccaaggagtccgcccccagctttcaggcaagcttgtgccaaagataaaccagacagggaggaaaagtccctccttctcaaggatgaactagatcatgcacaggattccagctctaaagaaaagacggcacctcaattgcaggtctggcttacgtgcgtggaaagctgtaatttccctgcttctgctgcctgggcccctcaaactttgacagggaagaccggctgagataagggtggagacagggttttccaggagggggccaggggttctgggaggggcgactgcatgccctggtacaaaggagggtctggctag

SEQ ID NO: 28398 - DNA, 2300 bp, Homo sapien
atctgttcatacagatttcttttggcctcgactctccttatctggtaatgtctttcctcctcctggcatagggagggcgtctttcacaaggcgttttagctcctgctttcaggaagaaaaggggaggtcagagccccctttctgcacctgctgtttctgaagtgcctttagtgcagagaaatcaatatgccagagtggtgtattctggggtggcgtgtcctgaaccccttcagtggcctggctcagacgggagcctgtggatggagagcagtggacgggttccaggctggagcagtaaggctcggtgctggggaggtgtgtggcagggggcacactgatgagcattcactcctttaaccttcgcaagaacccccaggccaggcagtcaggtgtgtacaatctactgaaggagaaaaccgaagtttaagttcagtgcacggcaggggtagagctggggctcaaactcccctgtccagtcttcagcccctataccccaacctgcaggaataagtgaatgaatacatgaggctgggtacgcctggggcacagaggagcgagtgaaatcagcagaggaggaggcccgcgcaggcggcaggaatcaaggatgcagtgccaggtgggctgcggcgagagagctttattctgagggcagtgagaagccgtgggtaggggtgggtggtcagtgccatggaaaacccacccttgaccctgaggacacgctcccaggagcccacccacacctcatgaacttgtacggacaaggacaatgggaggctgagacctggagcaagggccttgtcccgggcacaaggcaaagggacgggcagcgttaagagaccaggccggctccggctggaagtgggtgtgtcctactgtgtgctgccgcatgcatggtggcacctctggatgcattcaacttccagttctctgcagtgccaggtacctagtgacaaaggaggtccagccctggtcccagggaatggcccagtttggaaagcagcctaggtacagcctggcacatagtaggtgctcagccaagacgtgtgtccttttcccttccgtctctgactgttcctttccttatcactcctgtgctgaggcaggaatcagcacaggcaggggcacggcatcccaagacatctgggcctgtgctcaggactgtacggcagagtctcttagaccaaagatcagtaaatatggcccacggggcaaatcccacccactgcctgtttttgtacagcctaggagctgagaatggtttttacggatgaacatttgcaatcggtttgatgaaacactaactctaaactccaattaagcaaaaggtgatgtctgtaaaaagaactctattcttctcatgagtggacctacattacaaaatactggcctcaattattattattctattttgagttttgtcagttacaaaatagtaaaaatctgttttctcactgcacaatgattttgccctcaaagcctaaaatattggttctctgttctgtccttccactcctcaccctgcctggggctctccagatgtaaccaatcccaggactaatgacccccacccggcctccccagtggtccgtgctgcggccggtgtgcccgactgcagggctggactgtggactcccgggctggccagccccacacccagccttgccttgggacacagctgctgccccgggggacctgtgccgcagtggcctcacgagctgctctggctactggctggcagcctcggctcccctgagcactgagcacattcttctctccaactccctgcaggagccaaggccagcgggcgtgggtggctgaaatctccccggtaacagggtctgcgcccctcctgctccctctccgggcctcctcccttaacctgcaccccgcccccaccccccacacctgctctccggccctcagcccctccctgcttactccctccttcacgggctccatgtcaccatctgtggcacagtccctctctgtcactctccctgccaccccctcattctccttcctccctcctgcctctctctgcatctctccctctcacccgtgtctcctctcctctctttccttctcgtcttctccctgtcacgcatctctcatcactccccctcattctgcctttcctcctactcacggtctcctctccctctccctctctctctctccccctccctctttctctctctctctctttctccacctcctcccgaccccctttcccctctatttctattggcttctgtgtcccttgctcccctcttctcttcctcaccctgggaagcttctcc

SEQ ID NO: 28399 - DNA, 2300 bp, Homo sapien
tagctgggcgtggtggtgcatgcctgtaatcccagctacttgggaggccgaggcaggagaatcacttgaacccagggggcagagtttgcagtgggccgagatggtgccactgcactccagcctgggcgacagagcgtgattccatttcaaaaaacaaacaaacaaacaaaaaacaacaaaaagcaaacattgagtggcagcatagggagagaggtaagtttattctcatcaagactgggaggaaaagttacacagcctcaattacctttccaaaggacaggtacgggtaggaaaaggattaagagacaatctttttttcttcttgttaacttgtattacatttttaaaaaatataatgaatcagtaatgaaacaaataaagaaacccaattgcaaatgctgtgtgactttgggccagtcgcagactgtctctaggtctcagcctccgaggaatgacatggagctggaccacaattcccaggttctggggtttgagattgaccttacctccgccttgcctgctccccacaggtttgacaactattcagccaatgtgatggtggacagcaagccagtgaacctggggctgtgggacactgctgggcaggaggactacgaccgtctccggccgctctcctatccacagacggtgtgctgctcccacctgccttgcagtcctgacctttgctgtctctgttccctctgcttgggatgcccttccagccagctcagcctgggaaaccctacctctccccttaaggcccagctcagggagtctgcctgccttgcatgtcccaggcagagaagggcttcctcttgcactccctcagccctgcattggttcccggtcctcaatgtgcccatcttcccaccccattgcctcctgggctctggcaccccctgtttccagtggtggggcaggtggattctgcacagggccccaggaggcagcccagcatggtgagccctgggagtgctgggggaggggagaggtggaggatgcctgcaggtggctgctgggtcctcgcccttcctccagggtatgcagggaggcggctaaggccggtaatcagatggtggatagtatatggattggagtatggactctagaatcccagatcctcccctcaccagagtgcacgttggcaaactctttaacctctggaagcctcactttccctgtctgaggaatggggctaccagcagtgcttgctgcagagtgacatgtgaggataaccacttcgcagaggccctggcctttagtgagcgtcctaacaaacagcagcctcgtggtagaggcgagaagggtatctctgctctgcccagatcctaagtccccagcattccctggggtgttccaccctcagggagccccaagctccacctctcggtggctgccatggtgggacacctctgggccctcctcactagcaacctcgcttgctctgtccccaggacgtcttcctcatctgcttctccctcgtcagcccagcctcttatgagaacgtccgcgccaaggtgagctggacagggtgggccttgggggctctggggcaggtaaccctgagggacagagggaggaactggtgactctaggctggtccctggggcagcagaggtcgcatacagagagggtccccagtgccaaccagggctggcagagggacttgagggggtaagattcagaggacctggggtggggggtgctgcgatagttagctatacccccactttccatggctgcattctcctcctccccacacaacctcatgtccgcctccgattgtcacataacctcatgtttgcttcttatgtctgcacaaaacctcgcctcctcctttcctacaatcatgcgccccctccttcctgcacaacgtcgtggcctcccctccctgtgccacctcacgtctctctctcctcaccgtcgtgcccacctctgatcttctggcaacttgctgcctctcctctccctacaccctcacactccctctgatccccgcacagcctcgcgccccctcttgacccatacaaccttgtgtccccccacccacctgcccagtggttcccagaagtgcggcaccactgccccagcacacccatcatcctggtgggcaccaagctggacctgcgggacgacaaggacaccatcgagaaactgaaggagaagaagctggctcccatcacctacccgcagggcctggcactggccaaggagattggtatgggcctcgggctcagaggggcgatctggctgcaggggaggccctgacttggcctcgtggtgtgattgtaaacacgggc

SEQ ID NO: 28400 - DNA, 2300 bp, Homo sapien
ggggtttcaccatattggccaggctggtctcaaactcctgacctcaggcgatccaccagcctcggcctcccaaagtgctggtattacaggcgtgagccaccacacccggcctgatgttcttttttttttaaagctaatttaatcgtttaaattgcttcaagaagctgcatttatagatgaaacacttgtttctttttcccccttcaagaactagaaatgaattcttttaaaaaatgtattaaaaatttttaatttgtaattgacacataataatcgtacatatttatggggtacaatgtgatgttccaatgcatgtatacaccgtataatgatcaatcaaatccaggtaattcccacatccatcacttttaatatttatcatttctttgttgcgacatttgaaaccttcccttccagctgtcttgaaatatgcacgagattgagatttgctgtagtcaccctactgtgtaacaggacaccagaacttactctttctgtcttactgaagctccacaaatgttctttttctgttccaggttctaatctggggtaccgcactgcatttaatacattattattattatttaaattaacacagaggttgccccgtggactagcagtggatggaaaaagaaaggggcatagagaagtatccagaacaaagtcctcaggtggcctgtgagggaggaagccccagggtggtcacggggcacacctggcctctctgacccacagtctcagcacagcgtatgcaaagtgcagaggaaagacaccggtttgctggtagctttaacagttgacttgcccagcgcttgaggaagttgcatttccctttctgtaaaagtcaatgttgtgaacccagtaacttgtgtgaattgctctgaaaaggttcagcctccgggtgcctggtgggaatcctgcgctctgccagccagcaggccctggccctctgcaccctcctttggagttcctggcttgtcccgagtgacgagtccagggtgggtgaccagtggctcttcctctccccgcccctccgtcccttccccccggagctggaaaggtgtgtgggtggggagtgatagcaatgaacagtgaacttggtgccaactggggtggtcgaatattcacccgagtccacgtggagagccctcgtggcgaagggagcgccctgcaagctgcagaactcaggttttgtcccttcaaacagcagccggagccaatagctgcagcttggagaagagcttggagtcacctgagcctagggctggtttcaggctaggtggtcaaatgacttctcagaccctcagttttcgcatcagggaaatgggccacagttctagctccagggtgcctggtcccccagggcggcctcagaataggcttggctcctgtggggcactgcccgccacttcccctcaatgtgcccttctccatcagcggaccccaccttcccttcctgcctcatcgccccacatcctcccacccagggactcccacacaggcccttgcctgggggagcctctgggtcctggctcaagcaatctccccccacctggagttccctctttagggcgcacgtttcaagagccagctccaatgctagcttgcaggcccccagctctccatctcggtaaccctgaggtcctctctgtagattcccccgttgcctcaatcacttcctgtctctgttatgatctcccatgatgaagtcatgcctccctctctgcaaagggtataaactccagggaccagctgtctcttgcatcctgggatcaccagcacctggtactgtgcctggcacacagcaggcactcattaaatgctctgcttagaattgaagtgcactgaattcttggaaccctcaagttcttggagaacagcctctgggcccgccccgtggacaggaagtgagcctcccagcacagagggcccccaggtctcctgctggagcctccacgcagggggcctgtggggatggccagggctcagcccagcacctgagcgcccctcccaccagctgctctgccagaccgcatgctccgccccctgcaaacgaccgtggggagagcagcttgagtaagttccccttccgtttcctcctgccccaccaccgctgctcctcagcaggcgcctcaccagcctccacaccccttgcgcccgcagaaacgcgcctggccctgagctgtcaccaccgacactctccaggctccggacacgatgcaggccatcaagtgtgtggtggtgggagatgggtaggtacctggctggacttcctcacagcccccaactgggatgccctg

SEQ ID NO: 28401 - DNA, 2300 bp, Homo sapien
gtttttggagacggagtctcactctgttgccaggctggagtgcagtggcgcgatctcagctcactgcaacctccgactctctggttcaagtgattctcccgcttcagcctcccaagtagctggcattataggcacccgccaccatgcccagctaatttttgtatttttagtatagacggggtttcaccacgttggccaggatggtcttgatctcctgaccttgtgatccacccgcctcggcctcccaaagtgctgggattacaggcatgagccactatgcccagcccacatttctagttttaaaatggccaagggcatggtttgtggtgcctcaggcccaaagcagttgagaaaaatctagtttaccatggaaataattgtaacaagttttccagaaaagaaccatgagttatacaagaacccaggtggaggcagggcaggggagaagcagcggggttcaaaaatcctgagcacactagacggggacttagtaggcctggcttctgggcctgaattggcactcactcaagttccaacttggtcaagtgtttcccagaaataagcctcagttttctctccgaggaaatgacagcattggatttcttctgtatcagcaagctttggctgcataacaaagcatcccagaagttggtggcttaaaccacaaaaatgtattatttcccacagtgctatgggtcagcagtttgggtgggactccgcttgatggttcttcttctggtgtcccctggcctcactgatgaggcagcaaccaggggacagccaagacagcccagcctatctccttgtggtcctccgtcttccaacaggctagcccaggcttgttctcatggtagccaggcagggggctgagagcaagagcaggagctgcaaggccttttaaagctcagcctcgaacatcacggcacatcatttctgccacgtgctattggtcaaagagatgcccaaggccagctcagcttccaaggaaggagaaatggacttcgccccttgacagcagaagcggcggcatagtgaaaaggaggtgaacttgtagctagctttcacatcggccgtgatctcttccatgttcccttcattcattcattcattcattcatttgttcattcattccacacttgcacaccctctatgtccccagcattttaccacacaccagaacacaaaaggtaaccttgccctcatggggcctggagagtaatggggaaacagatgaataactctgcatgtgtcctgaagttatagggaattcacatttaatttatacctgtttctttacagcaaagctttttgcagaaaggatttgaaccaacctgccagaaaaggcacaaggaataacatgatacattttaaccaaagaagataattaaaatcaaaggagaaagtgtttattgagcacctactatgtcccaagcatctccgacacatcctctcactccatggtttccatatccccgagttagtgttattcccctttcagagataagcaaagcgaggctgactagccctagctgagagtcaaacagctgagtcaggccccaaagttcacatgacatcatagaatagctgtcgatgagctttggatttgacgatgagtttcccagcagcctgggggagaaggaaagtggaacatattacccgattgttcactagacaagaaaaagccagatatttctttgaagggaagcaaagcccttcctagcagtgaattcatttgtctcttctcaagtgggagttggaagagagcttgtggggtggaacacagggggccctgctaggactgtccaagttgggcgctcctatggcatatatgtgaggaggctgccacgtgaatgcccatggtcccctggaaaatgttcgtcctcagtgaacatcgccctcggtgtctgtgcatgtgtacgtgtgtatgtgcatatgtgtctgtgtgtttctttctgtctcactgtctttctcttttttatctggccctcccctcacttcatctgtttgtttgtttgtttgtttgtttgtttccacctctgtccctccctggcaaaagtccctgctgctcaaaactctgccagtttttaggaagtgctgttttgtcaaaagcctgcacacgagacccccgtgggccaggactgacttcctccccacacagggctgggcggggcaagcaggaaggagcctgttacagtcaaggtgacgcatccttgccgggccagcccgaacagcagctgggtcggcaagcgacaggagcacgggtcatcttttccccagaggcgtcggaatggacctgtgcc

SEQ ID NO: 28402 - DNA, 2300 bp, Homo sapien
atgaggaagctggggctgggaaggtcaagtggcttccgcgaggtcaccaggtgggaagttacaggaaatgaggaaggcctggactgagggcaaggccgctccaaagccagggctcccctcccaggccagaccagcgctggtgagccgtgaaggtgtgtgttcctgcatgggaggacaagggtgtgccctcagggtgtgatatgggtgggacagatgtgaacacaccagatggcagctggaccccagaaggacagatgtctctgtcctctccctcccccacctcaaccccctccaggaggtgggtgccagcaagtatccaagtgtgtcccaccctcccttccgcctcctcccccagggatcccatcaacctgcaggtcctccaggccttcgtggactgccacgagttcgccaacctcaacctcgtccaggccctcaggtgagtagtcctggggcagggtcccggccctcaagggtggcacagccccagtggctgggggtgtcgcgatccacatagctgacagcacaaacaaagggttgggagcaaagaagaggaggcaaggaacaagaatgacttcatgatagtactgcctcacagagctgagctggaccgcctgggaaagggcctagttccttgcaaatagcaaatactgccttcttagttagaattctatcatgcccatatttaatcattctaatcattattactttattatggtcattctcctactttttggattagtgcatgttttatttattttataagactgcttagcatgtattccaattattatgacttattagcttctaattagggtactgtttttggtactcatttttacaactgcagaggcagtccaattatcagtttgaagcacaaactctggagccagactatacagttcaaatcccagctctgctgctcacccccgtgtgaccttaagcaagccatacacatgcacaaaatacaaaaattagccgggcgtggtggcgggcgcctgtaatcccagctactcgggaggctgaggcaggagaatcacctggacctgggaggtggaggttgtagtgagacaagatcacaccactgcactccagcctgggcaacagagtgaggctctgtctcacaaaaaaataaataaaccttcctgtgccccagtttcctcatccgtagaatggggataataatagtaccaacttcacagggttgtgaagactaaatgggaaagtgtttaaaactggtccacagtgagtgcttagtaagtcttgatgctgcttgaaaactcagattccgagaaggagcatctgatctgggctttggagggtgagtaggagttcacaatacagagaaggaagaagccaccaccatccagtgttctctaactcccagctctttaagggagaggggtaggtgacttgggagtctcccatattcattctttcattcattcattcacatattcattcattcattcacttatttactgagcctttgctaggtgcccaggactgtgtgaagcccaggaggagaagtgagagatacaggcccagttctcaccttcagagaacttagcttgaagctgtcgaaaccaccaacttccagagctagagggaagtcgaggttccaagaaagggagccctagcaaggcaaaacccctgccccacctcttccccaactaggtcccacagccagatctcagggcccaaaggccaggtgcggggagccacagaccccggggcaggcagaggccgtcccccttcccagctgaggcagactgggctgcagtcagtgctgggattcagacctgcagagcggggcgtgtgcttagttccgtattctgcaagaaaaggcatttcttggctacctcccgcgtgcttggggctccctggtgcccatcccacttccccgtcagcccagatgacagttgcagattcccccatttacaggatacagagactaaacctgggagaggcagggcagcttgtctggggcccgcgagggcccacccactccactgcccgtggccccgtttctcccccaggcagttcctgtggagcttccggctgccgggcgaggcccagaagatagaccggatgatggaggcctttgccactcgatactgcctctgcaacccaggcgtcttccagtccacaggtgccaggaggggagtgggacccagggctccgggaccccttcagcattgccaggcatagatttcacagaccccctcaggtttcccccaggtacccagaccctggcagcccagaccccttcatgagccctcactgagcactgacttcattgc

SEQ ID NO: 28403 - DNA, 2300 bp, Homo sapien
tgataacaacagagaaatacaaaacaagacaatgaactttccaaactcctgatcacttttcactcatgagattggcagaaacctaaaaagacgatgatattgttagagacagtgtagtgctgtggttcacatccctcctgctctggacttaccagctgtgggaacgtggacaaagtgtgtaatcctctgtgcctcagtttcctcacctaaaaaatgagtgtcaaacccagtactaccccacagagtcattgtgagggatcagtgtttagaacagtgccccatgcagagcacacataagtgtctgccgtgactattactatttagctgacgtacctgaggtgggtgcgcaggtgtagaggaaagacgttcacgcctggccaggagtgtgaaacgtagacagccatttcagagggctcttgatgtttcaaaactttcaaactacatacaagactccccccaaggtgccccctctaaccctgaaattccacctctaggaccctgaatcccttggggtcaaacatgtttcagattttcggaaggtaacttggcgcatatgccccatcctgtgttactcttccccggggtctggggctgccccatgctgtagaccctctggggtgttcagcccacctcaagtgcaactggggaattctggggagtgaaggcccttcgggtaaccctcagctggtagagcccaggggcaggtgggtaagcgcccagcagcctctagtccttcagagaagcaccccacattgctcaggaggtcctagagaagttgaccgccccctcctgcagtgccctctgcagtgacctccgtaacgacccttgtattatcttctcccaacccccgtctcactctccccggttgctccctcctggattctggtgtcaccttccaaaaaaacacctgcactcaagtcctgtctcaggctttgcttttggggaactcagcccaagacaaccccctgatgaaacacattatttcttcagcaagctgcacacatatcacagcaagtgggagaaacaaaagacgctgaacactctcacgtcaatttgggtcaggtttgctggcaaataggtagaagaaaagacgtatggttctgggagcatttgggtttcatggctgtggatatgggactggactgcactctgcggagcacaaaggcaacctctcttgctgagttcactcggtgtgagtggagaggctcccccggccacggactgcactcagaaggcctgagaccacagcagtcaccaggagttgggccctccaggagctgatacttgagtgtagaagatgtctgctggggctcctggcaacacttgggaagggagccctttgggtggggagacaaggccacaatcgatgggtgctcagggatggccccgctgcagaggtgaggtctgagaagggacttgacaatgagaggaagcctaggacgccagcaccacctccacctcgccaccacggcaggtgctcctgatgggtctcagggcgagcgcaccctctgccagtgacaggtcaggtgtgggctgtgaccagtctcagccaatgagacatcagggagggcccgcaggtggcctcgggcccggccagcctggatgctgaggccgacctatgaggctgactcgaggtggggaagagcagaacaggcaaacggccagtgctcaccctgctccctgccaggcagcactgtggatgggcttgtggcccacgtgagactgagcagggatttctgtcacttgcggcagaaaacctcccactggctagcaagcacctggtccatcccaagggacagactgacaggctatggcttgtccccatcatggaacacagcagagcgccgaaaagaaagagggggtatcctcccgtcctgaaaaggaaccagcgacgagagatgtcatctgttctcaaccaggggtaattttgctccctaggtaggttgccaggttaaggaaataaaaatgcagggcagccagttcaagctgaatttcagaccgtgcatgttaactagatgtcctgtatttactgtggcaaccttacccccaggggacatttggcaatgtctggaggcagttttggttgtcactggggatggttaggtgctaccagcatctggtgggaaggcaccgggggtgcttttaaacatttcacaatgcataggacagctgaggccaaaaaaaaaaaaaaaaattatccagcctaaaatgtcagttgtaacaagggtgagaacccctgtattaaatgaaagatagcaaaaaccccataagaaccccataagatatggtaggatctcatt

SEQ ID NO: 28404 - DNA, 2300 bp, Homo sapien
acctctgtgttttgctactggaaggccataagctccaacagagggttagctgcacctgctgtgccctcccaggaaggagcagacccattgtgctacttcccagaaacagcttcagaggagattctccaacagaggcaggcaagcccaggtgtgaccttgttccggcccaaggcaggaggcctccccgcagaggtccagggcgtggcacccacacatccctcgctccaccgggcctccatctcccctccctccctgtggccccccctgccctcttttcctggtgtctgccctgctggcctgccccagaccacagcccagctccaccatgctcatcatcatcacaaacccagaccttggatggcaacattttgtgaatacttccctcccgcctgggaaaaactcatcctgagcaggacgtgggacacagatgcaggccagcctccgggtgggctctccccaagctgagcagttggggctctggcctggctgggaggccagagacccgagtcttagaccccgctctgcctcacaaagaaccacatgaactgggtcttcaaggccagttcccctcctggatcatcagagtcctgctctttggaagggcccctgtccctgcagtcagagagtctgaggtttcctaaatatcttcacgcagaaaggatggggaaatggcaagcgcaggcccctaactcctgctgctgggaaccctccctggggcccagcccaggcgtgctccttcttcccacgggttcctttctcaaagcccccaccctctccctgaagccccccacgaagccccaagctcctggcctcctacactcagcagtgtgactgatcctccaccccagctggccagccaattcaccaggcccgtctgggagccctgacttcctcatctacaaaacgggaacaagcgggacggacagacagtcccttccaccgggacaagagcccttgaggaggcttccctggggctgccctccctggcatggaggaggggaaggaactggggacaagggaggtggcagtggagagagggagggaggaagggaggtggcacatgggcccaatgctcagaaacacaggaggtgggtgtggggcagggctgtgtcttggtggcacctgttttgggtctgtttttgcagagctgacccctccctgggtttcaagagctgctcgtcagatcacaacagacagaatgtgggaaagcagggcatcagagagggggcgggggagtctggacaaactggcacatacacgacagatgtttgctcagaaaaatacagtaaaatcgtcatgcaaatataacagggagtctgcttcctcacacccctggcttctctgcctgcttgcttttctcagttgtgccaagggggtgtgaggaggggttggggggcaggttttgggggccgggggaggaggtctgctccgcgtatccatgccgccccctcccctcctcgccccaggagaacagtcttttctttgcaaatgtcaccctcaaagtgagccctgggcttcgttaaccccaaagttggtgtgagagaggtactcagctgagcccgagcctcctagccctctgctgtcctccctcaccccctgcccccagcaggaaggtcgttggggtccccaggggatggcactagctttcctggtcagagcccctgcccaccaacagtgccggtcttggacccattccagtgcctaccctcgcccctcagtcacactccccaaatctcaggaaacccatgtgggccacaggccctagactgggggtctctggcaggggcgtggggagagccggggccccccaagctgaggtgggtggcagccaagcgacatgttgctaggcgggcaaagctgctagtagaggcgtccccacaccccgctgggccagctcccacccagaggtgaaggatgatggactccggcccatcagcatcctgactggtcaagaccccagtctcaggaccgcagatttgcttcccaaaagagctggccccaggagctgctgccaggctggccctccctcaccaccctctgccaccgcctacatggacagagaaccccagagcccaacggtcactctgggcaccaactgccaggcacagggttaccatggtgacagaggctggctgggaggggctggggcgccacgaacccagcctgctcctcaaccctctctcgggtgggggcctcactgtttgtgctttgtttgatgttgggtgggggggtcagaaagagggaagtggccattgccacggaaacatgggagcccctctggccagggggccaggcctgga

SEQ ID NO: 28405 - DNA, 2300 bp, Homo sapien
tccaggccaagtgtcggaatggctcgctgcccgcccggcccgtgagccaccccacgccctactccaccgacgcccagagggagccagacgagaactcgggcttcaaccccgacgagatcctttcggtggagccgccggcctcgtccaccacggatgcgtcggcagggccagccatcaagctgcaccacgtcacgttcacctcggccaccctggtggtcatcatcccacacccctacagcaagatgtacatcctcgtgcagtacaacaacagctacttctccgacgtcatgaccctcaagaacaagaaggagatcgtgacgctggacaaactgcgggcgcacactgagtacaccttctgcgtgacctcgctgcgcaacagccgccgcttcaaccacacctgcctgaccttcaccacgcgggaccccgtccccggagacttggcgcccagcacctccaccaccacccactacatcatgaccatcctgggctgcctctttggcatggttatcgtgctgggagccgtgtactactgcctgcgcaagcggcgcatgcaggaggagaagcagaagtctgtcaacgtcaagaagaccatcctggagatgcgctacggggctgatgtggatgccggctccattgtgcacgccgcccagaagctgggcgagcctcccgtgctgcccgtatctcgcatggcctccatcccctccatgatcggggagaagctgcccaccgccaaggggttggaggccgggctggacacacccaaggtagccaccaaaggcaactatatcgaggtgcgcacaggcgccggcggggacggtctggctcggcccgaggatgacctcccggacctcgagaacggccagggctcggctgcagagatctccaccattgccaaggaggtggacaaggtcaaccagatcattaacaactgcatcgatgctctcaagctggactcggcctcttttctgggaggcggcagcagcagtggggaccccgagctggccttcgagtgccagtccctccctgcagctgctgccgcctcctcagccactggccccggggccctggagcggcccagcttcctttcgcctccctacaaggagagctcccaccacccactacagcgccagctgagcgccgacgcggccgtgacccgcaagacctgcagcgtgtcgtccagtggttccatcaagagcgccaaggtctttagcctggacgtgcccgaccatccggccgccacagggctggctaagggcgactccaagtacatcgagaagggcagccccctcaacagcccgctggaccggctcccgctggtgccggcgggcagcggcgggggcagcggcgggggcgggggcatccaccacctggaggtgaagccggcctaccactgcagcgagcaccggcacagctttcccgccctgtactacgaggagggtgccgacagcctgagccagcgcgtgtccttcctcaagccgctgacccgctccaagcgtgactccacctactcgcagctctcccccagacactactactcagggtactcctccagccccgagtactcatccgagagcacgcacaagatctgggagcgcttccggccctacaagaagcaccaccgggaggaggtgtacatggccgccggtcacgccctgcgcaagaaggtccagttcgccaaggacgaggatctgcatgacatccttgattactggaagggggtctccgcccagcagaagctgtgaccccccccttcctccctggtgaggtcggagccagagggctgggggccttttgggggaagggtccaggcggccagggcggggagcagactcgggggccaaggcccaggagaggacgcacatgcagacccgcacgcacgcacgcacacacacacctgaccaccacccgactgtgaacaaaccaacatccgacaataacggacaggaaaacagagacacattttccttaaagtttacaaactgataccgaaaccagtcgtctttactgtgctgcccagggactctgctggggtgtgcagggccggggggctggcggggggaggaaggaagccaagagagggtgtggggtctggggggtctggggctagaaacaggtgtgggggtcaagaaagctggagtagagagggactgaagcccctctagggcagggagagggtcccttcccaagctgggagtcaagtcacctgcagatttagcattagacatcgggcaatgtctccttccactttagagagggggggaaactgaggcccagagaagggagttgacaaccccagggtc

SEQ ID NO: 28406 - DNA, 2300 bp, Homo sapien
gactccctgttcacctatcaccatccccacctcggacttcttgtgggattaacccccgacccctcacccatttccctttcctctgttccagccctctggggctcagtgctgtaaattggttttgctttaatggcaaaggtttaaatttttttttaagcactcttctctttcctggactttcccaggaggaggaggaggagagagaggcagaggtggctcttgtgaacagtctctggctttctgtgtccaaacgtggatttctcagacctcatcttcacatccctggcccctgcccagggcagagggagggagaactgggctgttcccatagttgagagcacagggtgggggctggggctgaggtctgtccaaggggctgtgtccagcttgctgggcaacctggccaagtctcccctgagtctgtggctcagtttccccacttggaaagtgagggttgatgcagatggtctgccgctgtgacccccgtggtgcctcccctgcccttctgcatcttgcaaatgggcggcatgagtcccctgcttcttctcccccatcaagtgggccagaaagggacccactttgtagctgtggaaatagaagatgttgtggtttacctagctaattgggctgagcagttgtggggctccaggcctcctgacatctgacttgggctcagtgccttaggaaccttgatcctggtctaggctgtgctatgttagttggggcaactccctgtccctctctgggcctctgactctccagccatggaaggggagctgggcctcagccgtgctactccagaaggctggccccctcccaaggatcaaggtgctccagggaaggcactttgggaagatgatactggggtacctctggcctcccagagtctggcctttctttcccttggctctgctctgcctgtgagatgaggtctccccacgccctcccactgtgggagaccccggcttctgtgtccctctgcttggggggccccacagctgcgatattctgctccccctcccccatggaagctgagacaagggaattatttttggaacaagagcagttacacaacaaatgaattatttatctttgggcatggaggaaaggaggcattttgctgggcttcttaattctttttgtggattcaggggtgcccgcttgggtacgtggacacgtgtgtatgggcctgcttgtcgtgtgcagattgtaggtgtgcttgtgtgtgtgtgtgtgtagctgtctgcgtgtgcatgccatggaggtctggctcatgtgggggcatgtgggtctctgtgcaggtagggggatgagcatggcctccagggtgctgggggtgtgtgtctgcacctgtgctcacctgttctctccagtgtcccttctgtgcccatgatcctcagtctctgcccctactccccctattcttctgtctccctccgtcccagcccctgggccccctcctgcctcttgccacccaccaaccccctgcttctttgatgtaacagggacccccagagtgcttgctggcacagaggccctgggacggggtgtggagaagggatggggggcctgcgctggagcttgacggggctgctctgagccctcacactgatctgtcacccgctctcgatgctgcctttcaggaaccaggtgcagatgggtctcttccttcctgcccccatctctctcactcctggctcagtgcggcactctccagcctcctgtgggaatcatctgaagttctgagcccggaagccaaggaggaagacgaggaggaggaggaggaggaggaggaggaggagggagaggaagtcaagccctgagaacccttgcaccttcctagcaggagacaaggagcaacgctgcggtggggagcaggctgtggggcccccacccccagccctagccaggcctagtgcctgctgtagcaccctagaagatccccagcagttggcactagctgtacccaccttgcctggggcccccgtgctgggggtcgcccccaagatggtggcggccccagggaggactgtactgccagccccagcctctggccgctaggcaccccctgccttgccctggcccctcactccgaggccagcgccatgctgcgcctggggctgtgcgcggcggcgctgctgtgcgtgtgccggccgggtgccgtgcgtgccgactgctggctcattgagggcgacaagggctacgtgtggctggccatctgcagccagaaccagccgccctacgagaccatcccgcagcacatcaatagcaccgtgcacgacctgcggctcaacgagaac

SEQ ID NO: 28407 - DNA, 2300 bp, Homo sapien
agaggaaaataaattaccatacaccaggatcttgttattcaagctaattttcaaaggaccacagctgtcacgctgagataattcgttaattataacagccattgtgctttggcgctgggagagaaaccgaggccggggaacaggctgaaggtgggggtgggagcaggctattggggggcctggacatcagagaggggacagggacagaggcaaagaggggtgtgttgccctcgggactgaaaggaagacaggccaggccccatccttcctcactgtcatggttgcggtgggtaatgaggtcctcctgcctgcctggcgtgtgccacggtgccacgcgccagaccctcacagcgatacctgcaggaggcagcttcctggagctgtgaccctgcccagaccctggcctgtggccatccccctccacggccctctgagctggtgcccttcttgtcccactttacagaagaggaaaccgagacccaggacagattagcttgccaggaccacggggtgaggtggcatagcctggattcgagctgaatgtggaccctgcgctttggcagcacgttagggagggccggtcttggtggactggccacgcggagttggtggccacagcagctgtcacatagatagcctcacgtttgggctgtggtttctgcccagccggcggccctccccggggagtttccggggctcgatgtcgacccctctgcaccgacagagcctccttgttctctgctgctgcagctgcaggccccccgtagcctcagaggcggccgtcagtgtgggctggaccctcccacctcctctggagaaagctggtctcagggccagggggagggaatttgggccaccccagctggtgtccatactgaccccttgcgatcgcctggttagaggttctgaagcgacagaagctgaatgggctgtggcctcaggaggggtttctcagcctgggcctagagggctccaggaccctgggtgctgggccatgctagggacagggggctgggggcgtagcaggcaggtgtcccagtcctaggtgagcagagtgagggagtccatggggagaggggtgggaccaaggagccattccagaaaccccagggccccttggtgagctgtggtgtggcttcaggaactcaggtctcctggtgtccacagtggccatgcttggaaacagcacctaggctaggccagctggcagtgttctgtggggtgggaataatgtttgggagagggtaaccctcaaaccccagtaggagtcccaaacttgacccaggcaggagagaagtgggccccacaaggtgacaggtgggcctggggtggctgtgtgggaactcccttggttggggacctctccccagtggggccgcatggagccaaggggaagctgtcagagggtcaggacagcttaaagtcctgtagaattggtgacccacagaggccaagacacaggagacttttaggaccaaataaatggtagatacatcctagaatccttgagccccagactcataactggagacctccctccctaaatgaccgatccatgctgttagtatcctggtactaaaacccaggagccatgggtcaggaggataggggaggggggctcgaggtcaggcaggggtcaagtacaggaggcagggatcggggcacccttgggtcccaggctgagaggctcataggaatacccctgacaggctgggtttctacgtgtccccactctggggttccccccttgttgctggcctcataaactccagtgtgcaggggtcagctggccacctaaaccagagaggcagggaggaggttggatgctgccccggcctgtgccactgctgtgcctccggggacgcagacccagggaagccagatcttccctgtatctcagtggattccagaaatgaggatttttgaaataaaatctgccaagttttcaatattggcaactgattaaaaaaatgtgaaaaccaccatccagatgaaacaggatcccacagcagctcttgaacggagcctggggccgtggaggctggaagccactgtgtagcagttgtgaggcctcagtttcctcatctgcaaagtgggaatagtgatagtgcttttaagatgtttaaagttggctcaggattaaatgagttaatatgggaagtgcggaggcccagccagtgcaagcactgaagacttttcatcttgtcggaggccgcccatccctccccgggctacctctcagggggcttcgctgtccgacactggagcctccatttcccccttgcggtccccacatgcac

SEQ ID NO: 28408 - DNA, 2300 bp, Homo sapien
tcctgggcatggaaactgggctgtgtgcatttgggtacatgaacctccccctgccccacagtgagcctggcccagtgcttggcctggggaaaggcaggggcctgtgacttggctgcctttgcctgttccccgtgtcaagcatcctttctgtggggtggagaagcccactcatcctgtaatcgtcaccaagtcatatttttgtccccattttagaaatgatgaaggtaactttcctagagtcatacagccagtgagtggcccagttgggaatttttttttttgagatggagtttcactcttgttgcctaggctggagtgcaatggcgccatctcggctcactgcaacctctgcctcccgggttcaagtgattctcctgcctcagcctccctagtagctgggattacaggtgcctgccacaatgcctagctaatttttgtatttttggtagagacggggtttcaccatgttggccaggctggtcttgaactcctgacctcaagtgatctgcctgccttggcctcccaaagtgctgggagtacaggcgtgagccatggcgcccagcccccagtcaggatttaaacctggtctgtggggtacagagtctgggatcatcaccaaggctggcatcatcaccattctgagaatatggcctgtgaaggggcctggctgggggctggcccatgagaaggtcattcaaagggttggttttcccttcctctcccccagctgtcctcatgcagggttgagcccggcagggccacttccctttgccagccacctggtactttgttgtgttgaattaacattgattgagttcttgtctgccggtcactgttctaggcactggggattagggactcagtgatcaaaaaataaatcctgccctgatattctcatgaggaggacagaaacttagttaaacatacagaatgttggaagatgaaaagtgtgatgaagaaaacagtgaagtggcttgagagggacaggcctggggggctgggaaggaggcggcgaggggttgcaatgttaataacgtggtcagggaaggcctcacagagacggtgacctttgtgtaaagaccagaagggagtgggggagtgagacgtgcaggtctctagggaggggcccaggtgggaacagcaagtgccaaggtcctgtggcggccaggtgcctgggccagcgagggtcccaggttctggagtggagcagggtgagtagcaggagatggggtgggagtaacttgggagccagctcacgcagggccttgtgggctgctgtgtgcgttttggcttttgttctgaagaaaatgggagccagtgcaggctctgagtggaggagggaggaggtgtgagtgagcttgtgcgaaacaagatggaggtggtggctggagaaggccctctgtctgtccactggtcaggtgctgggagagaggcagctccagagactgcggagtgaggtcgggtatgggctggggcacagctggacaggtgccctcaggggacctcctgtgaactagatgaggaacagagacctgggttctgccagctctgcggctgagttgctggatcgtttttgctcattctgtgcctttgtgccttatgtcttcagctataaactgggaacgacagtcccagtgctgttgtgaagacctcaggaactgagcgaacaactgtgggagccccagaggttaagaggttatcacggaaggcttcctggaggagggaacccttaagctttgaagtccagatagaactcagcctagtggagggaatgtgggtgaggctggtggaatatgggagagcatcccggaggaaacctgtgagcaaaagctgggggctgggtgaagcaggacaccaaagtaatgggtgttgaatgggccgagctgacagctctctgggggagtggacggtgctggaggacactcccttccaccgggcacggagggtttgttgtgacttcctcccaccgcagcagctggcagagccggggctgccctttctgctggtgcctcctttcagccgcctctgtctggggttcccttcgtctggccccgcccctcgggctaagcggggcggggccaggcggtcccggaggctgcggcaggccggacagcgggagcaggtggaggactggcggcggtcgagatcgtgctgccatggctcagcctctgggtccagagcctcagctcctacctcttccctccttgccagcccctgatgcctgccagacttttgcctctgctggagcccctgcctgaccagcttcccctccctgtctggttgggatttgggggctgagc

SEQ ID NO: 28409 - DNA, 2300 bp, Homo sapien
gcgctatctgaactgtgaggcatgaaacacccccacacctggtcttcctccagcccctgggctgctctactctcagaggctcacttctttccctccctgcctgggttttctcccagcaaagggtggaagctgctggtctggagggggcgtgcctggaagccgaggcccagcagagaaccttgctctggaatcaggggtccacactcccctccctgatggactcgaagggtaagtctggcttgggagtcggagctgttggccccagaggggtcctctaacccgtggtgcatggggtggggagggaccaaggacctgagaagggaccagccttgccccaattgcccttctcctggctccccgcctgctgatgcctccttctgtctgtccttgtgccctttctctatgcctccctctgtaagcagcttacagtgaaaggagcactacattaggagtccagagacctgggtttgagtcctggctctgtttctagaaggcactggccttgggcaagtccctgccccctctggacctaagtcattctaagaaggtgaaggtcgggtcctgggaactcaggcctcgagagggccatgtctttggccccaccaaggccgatcctggacctcaccatcctcctcttgtcctccttgctgccccctgccccatccatgcccagcctgccagtccttccacgaggccctagaagcctgggcaaagggaccaggtgccgagcccttctacattcgtgccaacctcaccttgcctgagagggcagatccccatgccctttgcgtgaaagcccaagagatccttcgactggtggactcggcatacaagcggaggcaggaatggttctgcacccgggttgaccccctcactctgcgggacctggaccggggcaccgtgcccaattatcagaggtgacgcagagccaggagctggggatggggtccccctgggagccagggctcagatgggggtgctctccctccacctgcattccctcaccatcctctgggacagggcggggggttcgaggagaaatgaggagctttccttctttctacacacatgatgtcactccctcccacagagcccagcagctcctagaagttcaggagaaatgcctgccctccagccggcaccgaggcccccgcagtaatgtgagcacggctgggcaggtagtgggtggggggccccaagggtggggtccaaaagggagctagcaggctctgttctctggcaacctaggaagacactccctccctccttccctggtgatttaattggtcatctactatgtgcccagcaaacagaacagcagagctcaccgtccagggtagtttagagatgaaatgaggtaaagcgtgcctagtatgcaggagtacccctggtacataataagcatttgacaggctgggcacagtggctcacgcctgtaatcccagcactttgggaggccgaggtgggcggatcacaaggtcaggagatcgagaccatcctggctaacacggtgaaaccccgtctctactgaaaatacaaaaacaaaattagccgggcgtggtggcgggtgcctgtagtctcagctacttgggaggctgaggcgggagaatgaagtgaacccgggaggcggagcttgcagtgagccaagatcgcgccactgcactccagcctgggccacagggcaagactccgtttcaaaaaaaaaaacaaaaaaaacaaaccagcagtcatgtccccttttccaatgcctggatggtggctgggcttcgtggccagcgctgctgtgcacatgggcaagtgaggctcagagccatcagataaaggaagagcgagggccccagccaggcagcctgcattcgaccccagctctgccacctatcagctgtgtgactttggacaatcacctgaaccttccttgaggcttgtttcctcatctgtaaagtgcgggggttgtactgcctgtcaggctgtgcgtggcaggagatgacttccgtgagttagtgcccctcaggggcttagtgagtgtctgtcatgttgtaggcatttgagacctgtcaggtattggtaaaatcagtgccatctttattggtttcattaatttttctaccaaggtcacattgctaattcattggaagagaccctaaagtttgcctcgtatgtgacatttggttcctcttggtctctgggcctcagtctccccatctgtagcttggggggtatacctaaggctcctccaccaggctcagacgggctggcttcccgggggccacagggatggctgctctcatctgcctggggga

SEQ ID NO: 28410 - DNA, 2300 bp, Homo sapien
gagtagctgggataataggcgcgcaccaccacacccaactaatgttttaaattttttttgtcgagacgaggtctcactgtgttaactaggctagtctccatctgcccgcctcggccttctaaagtgttaggcctggtttcccttattcttttttttttttttttttttgagacagagtcttgctctgctgcccaggctggagtgtagcggcgcaatcttggctcactgtaacctccatctcctgggttcaaatgattctcgtgcctcaatctccctagtagctgggactacaggcatgtgccaccacgcccagctcatttttgtatttttagtagagacggggtttcaccatgttggtcaggctggtctcaaactcctgacctcaggtgatccactgagggcccgcctcagcctcccaaagtgctgggattacaggcgtgagccactgtgcctggccccacttcttcttgatgcggccctcctccttttctgccatgagaatactgggctaaattgacgggagtcagtgtcagaagtgcgggacagacagcgtgtcgtgatgcagcatgtccgcccacaagttcttagagtggattcccctgggagggtgtccttggccttgctacccactgctccttcctcagccctgtttgttttatatctgtccagcctgtcctgttttcatagacaagcctggggaggactcctgcttcggcttctctgggaatctgggaggcacccaggagtgagggagcaggtcttcccacccctgtaacccgtggctcccagtgtgtctccctctgggctgacccatgtcttgggctccaggtggatcagctcaagctcaaagtgagtcggctggaggaagagtgtgcactgcttcgaagggccaggggcccgccccctggggcagaggagaaggagaaggagaaggagaaggagaaggagccagacaatgtggaccttgtctctgagctgcgtgctgagaaccagcggctgacggcgtcactgcgggagttgcaggagggcctgcagcaggtaccagggccagggcttgtgggcacaggctggggggtggtcaggagggcctgcagcaggtactggggcttgtgggcacaggctgcggggtgggggatcaggaaggcctgcagcaggtagcagggccagggcttctgggcacaggctgggtagcggggctcaggagggcctgcagcaggtaccagggctggggcccatgggcacgggggtggggggtggtcaggagggcctgcggtaggtaccagggctggggcttgtgggcacaggctggcaggaggtcaggagggcctgcagcaggtaccagggctggggcccatgggcacgggggtggggggtggtcaggagggcctgcggtaggtaccagggctggggcttgtgggcacaggctggcaggaggtcaggagggcctgcagcaggtaccagggctggggcccatgggcatgggggtcgggggaggtcagaaggacctgcagcaggtaccagggctgggcctcgtggccatgggggttgagggggggtcaggagggcctgcagcaggtaccagggccagcgttcatgggcacaggctgcggggaggtcaggagggcctgcagcaggtactagggccagggctcgtggacatggagtgggggtgggggtcagacccggaaaacaggccctcttgctgtttgcttatcctcccaaggcctgggaagctgaggatttcagaaccagggatctgagatctggatggagtcccggtagcctcttgcctgaagctctgagctgagggcccttagcacgtggctgtccctggttgtctggtctagggtgtgtgagcagcctccagaaggtcctcaaactccctaaaactgcccccctgattttgagtgtgagcatttttctggggaaagggccccagctttaatttgatttgtagagggtgtggcctgggggccctagggcttgcttagtgtcctgcggcaggtcagtggcaggtcagcagctgcatgggcctgcctcctggccattgttccacacaggaagtgggggatgagagccagtgtgtttcatggggttggggcacttggctggggtgtgggtctgggggcaagatcttgggcccagggtctacctgtatgggccaggctcagccccttgaagacccctagtcatgggggtgggagtaggtcttgggaatggcctccgtctgctgccctggatggtgggtgagggccagagcacgagtgtgtgcctggtgcttgtttaggaataatcctggg

SEQ ID NO: 28411 - DNA, 2300 bp, Homo sapien
ttcctcatcctcatcacagataaggatgatgtaacaattataaaacggccttgtgctttatagataccatcctcagtgcttgccatgcacagacccctttaattttccagccaccctacgctggggtggacaacactatcttccccatttctagaggaggaaactgaggcacagagaagttggttagagcactttcccaatgtcctgggattgaaggaatttttttttttttttttttgagatggagtcttgctttgttacccaggcttgagtgcagtggtgagatctttgctcactgcaacctctgcctcccacgttcaagcgattctcctgcctcagcctcctgagtagctgggattacaggtgtgtgccaccatgcctggctaattttttttttgtatttttagtagagatggggtttcaccatgttagccaggctggtgtcaaactcctgacctcaggcgatctgcccgcctcagcctcccaaagtgctggattacaggcatgagccactgtgttcagccggattgaaggatttctgagttggctctcagcactgctgaggggcggtggctggcaggtaggagtgctcccctttctttacccagagggcttccccttttttctgaaacagacatggggcttgctgtagggttttctcagaagaaataatttactgcttagagaggacggcgtgagggctgcaggctgggggtactgggaggggctgcagccctcacggcttgtcccacctttgggttgggtgtgatgcgattgggagatgtcctgcgtgtgtggccatctgggggctgctgggacaggggagggggatggaaaagagatggtcggaggtgcctctgtagtctgcaggtcatctgcctctacgcagagtggctgctttttcctattttagggacctaagaagtgaaattggccaggcgcagtggctcatgcctgtaatcccagcactttgggaggctgaggcgggtggatcatgaggtcagaagattgagaccatcccggctaacgtggtgaaaccccgtctgtactaaaaatacaaaaaattagccgggcgtggtggcatgcacctgtggtctcagggactcgggaggctgaggcaggagaattgcttgaacccgggaggtggaggttgcagtgagtcaagattgagccactgcactccagcttgggcgacacagcgagactctgtctcaaaaaacaacaacaaaaaaagaagtgaaattaaacttagctactataaatttaccttaatttataatttatgtttggagcttttctgctccaaaattaacaaaggtgttgcagatggatctgaacagagcacctgatcgtgcctggcttggcggcttgcatccccacctcccataggcaggtgtgtggcggctgggatttaataccctgttttataaggtgcaaatttaatgagctgttatttctaagcaacataaactgaaggaacgaacgctataattttgtgctcagtgagtttgtacgccgggattaaatgcatccgtatttcctgttgctcgtcggagactcccaggtgtcctgtcctctgagctcatcagggaagccggctggccaggggtcaggcaggaggccctggtgtgtggctgcggtttgctgagagggtgtgaccacagttgtccttgtaacgagctgtctttctctggctgttcacaaagcatgttttgtgagtggaaaggaatgcgggagtcatgaatttctttctgagtctcttgcggaggaggaggagtggactgttaatttgtagaattgcctgacccagcctccagacccgtgtgtgtgtgtgtgtgtgtgtgtgtgtgtgtgtgtgtgtgtgtgtgtgtgtgtggagggggggctgccattctaacctctcaaggctggggaactagcaagtcactttccaagagaggccaggggactcctagggcaccaaatattgcatgcctgactgtagcaccagaagtcattgtgaccttttcccaacaatgacttcattttatggcctgccacctgctgccactcttgtcactgtctggccacctcagaccccacatgcgtcacgcttggctgagtgcactcatagtccagcaaactggccatgcacgtctgctcccagcttggtggtcacaccacagctgcccaccccccataccaggccaacttctggctgcacactccgaactggtgattggttaggggcatgggattttgtttgaagctgtgaagacagccacggtcacactgtggcagctctgtagcccttcatagtt

SEQ ID NO: 28412 - DNA, 2300 bp, Homo sapien
attgtacatgtgaatgtgggagtgtggtacccaaaggaactctgtcgcttcccctggaatgctgggcaccaggggcactcggtgtacccagctacctgcctgttcagacccagtgtgccctcacttctctgtccacttatctgcagagacctcttggcttctgtgccttatctttaggccctgcttagcttctcgatgaaaaaataattaaccatagcctcattttccaaggcgtccatcccgctctgctggccaagttaaaaatattcacgaggagtagggctgctggtgggaggagctgccgctctgcgtgggagggcaaccaaggccacagagaggggaaggacgtattgaaagggaggtctggtgtgtgcctggactcggggcttggagaggacagaggccaggggctgggctccggcctattcccattgtggcctcgctgtgtgaatttgggcaagttccttgccctctctgagctctgcttcctcctttgttaattgaggaatttgcactagaattcagttctcccaaagcatttcttctgcatgtaaacaggtgacacccaaaacaaaaacaaatgtacaacaaatgcaaaccaaaaaaaggctgtggttaattaagtttggaaaaggacaccaggatatataaagttaaatctgtttctttactgctggggctttttttttttttttttttttttttgagggggagtctcattctgttgcccgggctgctggagtgcagtggcacgatatcactgcaacctccgcctcctgggttcaagcgattctcgtgcctcagcctcccgagtagctgggattacagacgcgcactaccacgtctagctaatttttatatttttagtagagatggggtttcgccatattggtcaggctggtctcgaactcctgacctcaggtgatccactcgcctcggtctcccaaagtgtcgggattccaggcatgagccaccgcccccggccttaatttaagcagggcttttcagagcctttattgattgaaaccttaattctttggataagtaatacatatgtccacggcatctaattcagaagttgtggaaggcgattagggagctcacacctctttcctgtaccggttgtgcctcctctgttcctccctggcagcaggtacctggcagcttctaatgcatagcgagactgtatcgcatgcaccagcagataccgtgtagactcggccagtatcatggtaagacaccaccggcctcccaggcaggagcgggagtatggatggctagtcacagcccgcccccagcatctctgggaccaacacctggaggaataccctttgagaattgtggggtccctggtcctcaagtgccacgggagtttgcgtaagaggggagttggcagtgctgccctgcaggttcagacccccatcttgcagaaagcccccatgacctctgcccattgctgtcccccgcggggctgtcctgcgctccagggaagctcccgcgcccgcagtgcatgtggggacccgagaagggcaagcccagcttgagtgcccgcgggctgcgccgggcgtgagcggctagccccgcacgggcgggcgcgctgtgggcgtggggaggcgatgcgcgtggcccggggaaggtgtgtcgcggcgcgcggggggtgtgagcgcgcctgcccgcccccgccccgcccagaggccgggcaggtgtgggcgggcggccaggaccccgccgagccgggctggagagccggcgggaaacaggaagcagggggaggcgcagccggacggccgggagggagggcgtgcagacggacgcgcggggtggccgggggccggacgcacgacccggggcgggcggcaatgtggggaggcccgggcagcccaggaggctgcggggacgggggcggagccgggggcgccacgggcaccgcccccctgcgccggcggagccgccgcccgagtgcggacccgggagcccgaggcgactgtagcgtgcggggtgagtcgcggggagctcggggcgcgcccccgacggcgggtctgcggacgacgccccgggggtgcttggccgcacatctagccctagggagccctggtcgacccccgtgcgcctcttgcccgcagaccctgaggacacggccatgccgggccgggcggaggcgggggaggccgaggaggaggccggggccggctcggggtctgaggcggaggaggacgcgctgtgggagcgaatcgagggcgtccggcatcggctggctcgcgccctgaacccggccaagctcacgccgtatctgcgccagt

SEQ ID NO: 28413 - DNA, 2300 bp, Homo sapien
agatggagtctcgctctgttgaccaggctggagtgccgtggtgcgatctcagctcactgcaacctccgcttcccaggttcaagcaattctccctgcctcagcctcccgagtagctgggattacaggcacccgccaccacgcctggctaatttttgtatttttagttgagacggagttttaccatattggtcaggctggtctcaaactcccagcctcaagtaatctgcccacctcagcctcccaaagtgctgggattacaggcgtgagcaaccacgccgggcaacagtcagtcttctaaatgtacacctgccagtgctgcctgctggctcactgtcctgatgctgttccagttctccatgggacaaaatactcctgggccggcccccagggaaagagttcctactgctgtgccacttgagcaaatgctagaatgctttgtgcctctgtttcctcatttgtccagctgcagaaatagctccttcccttggtggccagcatggggattcagggagccagtggaagaggcctagcccctgggtgaacagtaaagaccttgtctcctccacctgcgggtaaatacagctcctcatccccggccacaacagcgctcagccagtctccttcagccgggtttgcctccgctgcagggtcctccactcccagcctttgctgtgctgtcccttgccagctgtgcactgtgcatttccactgcccttccctctgcctacacgtcctttaagacttaactcacaaccatgcagtggctcacacccataatcctagcacttgaggaggccaaggcaggcggatcacctgaggtaaggagttcaagaccagcctggccaacatggtgaagccccctctctactaaaaaatacaaaaattagccgggcgtgggtgggtgcctgtaatcccagctagtccggaggcttaggagggagaatcgcttgaacccgggaggtggaagctgcagtgagctgagatcatgccatggcactccagcctgagcaacagagagagactccgtctcaaaaaaaaaaaaaaaaaaaaaaaaaaaaaaaaaaaaaaaaaaaagagagagagagagacttaactcaggtatcatctcctctaggaagatttcctgagcccccaggccctgcaggaagtattagggacctctctgtgccctgacagcccgaggactctatagtcagatgggagtagtcaaaggagggcacaacaacgggaggcaggggccagagatctatctcccctccttgaggatggcacagggtcccgggtatggctgattccctgccctccatggaggtgggcggggtggggggagggtctgtaaagtctctgagatgcgacttcatttacctgccgagcaagcctcctaggtgctcttggagcaggaaacacttcacacaacatctgatgctgctattatctatcccactttcagatcaggaaactgaggcagagaaaggtaagtagtgactgaggcaggacaggagcccaggctgtccggctccagggtcccggtcttgacggccactctaccccactctaccagtcgccccagtatggctgtcttcctcctgggcaccgcggggcctgtaccggatggaagggaatgagaatggggagcaaaggagtgggcatgtcatgcctgtaaacatcaaggtttaaaggcccaggcattcaaggcctcagatcgagcttcccggttccccgaactcccgcagggcgcggctggagggcccaggagggaggagagttcatcaggcctggacgccccaagcaaggccacgaggggaaccggtggaagaggggttggcggccggggaccggagtcgcctccccggggcagcccgcacgttccccggctggccttgtccggggtggcgagcagaggcctggcctggccccccagccgcgtccctgccagctctcggcggccgcgaggacggtgccggggagggggccggggagggggccgggccccgcccgcgggcgggaggagacgggcgggaggcgggagcgcccacaccccgcccccgcccccggatccagcccgcggagcccgcggccagggcggcgcagaccggcccagcgactctcccgggctgccagccgggacgcgcggccgccgccgctgcagacgacgagtccgccctcgtcccgcgcccccggggctcgcggagccaggtaacagcccgggcgcgcgggtcctcggggcggaggccgtggaggccggcgggtcccggcgcccgcggggactctgcaccctactaggctcccggggccggaac

SEQ ID NO: 28414 - DNA, 2300 bp, Homo sapien
atgccaggagcattaaaatgcacggaaagagaaatgccctccttaggtatcggaagaccggttaaatttagccacaaacagctaacgtgaggtggtgcactccctgtcactacaggtatgcaaccagaggatgtgtggcaggaggcaggatcactacgggacctcaggatccctgagagcaggacattctggatcatggggtgccttcattcagaggtcctcagaccaggggtatcccatgtttttgtaaacttgagggacccaagagagaaaggagtcacaagccacagttcttgccacaggaagactcgataaaaacagattattttgtttgcttttagccctggggcaggaactgcaggtagggataggggaacacacccaagctctgttgatcctggtgtgactcggaagaagaaccaggacagagaatctcggctggaagtcttttattcttttaacttgaaagaggacatgttgaacccgccccttacgctcaggtagctcaggtggctgtgacccagcctgttgggaaaagtcagctcgtgcccatctggcagcttcaccttgaatttgtcactctcaaaggtcactgtgaactgtggggagggagggtgtcaaggaggcaggaggccctggaaatgggccagggcagtgcctgatggctcaaacaaggccagcacctgtgtccaggccaggctctcttccatctgggccctccccttgacatcaccccagtgccctttccccctttgacctcaccttgacctctgaccctgggctgaagcacaggtgatcttcccgttgttcttgcccccagttgctgccgtccaatgagttgcagacaatggtggattcgctgaagcgagggttgaaatgcaggttcagcttgtctgtcccctggcccagattaattacaaagctgcaggagaaggggtagcaggtgaggttcagggctcaggcctggataaagcagcttgggttggaggaccttggttgaccacaagctggaagaatcaaagcttgtgttagttgagatctgtgccttaaaacaagggaggtaacaacctgctcagacttagcactgtggtagcacattccatttggagcagggatcacgctgttgagagaagggtaactgatagtgacagcttcgggaattgggggtggctctcctgggagagagaaatgctatctcttagatatctgaagacctattaaatttagccaccagcagccaacctaaggtggtgagctccctgtcactatgggtgtgcaaccggggttgtatgacttcttggcaagatcactacaggagcctgggctagacctgcagggttcctgaaagtggggcattctgggtcatggggtgtcttcatttgggagtctcagaccaagggtatcacacattttgacaaacttgagggacccaagtaggagaaataagtcacttttcccttagctcctatggcatgcacctgcccgccccctctctaaccaaaagtagataaagcacagttccaagatgcgctgacatgttctgcaggcgagagagcctttcgctggactgtgactcacggaggtggtgaggccgctggttctaaccaagaggatgccagcgagaccactcagcctcccctggtggctgccctggtttaatgctcatgaaatgccagcctgtggccattctgctgggtaaagagggtggtgtctctggggatttgggcgttccctagaggcacctgccccgcagggggccagacagagttccaggggcttctccacctgccccttcaatggctgttggggcaaaagaatagagcatatggcatcaactctgaaattctgcaggtccccaaacctagcctcagacatgaagtgggggccagcaggggtgtggggagaagggtgtgaaaaagggcccattggcctgacgtccctcttgcctgagcacttcacagggctgccctgcctgccccacccgccctgcctattccgggcctgcagactcccccaaccctgaaaccttgctcacccatcagtgccatcggcgatgctgcctgtgatcttcagggttgaccccggcttcatgtccatgttcttaacctcaagttccccctgggccaacagagaaacattccactcgagtccccacagaaaatcaatcccacacttgcccagcagcttcatccacctcatgccaacccagctgcaggtctcaatccccctgcccacgtgaggacgcaggagaccaccaagctggaaagtggcagagccagagcgctctgatcaaggcctcc

SEQ ID NO: 28415 - DNA, 2300 bp, Homo sapien
aaaattaaggctgggcttggttcacgcctgtaatcccagcactttggggagctgaggtgggcagatcaattgaggccaggagtttgagaccagccacaccaacatggtgaaaccttgtctctactaaaaatgcaaaaattaggcatggtggtacatgcctgtagtcccagctactcgggaggctgaggcaggagaatcgcttgaacctgagaggtggaggttgcagtgagtcgagatcgcaccgttgcactccagcctgggcgacaaagcaagactctgctcaaaaaaacaaaaaaaaaaacaaaaaaagaaaaggaaagtaaaacaataaatgatggtggtcctgtgatttgctgttggtctacgtgaggccctgtgcatgggatttcacaaacatgttcttgaatcctctcaaaaccagcttgaaggttggtggtgtctccctggtgtgacagggtctgtcatacagctggcattcagcaacaacaacaacaaaaatagaaatgggagtctcgctatgttgcccaggctggtctccaactcctgggctcaagtgaccctcctgtctcagcatcctgagtagctggaatacaggtacacacttccacacccaggctatcaactgttttttaaatgaataaatcaaattagtcaattttacagaaggggaaagtgaggcttggagagagactttgatggacataggacttgcggagttttatagattcttagtttttgttcgtttgtttgtttttgtttttgagacagagtcttgctctgttgcctaggctggagtgcagtggcgtgatcttgtcttactgcaacctctgcctcccaggcttaagccgttctcctgcctcagcctcccaagtagctgggactatagatgcgtgccaccacacctggctaatttttgcatttttagtagagacagggttaaatgttaggcagactggtcttaaactcctgacctcaggtgatctggctgcctcggccttccaaagtgctgggattacaggtgtgagccactgtgcccggccttttttttttgtttttctttgagatgaaaagtcactcttgtcgcccaggctggagtgcaatggtacgatctcagctcatggcaacctccgcttccagaattcaagcaattctcccgcctcagcctcccaagtagctgggattacaggcgcccgccaccatgcgcagataatttattttattttattttatttattattattattattattattattattatttttgagatggagtttcgctctgtcgcccaggctggagggcagtgacgcgatctcacctcactgcaagctccgcctcccgggttcacaccattctcctgcctcagcctcccgagtagctgggactacaggcacctgccaccacacccggctaactttttgtatttttagtagagatggggtttcaccatgttagccaggatggtctcgatctcctgacctcgtgatccgcccgcctcggcctcccaaaagtgttgggattacaggtgtgagccaccgcgtccggccaatttttttatttttagtagagacgaggtttcaccatgttgcccaggctggttgctaactcctgacctcaggtgatcagcccgcctcggcctcccaaaatgctgggattacaggcgtgagcccctgcacctggccagatttagttttgggtgggccaagatcttgtgcctctgatacagtcattttccatatcatatttttgtttctggggttctgctgagggcagcgtgatttcatcacttgaacactttgcggaactgggcaggaagcactctgcccatttcatagatgggcaaactgagcctccgtcctgtgcctcttcgggttggggtggataagagcaaaacagggcagggagtggggaagctctgggaggccttgatcagagcgctctggctctgccactttccagcttggtggtctcctgcgtcctcacgtgggcagggggattgagacctgcagctgggttggcatgaggtggatgaagctgctgggcaagtgtgggattgattttctgtggggactcgagtggaatgtttctctgttggcccagggggaacttgaggttaagaacatggacatgaagccggggtcaaccctgaagatcacaggcagcatcgccgatggcactgatgggtgagcaaggtttcagggttgggggagtctgcaggcccggaataggcagggcgggtggggcaggcagggcagccctgtgaagtgctcaggcaagagggacgtcaggccaatgggccc

SEQ ID NO: 28416 - DNA, 2300 bp, Homo sapien
ccaaagtgctgggattacaggggtgagccaccatgcccagccattcttttttctttttttaaatctttcattggtataaaatatatacgcagcaaagtacgtaaatgatatgcatggtcattttcccctgcttttgaacattattttaaaacaagtgaactttaagttccttttactgtgtgtactttctggaacctcctatagtgagataatattattattataatcagaaaaatgccacctttaaaaggtatagtttctgttgattagtttccagggagaaagccttttaaaattccttatctcactggggttttaccatgcctttgggagaaaggccgagagaggattaatttccttgtgggtgaaaggaggaagtcactcctcactccgggctggcaggggactgaaggtggtgtcctatgtgggcactgggcagtgagccacctgcagactcctggcaccgagggccctcggcaaggccagttccccacatcctgcccggagtggccaccgccaactctgatggaaaacgctctggctcgccaaatcctgagctctagaaaagttctccttctgggaatctgccctacataagttgtcacgatgcagccaaagtttatgtccaaatagatttaatgcagcagtatttttaatagcaaaaatgtagaattaatgtgagtgttcagcagaaggaaattggttaaataaattcagtcgttgaaaggtagactatttcgcaggcattaaagtatggttctgaaatatagatttgtggtctttaatgtttcccaaatgaagagagataaacaattgcacagacagaggggtgtctataatgtaaatctgtggagaaccgcctggaaggaaatgtgccaacagcgtaagccagttccctcgtggcggtggcattatgagtgattatttttctttttatttaatatctctaattgtctatagtaagcatgccagttacataagtaacagaagtcaagagcaaagcattttcatcctccatgtcccccactcagccctcccactccttctgcacttttatttattttttatttttttatttgagacggagcctcactctgtcgcccaggctggagtgtagtggcgcgatcttagctccctgtaacctccacctcccgggttcaagcgattctcctgcctcagcctcttgagcagctgtgactacaggtgcgaccacgcccagctaatttttgtatttttagtagagatggggtttcaccatgttggccgggctggtcacaaactcctgacttcaggtgatccgcctgccttggcctcccaaagtgctgggattacaggcttaagcaaccgcgcccagctctcctctgcttttgaccatttgttgtaaatagtttgaaatcttttctttgaatccgtgtattggttttgaaacctacatgtccgatcagataaataatatggggagggaagaagaaaacataatgctctctgacaatgaatcataacatcatagaaaattagaaccttaggccaggcgcaatggctcacgcctgtaatcccagcactttgggaggccaaggtgggcagatcacgaggtcaggagatcgagaccatcctggctaatacggtgaaacctcgtctctactaaaaataccaaaaaattagccgggcatggtggcgggtgcctgtagttccagctactcgggaggctgaggcagcagaatggtgtgaacccaggagattgcattgagcggagatcgttgccactgcactccagcctgggtgacagagtgagactctgtctcaaaaaaaaaaaaaaaagaaaattagaaacctagacttttttttttttttgcaaagcaaatctctctttttacaggcaaggaagctgggctaagtgagggaggctgggagagctgtcaagcggctgcattgcggtttgtgtgggggcagagctggggctgcttcccctctcgggctctgggagcgctgaggagggggaggctgggctggagggaggccaggaggatgctccgggctgggtggggtggagctggctgaggagtcttctgcctgtttgtgctgggtactgggagatgcaggcggggagacacaaggtagaaggggcaaagtcctcacctaggaccttgagggagttaatgtgtaatattctaggatataagcttgaccacgagttgagaccctgagcacaggcctccaggagccgctgggagctgccgccaggagctgtcaccatgacggtgaggacactagccccctgctgcctgccccactctgttcat

SEQ ID NO: 28417 - DNA, 2300 bp, Homo sapien
gcatgatggcgcatgcctgtaatcccagcaactcaggaggctgaggcaggggaatcgcttgaacccaggaagcagaggttgcagtgagctgagatcgtgccactgcactctagcctgggcgacagagtaaaactctgtctcaaaaataaatataataggctgggcgcagtggttcatacctgtaatcccagcactttgggaggctcaggcgggtggattacttgaggtccagagttcgagaccagcctggccaacatggtgaaaccccgtctctactaaaaatatgaaaaaattagccgggcgtggtggcaggcgccggtaatcccagctactcgggagggtgagggaggaaaatcacttgaacccgggaggcagaggttgtggtgagctgagatcgcgtcactgcactccggcctgggcgacagagagagactccgtctcaaaaataaaataaaataaaaaaatatatataattcatttcagtagtaaaagacataaacaaaaagctataagtatacactacgttacagcttttgttgaggaatgcaataaacatacatatcacttccctgtataatctcaatggcctttgggagagaatttagaaaagcatcccagtcgctgaatggttgagtttaggggaaaaactgacccagcacagccccctcatctcctggatgaggttactgcggttccgcaaggtgaatcgaggtcagtcgccaaggcagaaccggattcgccagattccctagtctcagtggagctttaaccctcccaggcacaggaccgctggagaggtcgccacgggccggtttcccagccggccgcgagggggcgacagagtgcaatggacccaggtgagtcggggaccaggcgccgccaggtcgtgacgccacaaggtgagggaggtctttgatggagggagatacaggagaaaaggcgccgagcttaggaagtctgttcgtactgtcctccccgattccagtctggctcccactgctatcttcctcccactgctggacccttctaaaacaaaagcctgactttgctaccatccgtaaaactgtaacgacacctccaacgttgcttacagggaaaaaaaaaaaaaagggcagcaaaacatgggacctgggtgatcttgccccagcctaattccaagatatctcctgcaaatagatatctatttgcagatatctgggagccgtattgaaatacttccaactccctggactcatcctacttttttttttttttttttttttgagactgagtctcgctatgccgcccaggctggagtgcagtgacgcaatctcggctcactgcaaccttcacctcccgggttcaagcgattcttctgcctcagccttctaagtagctggcactaaaggcgcgcccagataatttttttttttttttttttttagtagagacggggtttcaccgtgttaggatggtttcgatctcctgacctcgtgatccgccctcctcggccttcatcctactttttctccctgaatatcttttcgcaccagctctacgtggagaaatccgactgtctttgagcgaagtacagtatcactttctcttgaaacctcccctgacacgacccctcccctgacacgacccctcccctgacaacacccccacccaccccaccccagtttgggggaggagccccctcctttgttcccactaccccgtgggcttcccctatcacactgtaataaatatctggccttgtctatctccttctgtgcccatcacagagcaaagcaaatacaaagagttcattaaacgttggctggatgaatggaggagacggcacagggttcaagctctgctacttgtgcggcctcaggccgactaattatctggtgggtttgttgtaaggagtcagaactaaatggattaattacaaatagtgcttaggacaatgcccagaatactgtaagcactcaagaaactgatttattttcgtcattttcacagcggccaaggtacatgaggatgtagcttatcgcccttttaagggactctcccacgttcgactctaagcggaagtacccgctcagggctccggaagtggcctcagagcccctcagcaacatgcccgcagagaattcttccggaggcggtcacagacatctccgtgacgcagaacgagttagagcgtcccttggggtttccatggtgctgcccttagcctgcagtatctccacttcctctcccgcctgagcgccgggaacggaaaagcaggcggccggtcccagctgcgacgtagacgccgcgtgggggtgggg

SEQ ID NO: 28418 - DNA, 2300 bp, Homo sapien
tgcaataaacatacatatcacttccctgtataatctcaatggcctttgggagagaatttagaaaagcatcccagtcgctgaatggttgagtttaggggaaaaactgacccagcacagccccctcatctcctggatgaggttactgcggttccgcaaggtgaatcgaggtcagtcgccaaggcagaaccggattcgccagattccctagtctcagtggagctttaaccctcccaggcacaggaccgctggagaggtcgccacgggccggtttcccagccggccgcgagggggcgacagagtgcaatggacccaggtgagtcggggaccaggcgccgccaggtcgtgacgccacaaggtgagggaggtctttgatggagggagatacaggagaaaaggcgccgagcttaggaagtctgttcgtactgtcctccccgattccagtctggctcccactgctatcttcctcccactgctggacccttctaaaacaaaagcctgactttgctaccatccgtaaaactgtaacgacacctccaacgttgcttacagggaaaaaaaaaaaaaagggcagcaaaacatgggacctgggtgatcttgccccagcctaattccaagatatctcctgcaaatagatatctatttgcagatatctgggagccgtattgaaatacttccaactccctggactcatcctacttttttttttttttttttttttgagactgagtctcgctatgccgcccaggctggagtgcagtgacgcaatctcggctcactgcaaccttcacctcccgggttcaagcgattcttctgcctcagccttctaagtagctggcactaaaggcgcgcccagataatttttttttttttttttttttagtagagacggggtttcaccgtgttaggatggtttcgatctcctgacctcgtgatccgccctcctcggccttcatcctactttttctccctgaatatcttttcgcaccagctctacgtggagaaatccgactgtctttgagcgaagtacagtatcactttctcttgaaacctcccctgacacgacccctcccctgacacgacccctcccctgacaacacccccacccaccccaccccagtttgggggaggagccccctcctttgttcccactaccccgtgggcttcccctatcacactgtaataaatatctggccttgtctatctccttctgtgcccatcacagagcaaagcaaatacaaagagttcattaaacgttggctggatgaatggaggagacggcacagggttcaagctctgctacttgtgcggcctcaggccgactaattatctggtgggtttgttgtaaggagtcagaactaaatggattaattacaaatagtgcttaggacaatgcccagaatactgtaagcactcaagaaactgatttattttcgtcattttcacagcggccaaggtacatgaggatgtagcttatcgcccttttaagggactctcccacgttcgactctaagcggaagtacccgctcagggctccggaagtggcctcagagcccctcagcaacatgcccgcagagaattcttccggaggcggtcacagacatctccgtgacgcagaacgagttagagcgtcccttggggtttccatggtgctgcccttagcctgcagtatctccacttcctctcccgcctgagcgccgggaacggaaaagcaggcggccggtcccagctgcgacgtagacgccgcgtgggggtggggttgggcgagtaggtgacgctctaggcgagctcgttggcctctctatggtgccgagcgcgcccgttcggacgttgcccctttaatcggcagagggcggtgcccaggaggtcccgcgagagctgcggggggcgggggggcggtgccgaggctgggggccggtggcggatggagcccgcgatggagccggagactctggaggcgcgaatcagtgagtgtccgggaggggcgcgggccggaccggaaccggaaccgggggcacgaggcgggccccttcccggcgggggcggggtacgggtcgccccctcctcacgccccgcccccggcccgggaggggcggtgtcctcagtcggcccctcagaccctggagcgatggaggaccccggccccggcgcggtccagcggtgggagcgggcgccgcccacctgtcggatccctgggccatgacccctgggacggcgagtgagctgcgccgggaacccccgggacggagagagcagcctccaacccccaaggctcacattgcttcacggagtagcggcccggg

SEQ ID NO: 28419 - DNA, 2300 bp, Homo sapien
cggaggagtgtttccaggctggccaggggcggggcagccatggagctgcccggtgcttaggaagaaatgattccagggaatacataagctgacagatggctgtatgtgtcagccatctctggcctgaaatcactccctgtggacctggccacagaaccctacctggtctctggcaggtttccctgtccccaccacacaagagcaacctccctggacctcagcatccaaggccacagacctgagtgatggagcctgctggctccagacgggccatccccggctcagcccaaggagtcttcccacagaccatgaacgtttctttttctttatttttttgagatggagtcttgctctgtcacccaggctggagtgcaatggcatgatctctacgctccacaacctccacctcctgggttcaagcaattctcctgcctcaacctcccaagtagctgggattgcaggtgcacgccaccatgcccggctaattttttgtatttttagtagagatggggtttcaccatgttggccaggctggtcttgaactcctgacctcatgatctgcctgtcgtggactcccaaagtgccgggattacaggcgtgagccaccatgcccggcctacctaccgtgaacattttttttttttttttgacaaggagtttcactcttgtcacccaagctggagtgcaatggcgcgatctcagctcactgcaccctccacctcccaggtttgagcaattctcctgcctcatcctccagagtagctgcaattataggtgcccaccaccaagcctggctaattttttatttttagtagagacagggtttcaccatattggtcaggctggtcttgaactcctgacctcatgatccacctgcattggcctcccaaagtgctgggattacaggcgtgagccatggcctccggcctactgtgaacatttcttaagctgtttgagtgacagcccacccccttggcccttccttgctcagacccatcctttgaccagagctactgaataatccatatggcctcccattctcctcccaacaggggactctgctgtgagagccactttccccagcccagtttgctgctaggagacggagagtaggcccagggcctcccagttccaccctcacccctccctgggcagcctggagacctctggctcctctttcctgggatgtcaaggctaagtccccagagccgactatgagcaggcctgtccctcatgtcagttctgcatcctcaccatggtgccatctagcaggtggggaaacagacactgagggctgacccagctaataagtggcaggggtagtaggtgaactcagtctaccccaggctggttgggcggggctatgaggaccctgtaggctagagggcttcccggggagtcctggggaggcagtagggtgtggacagggcttgagactgaagtgagtggggctgggcagtatcaaaggcctccccactgtgtccctgaagtatctgggctctcggacatcggagaaggtgaagaacaagatcttggagctcctctacagctggacagtgggcctgcccgaggaggtgaaaatcgcagaggcctaccagatgctaaagaagcagggtgaggcacacagagggtggggggcgaccagggcctgccttcccctcccccaccatgagctggggctccagcggcttcaggggcttctgagccagcaaggtcatgggtctgtcctttaacttctggagaaagtacatacagctagtgcggccttctgtgctctgcctgaggctagcttgggtggaaagaaggtgagttcgaatcaagcttcccctcaaagagtggtctccagggagtggcctcaaaatatgggtccccaaaccatctcccccaggcaattttgatggagtaggtaggagtaggcccaggccactaagagtccagagccagcgtgctggcaaaagactgacctccctcttctgtcctacccttgcctgcccccatccccatgtcacccctacccctgggcctgggacatattgacagcctttctgacactcatctaatccagggattgtaaagtccgaccccaagcttccagatgacactacctttccccttcctcctccacggccgaagaatgtgatctttgaagatgaggagaaatccaaggtgagactccaaggaggcacatatggggactctgagcccaggtgggggtccgtgggttctgacctctagctgccctggcatcagccgttggaacagaggcacacactgagcccaggcatcgttgtagatgatgg

SEQ ID NO: 28420 - DNA, 2300 bp, Homo sapien
cacaggcaggaagcggggagccatcatgtgactccagtcttctgacccctggcccaggtgctgccctcacggtcacacccctctgtctctgcagatgctggcccgcctgctgaagagctcccatcccgaagacctccgcgcagccaataagctcatcaaagagatggtgcaggaggtagcggccgagcccagagcacagggaggaggcgggatgggggtattgagctgggccactgagatggggctgtatgcatcttcacatggaaggagccctgcagtgacccgggctggcacagcagagaagctgatgctgggggaccagggtgtgcagggaagaattcccggcagcctgggtgacttgctctggatgggcctttgggaggctggctacctcttcgtcaaaagttagaaatgaattaggccttagtatatttttaaaaatactaagtatttttaaaattactttttagtatttaaaaatactaagtatttttaaaattattttttagtatttaaaaatactaatgaatatatgtaagtatgtatacgtgtatgtatatgaggagactttttttgagacaaggactcactctctagcccaagcaggagtacagtggcatgatcatggctcattgcagcctcaacctcccgggctcaagcagtcctcccacctcaacctcccaggccgctggcactaaatacgtgtgccaccacaccggtatagtttttgtattttttttgtggagaaggggtttcgccacattgcccaggctggtctggaactcctgggctcaagcaatctgcctgcctcggcgtcccaaagtgctgggattacaggcatgagccactgcctggccaaatgtttaatttttaagtaaatatacatatgttgcctgggtgcctgctgaaactttttttttttaattgagacaagatctcatcctggagtgcagtggcacgatcatggctcactgcagcctcgacctcctgggctcaagcgatcctcccacctcaacctcccaagtagctgggaccaaaggcacacgctacagcgcccggctaattttattttttgtagagacagcatctccctttgttgcccaaactagtctgtaactcctgggctcaatgaccctcccatctcggcctcccaaagtgctgaaaaaaaagtttcaaagctggatgtggtggctcatgcctgtaatcccagcactttggaggccaaggtgggaggactgtgtgaggccacttttcactctgcaaaggaggggcacgcacagtaagcggaggggcaggggaaagccgggctgctcccaaaagcagcctttgaaggcacgggctcccccatctgccaggcaccgacagacactggaagggtcttcctgctcgtttccaggctgtacctggtgaccacagaggtccccttgcactatgaagtacaggaacctcctttgaaagggcaaacacaaggagggcaagagtcactgagaaccacagtggaggtctagggccctgggccttcagaagcacctggtgaggggtttggaaacccaggttcctgggccatctctgaagatcctgatgagcttgtgcagaggcctgggcactgggggcttcttggaccagcgtgcccttcctaggcatgaggggctcctggcagggcctgctggagccccacccagagtgtgatcccacagtcacccagctgtcaacccagatcccagcacacattctctcaagtggcagggggcagtgcctcgtccaggccaaaggttctcaggggcccttggccaatgtgtccccaggaccagaagcggatggagaagatctcgaagagggtgaatgccatcgaggaggtgaacaacaatgtgaaactgctcacggagatggtgatgagccacagccagggcggcgcagcagctggcagcagcgaggacctcatgaaggtgcacctgcctccctgcctaccccactccctgcccactccacagcccacgcggaccctgacccgcccatcctgctgccctcaggaactgtaccagcgctgtgagcggatgcggcccacgctcttccgactggcgagtgacacagaggacaatgatgaggccttaggtgagcccagggcaggtgctgaggtcaggtccccccctctccctccacctcctgcccccacctcccccaggccctgctaagtatctgcagttggaaggagccaccaccagggggcccccttctccagcaccgaccttgggtttctcctctctgaggacacagagcaggggccgcccccctgttgagag

SEQ ID NO: 28421 - DNA, 2300 bp, Homo sapien
ccacttctcctcctctgacccctctgcctttgccatctcttccccaggagaaggttcgcctccgctacaagctcaccttcaccatgggtgaccagacctacaacgagatgggggatgtggaccagttccccccacctgaaacctggggtagcctctagaacagaggggctggggagaggaaggggcagagggaccggtcactgtccagcctggagggaggcattggtggccaaggacaccctttgttgcccatggccattcacccccaggcctggtgcttctccccacacccctgtaggcctcaagtgactcttccccctcctgctccggccccgcccctgctgagccaaacccagtaggaggctgggcctgggtttgtgccgctggggtctccatcaccgggacctggagagggaggggctgtgtagccttggaagaacttgggtcatggggaggaagcacagctgttggggaagggccaggacctcaggcccagccccaaccccagctggggtggggtcttccccacctgtctcttatgccttatgggaaggcccagccataactcgggggccatgctggagctggggaccagcttaggcctcctccataggaacccagtgactggggggtgacgcctacacccccagctatttgcactctggtgtgtggtttgactctgcttttcttccggattggccctgtggtcacagcctcagggggccaggctgggggaacctcacctggcccgtactcctgggggtttccctttgccattgggccccctgagggactgtgggggctcaagggtaatgccagaggcccatggccccagcgaggggctgtggggcacctagagttctcggtgtgtctccttcattcattggcctctgctggggcctcctatgggtgtcttacgtctgtccatccatctgtccgtggtcagaagtggggtcagtgtgtgagtgagagcaggagtatttatgaaaataaaacgtcgtttttcctggaccagctgctctcgtggccctttggaggttgagggagatgggaggggttgagtccatgttccctagggctgccctgtagacctctccacttccgtctttggaggtcaggccgtgggccccctccccaccaccccccgggccctgcaccggaaaaggccctgcaaaggggcctgtggccagtgctgagtcaccagagagggcgctgggctgtggcggaccaggaccgtcccagctggaagtgggcgaccgccagggcctggcaggagccccagctgctacagacaccgagggggaggcccctggctgctcacgacttcctcctgctgtgctcagccctccacacaacctcgatgctgcagcaccccagagggaagtccaagcccagcttctccctccccccagacatcactcccttgcccagcaccaatcgcagtttgtttgggagcagacccagggaccctgagctgggcccctgccactcgcagcggcagctctcccccacacagtgctatcagttttctccaaccaggaggctggggtccaagcttgggcgtggcttcgaggccacacagctgggagcgagggggcgctggtccaggcagatgggccctgttgtgtgggaggccagccctgcgtgtggctctgcaggaaagtgttccctgctcagatgagtccagggaggctgcgcacggtttctcctgagtagatgagcccatacagaccctgggaagtccctcatttaagaagccattttcactttgtctaatctagtgtttcccaatctgaacttggccgctgaacccttctccttagatatagttgtgacatgctggagaattgcccagcacacccgcatcccagcgtgtgtgctctttaacactcatcagcaagcaaggggcccctctctgctgggcccacactgaaagcgcaggctgagagctcctccatgtccgccttactgctgaggggacaagaggcattagctgcaccctgcgggagcctcctatcagatccctacagtgggactcccaccctggcacagccctccagacagaggctggcccctggaggcttccagacaccctgtcccagccacgtggcctcgttcctgttccccttccctaccctgcaggactcgcctccacacttgtgatgtctcctgaagataactccggttggaagtttcttctacctgaaatgaaaccataacccctgcagcatccacttggggtgccagagtcccacctccagcacagtcttcattactggccatggcagggaggagtacag

SEQ ID NO: 28422 - DNA, 2300 bp, Homo sapien
ttacccagctaatgacagccacagcctggccagctagcctcctccacacccttaagctctctctgttcctgctgcctgagccactgtgacaggcacactgccgggtcccagaggctttagcaggagccagctaagaccagcctggtagagaatgacccaagccaacaggcccctggattggggaagggccccacgaggggttggctggggagctctgaggtaccccttctgtgtctgcagtttagaaaggccatgatcccaacacccactgatcaaaacttctgagtccgtaagtctctgattacaattccttctaaggaacagcctataaccctaacccaacctttggggagtccatccttctatgattcaacatccaggtgtgacaagggagggcctaaaatctacccatcacccagctaggaggcacagcagccccacccgaatccgactcaaaggcccagggtgtctctcctgcccaggacccttaggtctggctggaggggagtctggagaccagggcaggagcgcggggcaagagctcagttagactgataatatggctcaggtagtttccaccacagctgcggctacaacccacgtgtactgacccctcaccaggccggagctggggctcaggactgggcaaatctaggagagacagaggtgtaagccaaaccttgccttcaaggactttcagaccagctacagaaccagacaagcccaggcccggtgtggtctgggctggaggcttggctggaacagagcaggggcaccacatagtccagagacttcccgagggacaggaaggatggcacctgaggttcccttgccatgccacccatagtcactggccagcagccttcctgttgggaaaagggagatgggggagggaaccttgcctgacatctcatcctggcctgagctttgatcttggagcctcccaacttcccaccaggattccacactcaggtgggctcccatctgggaggctctggccatagcaggcagctgttgggttcccttctcagctcctcccacccccaatgagtcctgcctcattagggaggagagaagcagccagtgagtgtgccaggccctgggctaggtgctgggagtatggagatgtgtggggccaaggtcctgcctctgagaggcgcccagtctgcaccggcacacagtctgcaccggcacacagtagtggctcaaatagtctcaaactaaactgaaactaacaaagcaaagtgcagagggtgtggcaggactctggggcacaccctcccctcttccccacgcctgcggctcctgatgccacaggggtgcagggtaaggagagcctactgtttcctaaaggcgctcacatcttgtaaaaccagcagttatggagcacttactgtatgcctaactctgtgttgagtggagggccaaagaggagaactactgagtttgggggcagtcagagcagcacctacatcattgccctacaagaaggaagggggactgaggctgtttgccaggaggaatgagaggagacgggcttcacagatggagcaaactgccaggagatgtggagaacagggtgtcgcgaaccgctctgggagggttcctggtggctgaggggtggcacgcacctcccttaaagggagctggcaggggtgtcttgtccactctgcagaatgggcaggcccaggacagctggcccatcagaccattagaaacagcgagtccggagttccaggggcttgtccacggccacacagcagcccgtggccccaggaagccaaagctcccagccagtcatccagtggtggggggtttagttccagggggccagaggtcctctgcggaagagagtgcaaggcagtatccgcggcaggcccagagaggccaggacaggtcagaaaggcctacccctctttcgcttggtaccctttcctctttgcgagggatgcaaaggttatttatacttcgggtctgcaggctgcgggtggggcaggcaccccgcctggggcgggttgcgggcgcaggggcaggaatgggcttacctgcttcccgccaccggggctgggcggggcgctgcggggaggaggagccgggcacaacctgtggacggccgcggccggcggacacacagcagcgggggcccggccgggggtcgcccgggggcccggaagccggggaagagcgaggaaaccaacttggagagaggagtgacctgggggccgggggcggagtcgtgagcgggggaggagagagccggccgccagcaagagccgcgcggcggcccaggaagcgagagc

SEQ ID NO: 28423 - DNA, 2300 bp, Homo sapien
catcctggcctgagctttgatcttggagcctcccaacttcccaccaggattccacactcaggtgggctcccatctgggaggctctggccatagcaggcagctgttgggttcccttctcagctcctcccacccccaatgagtcctgcctcattagggaggagagaagcagccagtgagtgtgccaggccctgggctaggtgctgggagtatggagatgtgtggggccaaggtcctgcctctgagaggcgcccagtctgcaccggcacacagtctgcaccggcacacagtagtggctcaaatagtctcaaactaaactgaaactaacaaagcaaagtgcagagggtgtggcaggactctggggcacaccctcccctcttccccacgcctgcggctcctgatgccacaggggtgcagggtaaggagagcctactgtttcctaaaggcgctcacatcttgtaaaaccagcagttatggagcacttactgtatgcctaactctgtgttgagtggagggccaaagaggagaactactgagtttgggggcagtcagagcagcacctacatcattgccctacaagaaggaagggggactgaggctgtttgccaggaggaatgagaggagacgggcttcacagatggagcaaactgccaggagatgtggagaacagggtgtcgcgaaccgctctgggagggttcctggtggctgaggggtggcacgcacctcccttaaagggagctggcaggggtgtcttgtccactctgcagaatgggcaggcccaggacagctggcccatcagaccattagaaacagcgagtccggagttccaggggcttgtccacggccacacagcagcccgtggccccaggaagccaaagctcccagccagtcatccagtggtggggggtttagttccagggggccagaggtcctctgcggaagagagtgcaaggcagtatccgcggcaggcccagagaggccaggacaggtcagaaaggcctacccctctttcgcttggtaccctttcctctttgcgagggatgcaaaggttatttatacttcgggtctgcaggctgcgggtggggcaggcaccccgcctggggcgggttgcgggcgcaggggcaggaatgggcttacctgcttcccgccaccggggctgggcggggcgctgcggggaggaggagccgggcacaacctgtggacggccgcggccggcggacacacagcagcgggggcccggccgggggtcgcccgggggcccggaagccggggaagagcgaggaaaccaacttggagagaggagtgacctgggggccgggggcggagtcgtgagcgggggaggagagagccggccgccagcaagagccgcgcggcggcccaggaagcgagagcgccgcccacccatccggggcaagagccgcgccgcaggagaggcaggctggaccgggggctccccgggcccgcgacccccgccgtgaccccgcagcccccagctcgcccccaagatgatgaagaggcagctgcaccgcatgcggcagctggcccagacgggcagcttgggacggtgagtgtcacccgcttccagccccactcttaccccggcaggacttgaggggtcgtaaaagggtcgggggagacgggggtgggggaggctggggacagctgggcagccaccctctgagcggccagactcctgctctctcttcctcctctctgaacgccgcccccgtctctcgggcagagctggaggagcaagggtggcctttgggggaagggatgcccccccttaccggattggagggggcttcaggcgggagaatgctctctgccctaggacgctgggacttctctgcctccacgagtctctaagtggatggtcctcctgacctcacttgtcccctctggacaatgggacagttcaccacctctgcttgctgggccggggagggaggagggtcgattagggccacagacctggggcgaggggaggagatgggtcctggcctggtgggaggaggggcctgcccctggcctgcagcgtccctccccctccccctccccccagcccaggggcctcctgcttctgtctcgtttctgcttttcctggactcaggtggaaatatccccaggtctcccagctcccacccccagcctctgagccggtggcacggaggccggaagtttggggagcctctcagagcctgtcttctctgctcctcttcccccagcctcaggagttccccattctctgggtccagggaggggactgggtgtccagagacctggttctagtctcacactgg

SEQ ID NO: 28424 - DNA, 2300 bp, Homo sapien
gtcagaaaggcctacccctctttcgcttggtaccctttcctctttgcgagggatgcaaaggttatttatacttcgggtctgcaggctgcgggtggggcaggcaccccgcctggggcgggttgcgggcgcaggggcaggaatgggcttacctgcttcccgccaccggggctgggcggggcgctgcggggaggaggagccgggcacaacctgtggacggccgcggccggcggacacacagcagcgggggcccggccgggggtcgcccgggggcccggaagccggggaagagcgaggaaaccaacttggagagaggagtgacctgggggccgggggcggagtcgtgagcgggggaggagagagccggccgccagcaagagccgcgcggcggcccaggaagcgagagcgccgcccacccatccggggcaagagccgcgccgcaggagaggcaggctggaccgggggctccccgggcccgcgacccccgccgtgaccccgcagcccccagctcgcccccaagatgatgaagaggcagctgcaccgcatgcggcagctggcccagacgggcagcttgggacggtgagtgtcacccgcttccagccccactcttaccccggcaggacttgaggggtcgtaaaagggtcgggggagacgggggtgggggaggctggggacagctgggcagccaccctctgagcggccagactcctgctctctcttcctcctctctgaacgccgcccccgtctctcgggcagagctggaggagcaagggtggcctttgggggaagggatgcccccccttaccggattggagggggcttcaggcgggagaatgctctctgccctaggacgctgggacttctctgcctccacgagtctctaagtggatggtcctcctgacctcacttgtcccctctggacaatgggacagttcaccacctctgcttgctgggccggggagggaggagggtcgattagggccacagacctggggcgaggggaggagatgggtcctggcctggtgggaggaggggcctgcccctggcctgcagcgtccctccccctccccctccccccagcccaggggcctcctgcttctgtctcgtttctgcttttcctggactcaggtggaaatatccccaggtctcccagctcccacccccagcctctgagccggtggcacggaggccggaagtttggggagcctctcagagcctgtcttctctgctcctcttcccccagcctcaggagttccccattctctgggtccagggaggggactgggtgtccagagacctggttctagtctcacactggcacagatgcctacatagcctggacagtcagaccaccttgcagtgggccttggcatcccccatgtgtccccaggtgggggccaagggcctgtgcacccctgcccacagctgtagtccagagtgctgtgtgactgtgcctaggagtctgagctcctgcacttcccgttcttggggccagctaatactcctcatcccggggtgggctgaggatttgggagtgggcagaaaagaggcttctgtgtcccaaagctgggccccgggtgggtctctcagcctcccctttagtttcatctgtccgccctctctcaggacacagccctgggtggaggaggaaaaacccatgtatcctattcccacccccatggaatgtgctccgactgggatgaagcaactgggccacccagggcaggcctcagctgggagggacagtggaagcactggggtccaggtgccctgctgcggggaagggaagtagggggcgttctaacccaggcaggctcagcagaagcactctcccccccccccccaccactccccgcagcaccccggagaccgctgagttcctgggtgaggacctgctgcaggtacgtgcctgggccgggcaggtgggaaggcaggcctgtgcaggctgtctcggagcagagggccggggcggggacgccaggtaggggcctgggttgagtcattcctcaagctgttggccatggggtccccaggggacaggagaaagtttcctgctcagggggagacagcctctcttgatccttaacctccatacctccttcccaggtagaacagcggctggagccggccaagcgggcagcccacaacatccacaagcggctgcaggcctgtctgcagggccagagcggggcagacatggacaagcgggtggtgagtggggggtcccgggaaggaggggcctgagcaggagacttccatccaatggggaagcaaggtcggggctggggtttccttgccagtct

SEQ ID NO: 28425 - DNA, 2300 bp, Homo sapien
acatatagtaaaatgcatagatcttaaatgtacagttcaatgtcttgacaaatgcttttgaaatcaccgatgtgtagcaggacagatcctcatgtaagtgttttgggtgaagactgggcattttttggtttgttggttagttggtttaattccagggattctaccgtgagctaggatagggtagggaagcactgggctagaggctggtaggctgtcactgcagcacgccccgggagggcaggatccagaatggtcgtggccaattgcccagaatagtaatggggtgacccaggttggctgggtccctgtcttagggaggaggccttgtgatctggaagcaaccacaggtcttgggacctttgaggagccactggtctgcagtgtggggatgaatgaattgtgagctgtggtgtcacagttttgaagttgtctgccaacttcagataaggctgtgacccccaggagcaactggagctccaacgacttgggaaaaactgtaccttgtacccaaccttggaagctcaactagctcctattccccaagtgccctaagccttttgctcctggcctttgcatagatagtctccttggcctgaatgttcctttttcctttaaaaatttcaccttcagggccgggctcggtggctcacgcctgtaatcccagcactttgggaggctgaggtgggcggatcacgaggtcaggagatcgagaccatcctggctacggtgaaaccccgtctctactaaaaatacaaaaaaaaaaaaaaaaaaaaagaaaaaaattagctaggcgtggtggcgggtgcctgtagtcccagctactcgggaggctgaggcaggagaattgcttgaacccaggaggcggagcttgcagcgacctgagatcgtgccaatgcactccagcctgggcaacagagcgagactccatctcaaaaaaaaataaacaaaaaataaaaaataaataaaataaataaaaataaacaaaattcaccttcaggtcagctcctgaaagacttcccttaaatatcaccttctccaggaagccgttcttaaccacccaccccataccatgagtctaggttatatggccacccctaacttggctaatatgggctcccagtgcaatgacacttgattttttttgtttttgagacagggtcttacaccgtcacccaggctggagtgcagtggcatgatcactgctcactgaagcctccaactcctgggctcaagcgatcctcctgcctcagccttcctagttgctgagactacaggcacacgccactacacccagttaattaaaatttttttttttgtagagacagggtctcactatgttgtccaggctggtctagaactcctgggctcaagtgatcctcctgcctcaggctcccagtgctgggattataggcatgagacaccgtgcctggccagacacttgattctaatggttgcttctgcctgtctgtttgggaactctttgggtgtagggttaagtcttggagctagctcagggcctggcacagagcagatttagggaaggtttgaggacagatccatccctgctccttggggaggcttcccagcctcctcccggaaggagagtgaggggtccaggaaacagtgggagcggtaggggcttctgtgggccaagggtggtgctttggttttcaatggagagcaatacctctgtggagggaattgttataaagtttcacaaatgaggaaaagggataccaagaagttaagtaaattgcccagaatgtgagggacaagccaggctttggagtcagacctaggctctaatcccaggcccctgcctgactgccgtgtgaccttggcaggtcacttctgtctgggcctcagtctcctcactgctaagaggtaatggtatttcctgcagtaggagaagattaagtggaaatcatccacagaacagcacagcatgtagtgcagagaaagctctaaaaatgtctgctgtgatctcacttcagacaggaagaaaggaggcaaagaatatgtattgttttcccctttataaaattggcttctttatttcaaggacagaaaataaaactatcatttgggcagctgctccagttttgtccaaaataatttatttaccagccttacaaaaaacatgtcggcaagagaagaatcagtcccgtaggagcaggcaaacctctccttccttccggtggctcccctaggacctgccggagagtggagagtccggtgggggggtccccaagcccagggtggacgaggaaaaggtcaggaaatagaggattgtcctgagc

SEQ ID NO: 28426 - DNA, 2300 bp, Homo sapien
ctagctccaagacttaaccctacacccaaagagttcccaaacagacaggcagaagcaaccattagaatcaagtgtctggccaggcacggtgtctcatgcctataatcccagcactgggagcctgaggcaggaggatcacttgagcccaggagttctagaccagcctggacaacatagtgagaccctgtctctacaaaaaaaaaaattttaattaactgggtgtagtggcgtgtgcctgtagtctcagcaactaggaaggctgaggcaggaggatcgcttgagcccaggagttggaggcttcagtgagcagtgatcatgccactgcactccagcctgggtgacggtgtaagaccctgtctcaaaaacaaaaaaaatcaagtgtcattgcactgggagcccatattagccaagttaggggtggccatataacctagactcatggtatggggtgggtggttaagaacggcttcctggagaaggtgatatttaagggaagtctttcaggagctgacctgaaggtgaattttgtttatttttatttattttatttattttttattttttgtttatttttttttgagatggagtctcgctctgttgcccaggctggagtgcattggcacgatctcaggtcgctgcaagctccgcctcctgggttcaagcaattctcctgcctcagcctcccgagtagctgggactacaggcacccgccaccacgcctagctaatttttttctttttttttttttttttttttgtatttttagtagagacggggtttcaccgtagccaggatggtctcgatctcctgacctcgtgatccgcccacctcagcctcccaaagtgctgggattacaggcgtgagccaccgagcccggccctgaaggtgaaatttttaaaggaaaaaggaacattcaggccaaggagactatctatgcaaaggccaggagcaaaaggcttagggcacttggggaataggagctagttgagcttccaaggttgggtacaaggtacagtttttcccaagtcgttggagctccagttgctcctgggggtcacagccttatctgaagttggcagacaacttcaaaactgtgacaccacagctcacaattcattcatccccacactgcagaccagtggctcctcaaaggtcccaagacctgtggttgcttccagatcacaaggcctcctccctaagacagggacccagccaacctgggtcaccccattactattctgggcaattggccacgaccattctggatcctgccctcccggggcgtgctgcagtgacagcctaccagcctctagcccagtgcttccctaccctatcctagctcacggtagaatccctggaattaaaccaactaaccaacaaaccaaaaaatgcccagtcttcacccaaaacacttacatgaggatctgtcctgctacacatcggtgatttcaaaagcatttgtcaagacattgaactgtacatttaagatctatgcattttactatatgtaaatgatatctgaaaataagttcccaggggactctaacgcagtgtgaagaactactggtctagaccgagggctccagcacccaagaagacaccatgtgcctcgtaccccatcgtacacacacgtttcttgggacttcgctctgaactggagcgtccacgattcagggggcaatgagattcgacccaaaggcagttcatttaacatctgtttttctcccagcaaccagctcgcctaagcttctgattggctggagggcacggggcctttcgcttcgcgttttgtttgtagattcttattggttaagaagagcgtcagtctcccaccgcgtaagagtgtagtcggcgttgaaactcggcggcgactggtccagcagaaccagggacggggagaaggatcaagctagctcttcattggtcccttcccctcggtgttggccacgaatccgcccctctctccaagttccgttagctcgcggcttcgctcctctcccagactctcgcccccattggctgcaggccacgccgtcgccccgccccccggtccttccagcgcgccaattggcggctgcgtggaacgtgccagggagagcgcgccgtgcccgcggagagagcgcggcgcgggaggccggcggccggccggctgcatggcgcgctgcgagaggctgcgcggagcggccctgcgcgacgtgctgggccgggcgcagggggtcctgttcgactgtgacggggtgctgtggaacggcgagcgcgccgtgccgggcgccccggagctgctggagcggctggcgcgg

SEQ ID NO: 28427 - DNA, 2300 bp, Homo sapien
ctggaggtcggtgtcacaaaggccaaattcaggttcccgcgctctatcactctgccagagagttgctggcagaattctgccccacccatcattggggtgcggttggagggttggaggggaagcctgcgaggactgtccctacttgtgagggctgaaacaccaattcccagaggcaggatggaggcaggtgtgtggggacacaggaggtggaggggctcactatatctgttcttgggcagctcacttcccttctcttagtctcagtttctttcctcttcttttagagataaggtctcactatgttgcccatgctgaagtacagtggcttttcacagatgcaatgatagcacgctacagccttgacctcctaggctcaagcaatcctcccgcctcagcctctcgagtagctgggactacaggctgttgccactgcatccggctgcctcagtctctttacttgagaaatgggacaataacttccatctccagagtaatttggaaaccaaagaagaacacacacaaagctgtttcattaagttctctgtaacatgggggactctggctacaacttacatcatctgaacacctactatgtgccaggcactcaccctgatcaccgtcaccgggcatgctgagcactgccatttctcacccaggcagagatgcttggaggttatgtaactgaacacgattacacagctgtgaagctggagctggacctggaactgaggtcaaactccaccgcctttgctccccacacacctgcctacaccctgcctctgggaatggtgtttcaaccctcacacagggggacaatcctcccaggcttcctctccaaccccaccccgatggtgggtagggcagaattccgcccaactccctaagttacaaagggcctcagtttcctcatctgtccaacagggaccacactgctgcgcctcacaggatgacggctacagggatcaaccgccccccacaccaaagcaccctgggcctccctcgcactctcctgttccccacctgccacctggagacgcctcttccccgcccctcacccttaggcgtggaggcgaatgcgcaggtcgcccccatctcagtttccccgccattcccgcgctcaccaggggtccggctgccgtcgctcagcgggtgccatgggtcacggtcggtggccacgagtaggcactcggggtcgcgcaggtgcgcgcacgcctccctcagcttggcgaaggagaagtgctcgtcgtagcccacaagcacggcgcgcacgcgcggggccgcgccgtcccccgcgctcgggtccccggccaggcgcagccccgcggcgcgcagctcggcgcgcagcccctcgccgcccagcacgaacacggcgcccggcgcgtccggaggcccgggcaggcgctggcgcagcaggcgcgcggcgcacagcgcggagctgaagagctgctcggcgcgcagccccccgaagccgaggcgcgcgaagcgcagggccagctcgggccgcgcgcgccggctgttgttgctcacaaacagagccgccttgccggcccgcgccagccgctccagcagctccggggcgcccggcacggcgcgctcgccgttccacagcaccccgtcacagtcgaacaggaccccctgcgcccggcccagcacgtcgcgcagggccgctccgcgcagcctctcgcagcgcgccatgcagccggccggccgccggcctcccgcgccgcgctctctccgcgggcacggcgcgctctccctggcacgttccacgcagccgccaattggcgcgctggaaggaccggggggcggggcgacggcgtggcctgcagccaatgggggcgagagtctgggagaggagcgaagccgcgagctaacggaacttggagagaggggcggattcgtggccaacaccgaggggaagggaccaatgaagagctagcttgatccttctccccgtccctggttctgctggaccagtcgccgccgagtttcaacgccgactacactcttacgcggtgggagactgacgctcttcttaaccaataagaatctacaaacaaaacgcgaagcgaaaggccccgtgccctccagccaatcagaagcttaggcgagctggttgctgggagaaaaacagatgttaaatgaactgcctttgggtcgaatctcattgccccctgaatcgtggacgctccagttcagagcgaagtcccaagaaacgtgtgtgtacgatggggtacgaggcacatggtgtcttcttgggtgctggagccctcggtctagaccagtagttcttcacactg

SEQ ID NO: 28428 - DNA, 2300 bp, Homo sapien
aaccctgtctccactaaaaatacaaaaataagctgggtgtggtgacacgcgcctgtaatcccagctacttgggaggctgaggcaggagaatggcttgaacccaggaggcagaggttgctgtgagctgagatcgctccattgcactccagcctgggtgacagagcgagactccatctctaaataaataaataaataaaagattaccatgggccggttacagtggctcacacctgtaatcccagcactttgggaggcagaggcaggtggatcacgaggtcaggagatcaagaccatcctggctaacacagtgaaaacccatctctactaaaaaaatacaaaaaaaattagccgggcatggtggcgggcgcctgtagtcccagctactcgggtggctgaggcaggagaacggcatgaacccgggaggtggagcttgcagtgagccgagatgacgccactgcacttaagcctgggcaacagagcgagactccgtctcaaaaaaaaaaaaaaaaatcatatagttgtaagtttgtaagctgacttttttttgagacagggtctcgctctgtcacccaggctgaagtgcagcggcaagatcacagctcactttaatctcaaactcctgggctcaggcactcctcctgcctcagcctcctgagtagctgggactgcaggtatatgccactgtaccccactataatcctgtgtccacttctcttcactcaatatcatcctgtacccccaggatttaatatcaatgactgtccgggtcagtggccagcagagagggagtgacagagatctgtccacacccccagtctactcactgggctattaacctgtccacacacactgaccactgccagtcagcctctgctgccacctgcttttgtctgactcaaaccctccaccgtggaggggcctccttttgctcctgcctcccctgcagggccaaattcgcaagatgacagcagtgaagagtgccctggaccggatgtcggtgttacagaggccaataatttttttatttttcgtagagacggggtttcatggtgcaggctgggccttttatttatttattttaaatgcagctgtgcctggaatacgttgacttttttttttttttttttttttttttgagccagagcctagctctggcgcccagactggaatgctgcagtggcgtcatctcagctcaccgcagcctccgcctcccgggcttaagtgattctcctgccccagcctcccaaatagctgggattacaggcatgcgccgccatgcctggctaatttttgtgtttttagtagagacggatttttaccatgttggtcaggctggtcttgaactcctgacctcagatgatccgcctgcttcagactcccaaagtcctgggattacaggcatgagccacggtgcccagccagcttttctttttttttttaattttttaaatatatatgtatatttaagtagagatgggatctccctgttgcccaggctggtcttgaactcctgggctcaagcaatcctcccacctgtgcttcccaaagtgctgggattacaggcatgggccactgtacccagccataaagtgactcttaatagtaccttcctttaacaaccagctcataaaattcctgcataggaaacaatctgtactcccaggtcagagctgggttggacccacccgaatgcaaatccttttgctgccacttatgaagctgtacaaccctgggcaaattacttaatgtccctgagccttggcattctcatctgtaaaatgggcttccagaaacacccagcacaggccaggcagtttagaatgtgcttagtaaatggtgattatcatcatttgttcagggacattagcatgaaggccgaatgttctggcacaaagacacgtctgtgggacaggcacagtggacttattgtgtgaggcaggatggtactgggctggaagacaggactgtcctttagttctaaacagtcctcctattgttggacactcgggagtgttccacagtttggcttatcggttactgtagccacagacgtcttccagcctgcagctttttgtctccagctggaattctcttcttgtgatcactttcccgggggacgcggactgggtcagaggtgcgaacatttctgtgccccgctgtgttccaaaggggctgtgccagtttctaacgccagccgcgtgaattcctgcagcagtaaccacaactgctatttgttaagtgctgttccatttacaaagcacttgcccctgtgttgcccagcgcccgtttggaggtaggca

SEQ ID NO: 28429 - DNA, 2300 bp, Homo sapien
tcctgcctcaggctcccaagtagctgggatgacagacgcctgccaccacacccagctaatgccaccacgcgtggctaatttttgtattttgagtagaggtggggtttcaccatgttggtcaggctggtctcaaattcctgacctcaagtgttccccaacttggcctcccaaagtgctgggattacaggcgtgagccatcttgccccgtctctaagcactgagtcttaatgagtttaaagcttgagtgtaaaccaatcgcagtaatttgattcctctgggtcagtgattggctaatcttctgaccaatgaaacatgaagagaggtctggaatgtttgcctcattcttttttttttcctcttctttttttttttttttttttgagacagagtcactctctgtcacccaggctggagtgcagtggtgcgatcttggctcactgcaacctccacctcccaggttcaagcgattctcctgtctcggcctcctgagtagctggggctacaggcgcaccctgccatgcccggctaatttttgttgcattttagtagagatgtggtttcaccgtgttgcccaggctggtctcgaactcctgagctcaggcaatccactggcctcggcctcccaaagtgctgggattataggcgtgagccaccgcgcctggctgtttgcctcacttttaaaggacatagaggagggagtcacttttcctggctttgggtgtggtcctgggagccgttgcagccattctgtgatcaggaggtatggctgagcatttaactcaggtgaccctgttgcaggtagcagagcagaaagacggcaagaacttactgggtttgtttttccccaacttgtaatttagaaaagttccaaattaatataaaaggtgcaaggataacaatgaataccgctacatccttcacctagatttaccagttgttaatatttgcccagtttgcttaactgctctttatatatgtttactttttgttactgttttagagatggtctcactctattgctgagtctagactgtagtggtgcagtcacggctcattgcagcctctaactgctgggttcacgtgatcctcctgcctcagcctcctgagtagctaggagcacaggcatatgccaccacacccagctaattttttaaaaaattttggccgggcgcggtggctcacgcctgtaatcccagcactttggggggctgaggcgggtggattacgaggtcaggagatcgagaccatcctggctaacacggtgaaaccccgtctctactataaatacaaaaaaaaaaaaaaattagccgggcgtggtggtgggcgcctgtaatcccagctactcgggcgcctgtaattccagctgaggcaggagaatggcatgaacccgggaggtggaggttgcagtgagctgagatcacgccactgcactccagcctgggcaacagagtgagactccatctcaaaaaaaaaatttgcagaaatggggtttcccttttgttttgttttgttttgttttgttttgttttagagacagggtctcactatgttgcccaggctggagtgcagtggctattcacaggcaggatcccactgctgatcatcgtgggagttttgacctgctctgtttccgaccagggccagtacagtcctccttaggcaaacttgtggttgcctctcccaggaggtcaccatattgatgccaatcttagcacactacagcccacgattcctgggctcaggcgatcttcctgcatcagccttccaaaacgctgagattacaggcatgaaccactgtgcccagcttgtttacattttttaactgaaccatctgagagtatgttacagatgctaacacagttcaccgaaaattcttcagcttgtatgacctaagagcaaggacagcctacacagccaccatccaggattacacgagaacctagacatttgatgattttattgagtcactgaattaatgtgctatggaaactcccaactgcagacttttttttttttttttgaggcagagtcttgctctgtcggccaggctggagtgcagtggcgcgatctcggctcaccgcaagctccgcctcccgggttcaagcaattctcccacctcagcctcctgagtagttgggattacaggcatgcccaccatgcccagctaattttttttgtatttttagtaaagataggggtttcaccatgatgaccaggctggtctcgaactcctggcctcaagtgatccacctcggcctcccaaagtgctgggattacaggcgtgagccgccatgcctggc

SEQ ID NO: 28430 - DNA, 2300 bp, Homo sapien
cagaagggggacggccaggtggagaaggaggtccccgtgacaaccccccagcatgcccctcattttgcccagtgctccccacgccccttcctccaccaggttcctgagtgtaaggtgagcacccctcccacccaccctcaattctctgccacagtgatcttccctagagcccaaatctggcctcagtactcaccctccctctagccctggctccccagcctcctcccatacaacaatgtccaagccctgtgcccagcccatgaggccctccatggtccaggtcctgttggcttcccagcctcatccccgtttttcccccacatgcccggaacactgttctccagccctggccttctcattctggagcttctgcccatggtggaaagccaggcacttctccgcctacccttcacgacccacctcctttactcatgcagccgccagcccaccatagcactttctcatggcttcccttacagccatcatcatctacttctttttatttttatttttattttttattttttttaattgagactgagtttcactcttattgcccaggctggagtgcaatagactgatctcggatcactgcaacctctgcctcctgggttcaagcgattctcctgcctcagcctcaggagtagcagggattacaggcatatgccaccatgcccagctaattttgtatttttagtagagatggggtttctccgtgttggtcaggctagtctcgaactcctaaccttaggtgatccgcccgcctcggcttcctaaagagctgggattaccggcgtgagccactgcgcccagcccatcatctacttcttaacgtggttgtggtcagattccaccccaactatgcgctccttgagagtggggactgggaggggttcagctttgaatcctcagagcccagggccaggtacatagtaggtgctcagtaaaatacctgctgaacactcagggaagggagggctgtgccgggcctcagaggagatgttaagagagcagacagggtggccaggcatggtggctcacacctgtaatcccattactttgggaggctgaggcgggtggatcaactgaggtcaggagtttgagaccagcctggccaacgtggtgaaaccccgtctctactaaaagtacataaattagccgggtgtggtggtgggggcctgtagtcccagctactcgggaggctgaggcaggagaatcagttgaacctgggaggcagaggttgcagtgagctgagatcacgccactgcactccagcctgggcgacagagcgagactccatctcaaaaataaatatataaataaataaaaataaaaaagagaaaggacagggtgcacagagccaggaccccaccccctcctggtctggaccaccctgggccatctcctaagcttgacactctcaggcctgaggctgtcaggccagggcgctttgactatcccctgcctgcccctgaacgcggccaagcccgaggccttagccaagccctgcagcctcaggcttggcgcccggcccagcctttctttagccttcccgaggagccagcgagagagcgctgcagcagccgcagtccttgcttccggggaaggcccgggtggggccagggcctgtggttaagtcagtggccctctgcagacgcgcacgcagcaggagccacgccctggtccctgcccgggagtggcctggtctcccccagctctgattccctgaaggaccctgcacctcctcagccatcttctctgggcaccccctgagcccagcctgctggccacaggccccttcccgccaacttgtgggcctagctcatcatcaaactattttccactggcttcccccaatctctgccacagcacaattttggtggggaggtggagagggatgaaggagaataggaggtggagcttggactctggccgggggcggcggggtgagggggggcagcagctcgccactctgattggtcacctctgctccaaaactggcttcaaaattccacggactccgcccccagtggcccccagccctatcctgacttgcaattggctgaactttcagggggcggggctcacccggtccggtccagttaaaagggtgggagcgtccgggggcccatctctctcgggtggagtcttctgacagctggtgcgcctgcccgggaacatcctcctggactcaatcatggcttgtgtgagtgtggggacccccccccaaggtccaggggatagggcaggaactgatggccagaggagagctgggcagatcgggagcagattctagcccc

SEQ ID NO: 28431 - DNA, 2300 bp, Homo sapien
tgggattacaggtgtgagtcaccgcgcccggcttgagccttcacttttcatctccaaccactctgggtgggagtggagccctggcaaaccaagcaggtcgaagcctgggactgggaggagacagaccagctgcagaaggtgactctctgggcaccttcagccagggtgatgcctctacccaggaaggtgccaagggtggctttaaggcactgccactaaggggcagaagcagctggtcagaggtgcagtccagcaccctaagggagccccctgcattgctctgggccacagaactgaaaggccaggcctgtagtttaagggtaacttccagctgggcgcggtggctcacgcctgtaatcccagcactttgggaggccgaggtgggtggatcacctgaggtcaggagtttgagaccagcctgaccaacacggagaaaccccatctctactaaaaatacaaaattagccgggcatggtggcacatgcctataatcccagctactagggaggctaaggaaggagaatcgcttgaacctgggaggcggaggttgcagtgagccgagatcgtgccattgcactccagcctgggcaacaagagtgaaactccgtctcaaaaaaaaaaaggtaacttcctctcaggatcccacatagatttcccaagcagaggagctgtatggaatgaattcagcattctggagtgctgcacttactgcctgcctccttccaaaactcagagtcagggtacaaagatcagctgggcgtgctggcaggtgccagtaatcctagctactcaggaggctgaggcaggagaattgcttgaacctgggaggcggagactgcagtgagccgagatcacaacactgcactccagcctgggtgacaagagcgaaactctgtctcagaaaaaaaaaaaaaaaaagcggatgaaggattctggcatacaatccaagtgactaaaaatccccttcaggcgttgtttcactgcaatctttcacaaccatgccctcattctcagtcaaggatgttattatacactcattccacctttgggcaaagtgaggcacaaagagggaagatggcttgtgcagaaaacacatgtatgcgtgccttatgttagacaaactttacataattaacttcctcacaatcacagctgtcaaggtttagtccacggaccagcagcattagcatcacctgagaacctgctagaaacggaaatccactcagaaacctctatcggatcagaaactccggggtggggcccagcgatccaggtttttagccctctaggggattctgatgtatgccaaagttccagaaccagtgtctacaacaaccctacgaagctactatactttcccttattttacaaatagggtgaggcaccgcgaagaccattggtctgggaccacacagctgtaggtgtgatgccagtatacaaatccaggcagtttggctccctcttggagactaccaacgagttgacatcagcatctaaagtaggggccagcacggtggctcacgcctgtaatcccggcactttgggaggccgagatgggaggaccacttgcggtcaggagttcaagcagtctggtcaacatggtgaaaacttgtctctactaaaaatgcaaaaattagggagtatggtggcgcacacctgtaatcccagttactcaggaggctgaggcggagaattgcttgaacctgggaggcagggattgcaatgaaccgacatccgccactgaactccagcctggacgacagagcgagactccatctcaaaagcaataataataaattaaaggaaaaaaatatccaaagtagggttagtacaggaaatttgggccattcacgagtaactccatattgagtgtgtgccaggcacagtcctaggcagtggggtccaggggacctcgctctcattgaagcgaggctggggaggggctggagctgggagtcacggagagatcagggaccagcgcgtcatgcatgggaagagggaagaaaaggagctgggaggtccctttaaaaggctgggcctggtggacggaacttcggtgcgacgctaaagtgtgcgcccgggaggatgagtacgctacacccggaagtgtcttcagggagaggaagccggcggcctcactgctatgggccgcaacaagaagaagaagcgagatggtgacgaccggcggccgaggctcgttcttagcttcgacgaggagaagaggcggtgagtggcaaagccggaccggactcccctcgagctgttcttcgcggccaaggccaggtctggggccgagcacg

SEQ ID NO: 28432 - DNA, 2300 bp, Homo sapien
ccagctacttgggaggctgagatgagaatcacttgaacccgagggccagaggttgcagtgggccaagatcacaccactgcactccggcctgggtgacaacagcaagactccatctcaaaaatgagagaatgaggccaggcgcagtggctcacacctgtaatcccagcattttgggaggccaaggcgggcagatcacgaggtcaggagatcaagaccgtcctggctaacacggtgaaaccccgtctctactaaaaatacaaaaaattagttgggcgtggtggcgggcacctgtagtcccagctacttgggaggctgaggcaggagaatggcatgaacccgggaggcggagcttgcagtgagcagagatcgcgccactgcactccagcctgggcaactgagcgagaatctgtctcaaaaaaaaaaaaaaaaaaaaaatgagagaatgggtgttggggtataatcagcagattatttcacagaagccaaatatataaagggctgtcatgaggggatccatctgtgtggagctaaagtcacagcagacatttatccatcctcggttttcacaccaaggtcaggccctgtgctagtacatgatgagctgtggccatagttacctgaggctgggctcagcccattaaaataaaacttcttttggtacgatctgttttggggtggcctgagctctccccaggggggtgaggtgaggaactgtgggggcaggtgttctggggtcatataagcctcagcgtccatcctttccaaggtcccagtggtgctgacgaccttgacgcccccaggtttgagccattgaccttcctttggcttgcaggtggctctggtgaggggcttcagttcctcctgagcttggagagctcactgcctgctcccttgtgaggactgctagaaatgcccgccttgttctgagctagcattggcctcccccagccaccttcagaggtttgcaggctgttctcagcctttctcgatctcctcacctttgagccacctccaaggagaagccttctctgccttcctcctttctccacctgacctcccatgatagtaggtgtttccttcttttaaacactgaacacagtgaatcctggtttgtccctcgaaccagaccagagctttctgagtgagaaattgtatcttagtcatttctgtttctgctctgggcacaagcttgtgtcaatgtaggttctcagccaatcctgtctgaatccaacccccaggtgatccccaacaactctcaaaataatctaagatttctgtgaccctagtgccaagctcacctgcctacaagtgtctgaatctagtttaccttccctgtctcatcactgcacccatctctcctggactcctgctgcaaccttcctccctgtccagtgaatttcgccctcctcctcccatcccagtcgccacaattggcaaatatcaaccaaaaggaaaaaagatgggaaacaagtttttttttttttttttttttttttttttaaggcggagtctcactctgttgcccaggctggagtgcagtggtgtgatttcggctcactgcaacctccgcctcccgggttcaagcgatgctcctgcctcagccttctgagtagctgagactacaggcgcacaccaccacgccaggctattttttttttcttttttatacaagagttttgctctgtcgcccaggctggagtgcaatggcgctatctcagctcactgcaacctccgcctcctcggtaagaaaactgtcatgacagagaggttaagactctagtccaaggtctgtgctaaagccagcccagcggactgtcggcagaatgaaccaacgggaaagaggtcagaaggagccagatccgccagtgccagccctctccagggctccctggggacccccagcgggcaagggctgcaggcggcccaggctaaacgtgcagtgagtcccgctctcagaggtatctgcgccccgcctgcctccgccccgccccttgttctggtttgtccagtcccacagagtcccacagtcttcatgtaaatgaggcacccagagagagcctatgcgagcgtggcaggggcgtggccttccacctcccgagcatcgctctgattcattgttaaaataaagaggccatgaccctggcactcccaccccggcagcccctgtgcgtggaaacccagccaaggttagcactgggcctcagaaaagaggagctggtagggggaggcctacaggaggggtaggggtcgagggatccggggaggaactggctgaatgcctggatggagagggtcccggg

SEQ ID NO: 28433 - DNA, 2300 bp, Homo sapien
gctactcgggaggctgaggcaggagaatggcttgaacctgggaggcggaggttgccatgagccgagatcacgccactgcactccagcctgggcgacagagcgagactctgactcaaaaacaaaacaaaacaagaaatggggggaattccttggattctgattgaaggaaatagaactgggaagggaagactgtcaggtggctgctgttgggcccacctctccctccctggggtcacacaggccattgtcaacacttctctccacaaatttgcttcttctctgtcttgtccgtggatccccagaccctgtggccttccagttcttgaacccatctcttgagtgagtcagggtctcaatttcaaattcttgacctcagcttgagagaggcatccaagcccttgtctaatcagccttggtcagagaggtggagtcacttggtacagacagtgagacctgtaggaggagggtgtggggtttgccctaatcactggtcctaagggacaaagaaaggtagaatatgagagctgcctggacctctccccttaccttgagcccctctcttctctctccagacaccggcggtgggggccggagcgcaggacagcactgggcaaggctccggggagaaagcgggttgtccctggagcggcaccggtcaacactgacccaggcttcctccatgacaccacacagtggacctcgaagcaccacgtctcaggcttctcctgcccaaagggacactgctcaggctgcctctacacgtgaaatccccagagcctcctctccccatcgaatcacccaaagggacacctccagggcctcatccacccaacaggaaatctccagggcctcatccacccaacaggaaacctccagggcctcatccacccaagaggacacccctagggcctcatccacccaagaggacacccccagggcctcatctacacagtggaacacccccagagcttcctctccctcacgaagcacccaactggataaccccagaacctcttctacccagcaggacaacccccaaacttcttttcctacttgtactccccagcgggaaaaccccaggacaccctgtgtccagcaggacgatcccagagcctcctctcccaacagaaccactcaacgagagaattccagaacatcctgtgcccagcgggacaatcccaaagcctccagaacctcctctcccaatagagccacacgagacaaccccagaacatcctgcgcccagcgggacaatcccagagcctcctctcccagtagagctacacgagacaaccccacaacatcctgtgcccagcgggacaatcccagagcctccagaacctcctctcccaatagagccacacgagacaaccccagaacatcctgtgcccagcgggacaatcccagagcctcctctcccagtagagctacacgagacaaccccacaacatcctgtgcccagcgggacaatcccagagcctccagaacctcctctcccaatagagccacacgagacaaccccagaacatcctgcgcccagcgggacaatcccagagcctcctctcccaatagagctgcacgagacaaccccacaacatcctgtgcccagcgggacaatcccagagcctccagaacctcctctcccaatagagccacacgagacaaccccagaacatcctgtgcccagcgggacaatcccagagcctcctctcccaatagagctacacgagacaaccccacaacatcctgtgcccagcgggacaatcccagagcctccagaacctcctctcccaatagagccacacgagataaccccagaacatcctgtgcccagcgggacaatcccagagcctcctctcccaacagaaccacccaacaagacagccccagaacatcctgtgcccgacgggacgatcccagagcctcctctcctaacagaaccatccaacaagagaaccccagaacatcctgtgccctacgggacaatcccagagcctcctctcccagcagaaccatccaacaagagaaccccagaacatcctgtgcccaacgggacgatcccagagcctcctctcctaacagaaccacccaacaagagaaccccagaacatcctgtgcccgacgggacaatcccagagcctcctctcgcaacagaaccatccagcgagacaaccccagaacatcctgtgcccagcgggacaatcccagagcctcctctcctaacagaaccatccaacaagagaacctcagaacatcctgtacccgacaggacaatcccaggacctcctctcccaatagag

SEQ ID NO: 28434 - DNA, 2300 bp, Homo sapien
ctgggatcacagccatgtgccaccacgcccggctaattttttgtatttttaccagagacggggtttcaccatgttggccagcctagtctcgaactcctgacctcaggtgatccacccgcctcggcctcctaaagtgctgagattacaggcataaaccaccgcgcccagcctccagtgctgtgcatctctttatttacttattgtattttgcaaaattgaccaaagtatgtgtctctccagcctgtcaaatgagaatctggaaggccaggatgacaggcaggagccaggttgtgatggttcctgactgcctagaagaggaatgtagcactgatctgtcagcattggtgatgtgtggaagaactttgagcagggaagtggtctggtcactgtgttgcgggtactaggaggagtcgcaggggccagaaaagcctggaggaggctggtgctgttaggtgcccagggcactggaccaggaccctggtggtaggtgaggtctcctgcgtgttcattcactctcccaaggactgactgcctgagtgaggtgcaagggtagggtgagaaaactcagcccggggtgccagaaggccagtttctagagttagatggacttaaccttggcctcattcctcatggtggagagactcctggcagcaaatgctgggaaagaacttcagctccctgggcctccatttctttatctgcaaaatgggaacagtaattataaaagcaataatttttttttttgagagggagtctcgctccgtctcccaaggtggagtgcagtggcacaatctctgctcactgtaacctctgcctcccgggttcaagcgattctcctgcctcagccttttacatagctggattacaggcgcctgacaccacgcccggctaatttttgtatttttagtagagacggggtttcaccatgttggccagtctgctcttgaactcctgatctcaatgatccacccacctcagcctcccaaagtgttgggattacagacctgaaccaccgcgcccggcaagggcaataatttttgaaccccaaatcaagatgacagaataattgaaatgccaattattccaagcttccctgcctccttgcctaaggatagctaatgagggataaagaggttgtcctaggtgccttacttgaattaacacttaatccttccagcaacctcatgaggtaacagcattaccccattttacagagagtgaaattgagcaccgagaggtgccttgcttaaggtaacactaggctggaatccccgtgccacacgaacttcctagtgcatttagcaaccaattccaccacggtccctactcacctgcaggaaaagagcatctaacaaacggcccagcgttctgggaacctgagcaacgggtgcacgcccacacctgaaaaaccccaaaccaaaaaagacccatttgtgaggagtgggcatttgggagagaccctgccatccaagaactcactttgtgtccagcttactcgctaggaattccgcctcttcctgtgtgacctcgggcaaatcggctcacccctctgagcctccgttttctcattagcaaaataagacctccctcccaagtctgtggtgaggacgaaaatcgactcttggcgagtgggacccgctgagtcgttagtactgggtgctttgccccggtccccgccaaatcacggcgccgagccctagcggacccatcgctccggggccgggtcgggaagcgcagcctgggcgagtcgtgcccacgcccggccgcccgcatcctccgcccccgcgccattgccggagtcacctgcaccctgggcccttccttcctcccagcgcgcccgcggcccgggcccgcccgccctccggccgccaccgccctcccttccctgcggccccatccgcccaccccgccgtcccgccgtcccgccgccccgccgccctagcgcgcccgtcccgttgcggcaggtcccgcccccggcccgtctcgcgcttccattggcccgccgcggcccccgccgctgtttgtctcggcttccccgccacccattggcccgctcgggtcctcccaggaagtttgaaaaaaaaaaaaaaaaagttttatgggcggatggaaggggccggggcagcgtcggggaaaggaagggccggaggcgcggcggcgggcggccgagaggggcggcggcggcggcggcggcggggttcccgcgccgcggagcccggcccgagagccgcgtccacgttcctgcctcctgctcccgccgccctggggcgccgccatgacggtgagtgccccagtcagcc

SEQ ID NO: 28435 - DNA, 2300 bp, Homo sapien
ttgtcggccatgacctcaggcatccggcggaactggatcgaggctctgagaaagaccgtacgtccaacttcagccccagatgtcaccaagtacgtactaagctggactggggccttgagggaggcacttacccttgcgtccccgagtgggtttctaggtactcacctgagggctgcacctttctgggccctcgtttctctgtcaacaacatgggaagagagtagtgagcattctcggtatcatccagaagtacactgagggtttgaggtttgatctgtcttctcaaatgtgatggggcctcttctctttggaggagatgcctgtgagtcaaaagcccctgccaggtggctgttctgtctctgtgtctgtgccgtgggggccgtgtctaagcctgtgttaggaaggggtggttaggtagttcagccttggcgcccacacctcccgggatggggagctcactccttctggaggctgccacgggcactggggcaggagggctgagttaccgagtggcagagccccccacagtttatacccagatgcccatggcgggctgggacttggagctgctgggcagcgggaacagagtgtggtattaaagggggctgggctgggtgtagtggctcacacctgtaatcccagcgatttgggaggctgagatgggaggatcacttgagctcaggagttcaagaccagcctgggcaatatagtgagacctcgtccctacaaaaaatttaaaaatcagctggccgtggtagggtgcgcctgtcagctgaggtgggaggatcacctgagcccggaggccgagtcccccagactggccacaccgcggctattcagccttaggccagaggctttcctgtctaggtttcagagtccccatctgtcacgttagcatgtcatgtctgtacatgtgccaggatgtgcccagagcactttgtgaactctgaagcactgtgcagttggactgttatttagcatctaggcccagctgctttaagaaagaaaccccgggcacagtaacttcatcgagatagatgttcatgtctcccttcagaacagccccgaggtatgcagtcctggcctggtggggctcgctctgccgtttcaggggagccacctgccacacccactcggcagcctatagtcacatggctacaagtagctgtgggaatactgcgagtgtagtttttggcagggtgaccacgtacccagctatgactgtggataaagagaattgccatagttgttcagagtctctgcaacttgtgttctgtgcaccccgaggtcccgccttcaccccatcagcagtgactgggcatcccccttgccactgtgagcctcgggaacctgggacattggtctcctacatcacctcattgatcaccatttgcaaaaagccccctgcctgctttccacgttcgcccaccctgtcctcacatccatcctgtgagaggcgtcgctgtcccacattacagatgaggtcactgaagctcaaagagggcaaagagaccagtgtggtggttcacgcctgtaatcccagagctttgggaggctgaggtgggaggagcacgtgagcccaggagttcgagaccaacctgggcaatatattgagaccccatctctatcaaaaatttaaaaaattagctgggcgtggtggtgcatgtctgtagtcccagctactccagaggccgaggcaggaggatcacttgagctaaggagtttaaggctgcagtgaactatgatcacaccactctacttcagcctgggcagcagagtgagaccctgtcccttgaaaaacaaaaacaagaacgggggcgagggaagccgggcatcctggtgggtccctgggctgtcaagaggtggagctgggatgttcctggggtctgttaaccaggaagctcaggtcgggctgcttccttccctggggtctgtctccagcccctggcacagggcctggcacacaggtgtcgctccaaaagtgctcattgtgggactgcaggggtgaggacccacctgacgtggctctgctggtgccctaggctctcggactctaacaaggagaacgcgctgcacagctacagcacccagaagggccccctgaaggcaggggagcagcgggcgggctctgaggtcatcagccggggtggccctcggaaggcggacgggcagcgtcaggccttggactacgtggagctctcgccgctgacccaggcttccccgcagcgggcccgcaccccagcccgcactcctgaccgcctggccaagcaggaggagctggagcgggacctggcccagcg

SEQ ID NO: 28436 - DNA, 2300 bp, Homo sapien
gtgcaaactgtaaagcgctgtgcaaataaaattattgatcgtcgtgtcattggattcatccagtctttaagacatgcacggatctggggcgggggatggggtgacatggttctgggctctcagggtggaacatctcggatacggggagggggggctatttgggtgcgtattaacccaaccaggtcttaatgggaacccgagttgtctttgaaaataaccaaaacaaagccaccagaatgttgtgttttcaaatgacgaaacttaagagaaattgacaccatcaaaagacgaaccttgaccttttgaactaacctgaccccccattgcttcccttccccgcctgtgccacggagataagcccagagagaaggcatctgacaccgagtcttgcgctccccctcccccttcctcccctaatcatttggattaatccatcccttggcgtgcgggggaaacccattaatttgtcctggcttcagagactcccaggtccagtaggagccctcccacacccacgcagctacgatcccgtccccaacatcaaaaccctcgaacccctcccctttacccctccccagtagcccactgtgtctgcaaacagctcttggaccataccgggatgcgttcatcattttgaccagcaacaaactcccactcccagggtattgtttaagtgaacagtgaccggcctctatgcttagggaataaaagcggggttgtgggagaggggcccagggagcaaacgtcgcagaatctcagcccagggccgctgccaagcggacccggcacgtgagtaggaggtcggccgcagacaaggggtcctagggtctctgaggtctctcctgctggcctctgggcccctaaagcccctcgagcttcagaactccctacagacagtggcgccccgtgtccgcctcgtctacacctgccaagcagcacgggaaaatctgtgtgcattttaacaaagacatcgcatcttcccagcaaaatggcggtggtcgcggccacggctctctaaacaactccacactttccgaggacaggtcacaacccaagggacataaccccctcctcgacctctaccctagcgccccgctttcccaagtccccaaagcactcagggcctctcctcattacaggggccccccggaccgtccctggttagagcttctggggcagcttctccattgtggaccgccctcccccgcccccacattgccttcaaggagccttgggacggggactgaacccccaggctgggcctcacggatggggggcagcgagttctgtctctgacaccccaaaacttccaggctaagagaagcacacaaatgaattcccgattagggtatatgggagatgtaggggtctttgaggagaagaggccacccgggaggccctcctcatctctcagagggtccgggcagcactgggggttcggcctcaggagggaacctcaaggcagaggtcggggggcgcgctgggggagagacggcagaggagggggaagggacaaagtttgaaagtacccttccaactctttcagggaaagtttccttgggggccccatggacagagggggtagaggtgtggagggaccggtggcggggtgacccccgagaggtgaccggaccccgggggagcgacccctcccccctgtcccggctcggcccggctgggagtcgcccagctcggggccgcgtgtgttagttggggccgctttccggcagctccaccgggctaggggaccccgcagcgggccgggagcagagcccccggtagcctcaggggagagctttgctacggggggtttcccgcaccgaggctccctagccccgcagagccagccccccgcaaaggggaaatgtgccggcacaccagcggtcctcggcgccgtttggggtgcgtggcgggcgcggggggcggcggccgggccagcgggccgcccggcggggaagcccagggagccaggcagcggcccagggcggcggcggggagcaggaaggcccgggccggggggaaaggtcggatttgctcggcggaagaaacacagatggcggcggcgcagcgccattccgggccgggagcaggcagccagcagccctgtcctcaccgcggtccgcccgccgccgctaaatacccggatgcgccgcccaagcgccagacgcggagctgggaaaagggaggcagaggaggcggaggcagaggcagaggcagaggcagagcccgagcccggtgccgagaccaagcgacagaccggcggggctgggcctcgcaaagccggctcggcgagctctccc

SEQ ID NO: 28437 - DNA, 2300 bp, Homo sapien
cgacgaacccaagaagtcagtggccttcaagaagaccaagaaggaaatcaagaaggtagccacgccaaagaaggcatccaagcccaagaaggctgcctccaaagccccaaccaagaaacccaaagccaccccggtcaagaaggccaagaagaagctggctgccacgcccaagaaagccaaaaaacccaagactgtcaaagccaagccggtcaaggcatccaagcccaaaaaggccaaaccagtgaaacccaaagcaaagtccagtgccaagagggccggcaagaagaagtgacaatgaagtcttttcttgcggacactccctcctgtctcctattttctgtaaataattttctccttttttctctcttgatgctcaccaccaccttttgcccccttctgttctgactttataagagacaggatttggattcttcagaaattacagaataattcatttttccttaaccagttgtgcaaggacagcaacaaccaatctaatgatgagaatgtacttatattttgttttgctattaacctacttacggggttagggatttgcggggggggcttgtgtgttttgttggcttgtttgccatgaaggtagatgtgggtggggagaagacacaaggcagtttgttctggctagatgagagggaacccaggaattgtgaggttagcaggaatatctttagggtgagtgagttttctttgagttgggcacccgttgtgagagtttcagaacctttggccagcaggagagaggtggtagggagcagccagccggcaaaggaaggagggggaaaaaaaccgccaccgggctgacttccacctcccagtggtgagcagtgggggcccaaacccagtttccttctcatttttgttagtttgcgctttcggcctccctattttcttagggaaggggagtggggtccaagtgacagctggatgggagaagccatagtttctcccagtcagctaggatgtagccattgggggatctttgtggcttcagcaaattctcttgttaaaccggagtgaaaacttcaggggaagggtggggagtcagccaagtgcctcagtgtgccctgttgaaacttaggtttttccacgcaatcgatggattgtgtcctaggaagacttttcttttcctctggatttttgttcctcctgtacaagaggtgtctttgcttggtttggtggggctgcggccacttaaaacctcccgatctctttttgagtcctttattataagtagttgtagctgcgggagggggagggggagtgggcgggcagtggatagtaagacttactgcagtcgatttgggatttgctaagtagttttacagagctagatctgtgtgcatgtgtgtgtttgtgtatatatacatatctagggctagtacttagtttcacacccgggagctgggagaaaaaacctgtacagttgtctttctcttatttttaataaaatagaaaaatcgcgcacttgcgcgtcccccccccacccccttttttaaacaagtgttacttgtgccgggaaaattttgctgtctttgtaattttaaaactttaaaataaattggaaaagggagaaactgagcggtgtatttttcctcactttgaagactggagaatgaatgcggagcggttaggcgggcaggcagtggggacatctggggcgtttgcacctgagaatggcgggggagggttcaggagctggacagaagccaggaatccttagtcccggaggctgcggaacgtgccttagccggcttctaggcttctgcctttggggtccagagggtaccccatttccggccgagaggtgagtacgtgggaatgcggtggggagtctggtgggcttggccctgacgcgacttcctccgcccccttccctcccctctgccatccggacttcggcagtctcaacttacaagtcaagcctctcggtccctggcggatcccgccaggccccgcccacccgtcctaggcccgcctccccgcctttttaagcgagcccccctagctccgattggctgctggagcccggcccccggccacgcgaccaggctgcgtccgcgatgcgcacggctcccaggcaggcaggcgcgctcgggcgaggtaggagcgatgtggcctgggaacgcctggcgcgccgcactcttctgggtgccccgcggccgccgcgcacagtcagcgctggcccagctgcgtggcattctggagggggagctggaaggcatccgcggagctggcacttggaagagtgagcgggtcatcacgtcccgtcaggggccgca

SEQ ID NO: 28438 - DNA, 2300 bp, Homo sapien
tcaggatttgcagagcctgagggaggagtctctggagtctgccgaaaggagactcaagtcctggtttcccactccaggaaaccccagtcaagactaggaatcctttttttttttttttttttttttttttttgagacggaatctcgctctgtcgcccaggctggagtgcagtggcacgatcttggctcactgcaacctccaacccctggcttcaagcaattctctgcctcagcctcccgagcagctgggattacaggtgcccgccaccacacccagctaatttttgtatttttagtagacatggggtttcatcatcttggccaggctggtcttgaactcctgacctcatgatccacctgtcttggcctcccaaagtgctgggattacaggcatgagccaccgcgcccagcctcttctttttttttttttttttttttttgagacaatgtctcactccatcacctgggctggagtgcagtggcgtcatctcggctcattgcaacctccacctcccaggttcaagcgattctcctgcctcagcctccagagtagctgggattacaggcgcccgccacgacgctcagttaatttttgtatttttagtagagacaaggtttcgccacattggccaggctggtctcgaattcctggcctcaagtgatctgcctgcctcagcctcccaaagtgctgggattacagacgtgagccaccatgcccggcctaggaaccttttctaaacatggattggagcaagaaggtgcagggataggggatggagtcacatcaggctgggccacaggaggtgggagtgccagagactggctgggccctgggcacagaggggttaactacaaagcaaatcacagagagcgagatcaatgggttactggctgcagagagaggaaaaggcagcagcaacgcagagaggcagagaagagccaggcagaagagcctgccacctgggggaaatcagggactgaggaggaagtggccagtggctactccagagggagtgcccaactccggctcagcagagggggcagaggagaggaggggccttaaaggcaaagggggagaagtagaaggcagaccagtacctgcagggaggcaccaaggggcagccgctgaatcaggaggcccacccagcccggccattccacccaggatcaagcccactgcccaaggcggaggtgggtgttgcccatcctgggctttggggacctactgcatgctgggtgctgggatgggggcagacattgcctttcttccctactccctgcctgacccccctttcccctactttgtcccaccaccccagtggtctcaagcctgcaaggagatccacaggcagtaggagacatgggctgtagagtgggatgggggtgagcatgggtgcggtgtgcacacacacaagttgtcagaggcaccacctgttacaagctctcagatgagcactctagcttaagaggcaggataccagggtggcaacagccccagagctgccatttcgagtgtgatattatcctcccatgtcccctctctgggcctcaatttccctatgtgcagagaggaagcagtgacctacacggtcttcccagttttgccattgtgatgatctcactatactggaccctccaatgactcagggatgttacccgtgttttgctaaggctacagcttgtagccagagaaagccctaaacccatgtcccagggtctcccctgagcttcagatccccattgagaaggaaaacataccagtttctgggtttggcccctccccccatcgccatatcttcatcctacttcgcttgtgccttccccagcctcgtgggttgaaagtgtccctcaaatacctaggtagtcctccaggcaggactccaggggtgttccttaggaaactgaggaactctcaccccttgaacaccacgagcttgctcacacagtgacactcagcgatgactttggctctgctctcccctcctccatctcccacgagcttccagcccagaacacctggccagacccaggtcgggggagttagatcccggggtcaagcaaccagaactgggggctcttgcctgaggattccagcttctcttcccaggtgcccgtctgatggggagatggctgatgcccagaacatttcactggacagcccagggagtgtgggggccgtggcagtgcctgtggtctttgccctaatcttcctgctgggcacagtgggcaatgggctggtgctggcagtgctcctgcagcctggcccgagtgcctggcaggagcctggcagcaccacggacc

SEQ ID NO: 28439 - DNA, 2300 bp, Homo sapien
acaaactcctgacctcaggagatccacctgtctcggcctcccaaagtgctgggattacaggtgtgagccaccatgcccgggccatttttttttttaaactttaagttctgggatgcatgtgcagaacgtgcaggttcgttacataggtacacctgtgccgtggtggttttctgtacccatcaacccgtcatctaggttttaagcccctcatgcattaggtatttgtcctaatgctctccctccccttggcccccaccccccgacaggccctggtatgtgatgttcccctccctgtgtccaattattgaccatttttacatcctcttttatgaactatatgttcaaatcttttgtcctttttttttttttttttttttttttgagacagagtttcactctttgttgcccaggctggagtgcaatggcgtgatctcggctaaccacaacctctgcctcccgggttaaagtgattctcctgcctcatcctcccaagtagctgggattacaggcatgcgccactacgcccggctaattttgtatttttagtggagaccgggtttctccatgttggtcaggctggtctcgaactcctgacctcaggtgatccacccgcctcggcctcccatagcgctgggattacaggcgtgagccaccgcacctggcctcttttgtccatttttttaaaaacaagttttgcctgggcgcggtatctcacgcctgtaatcccagcactttgggaggccgaggcgggtggatcatgaggtcaggagatcgagaccatcctggctaacacggtgaaaccccatctctactaaatatacaaaaacttagccgggtgtggtggcgggtgcctgtagttccagctactcgctgaggcaggagaatggtgtgaagccgggaggcggagcttacagtgagccgagatcgcgtgactgcactccagactgggagagaaagcaagactctgtctcaaaaacaaacaaacaaacaaaaaaaactagttttctgtctttttctttttttgagacaaagtctcactctgtcatccaggcttacgtgcagtggcctgatcactgcccactgcagcctcaatctcctaggctcaagcaatcctcctgcctcagcctcccaagtagctgggacgacaggtgcacaccaccaagcccagctaattttaaaacatcttgtagagacgtggtcctgctatgttacccagctgttctctaactcttgggctcaggcgatcctgtcaccttggcctcccaaagtattgggattacaagcatgagccactgcgcctggcctttttcttattgatttgtaagaattctttgtatattctggttagaaatcatttatcaaatataaatgacttgattttctgagcttgctgtttcattttctgagtggtatactttgatgaacacaagttcctaattttatttttatttatttatttatttatttgagacagagtctcactctgttgcctaggctggagtgcagtggtgtgatcttggctcactgcaagctctgctccccaggttcaagctattctcccacctcagcctcctgagtagctgggattacagatgcgtgtcaccacacccacctaattttttatttttagtagagatgggatttcaccatgttggtcaggctggtctcgaactcctgacctccgatgatccacccgccttggcctcccaaagtgctgggattacaggcgtgagctcctgtgccctggcctattttattttttattttttggagacagagtctcgctctgtcacccaggctggagttcagtggcatgatcttggctccctggaacctccacctcctaggttccagcaattctcctgcctcagcctcccaagtagctgagactacaggggtatgccaccacacccagctaatttttgtgtttttagtacagacagtttcaacatgttgaacagcctggtcttgaactcctgacctcagatgatctggctgccttggcctcccaaagtgctgggattacaggcatgagccaccgtgcccagccatgttcttaattttaatgaatccaatttatcaatatttctttcctttctctttttttttttttttttttttttttttttttgagacagggtctgtctctgttgcctaggctggagtgcactggcaccatctcggctgactgcaacctcgaccttctgggctcaagccgccctgccacctcagcctctcaagtagctgggactacaagtctgccatcactatgcccagctaatttttgtgtttttagtata

SEQ ID NO: 28440 - DNA, 2300 bp, Homo sapien
tctgtggccccagctactcaggaggctgaggtgggaggaaagcttgagtgcagtgagctgtgatcacaccactgcactccagcctgagtgacagtgagagatcctgtctcagcactgtatccattatggggcagacgaggagagtacaaataaacatagcatttttttccatatagtacaatgataaacctcacaatggcgactgcaaacactgaaaattctggaagtgcttttccaattgtaagagaaagattacttttttttttctttttgagatggagtctttctctgtcgcccagactggagtgcagtggtgcgatctcggctcaccgcaagctctgcctcctgggttcacgccattctcctgcctcagcctcctgagtagctgggactaaaggtgcccaccaccacaccaggctaatttttttgtatttttagtagagacggggtttcaccatgttagccagaatggtctcaatctcctgacctcgtgatctgcctgcctcagcctcccaaaatgctgggattacaggcgtgagccacagcgccaggccttttttttgtttttgtttctttctgagatggagtctcgctctgtcacccaggctggagtgccatggtgcgatctcagctcaccgcaacctctgcctcccaggttcaagctactctcctgcctcagtgtcctgaatagctgggattacaggcgtgcgccaccacacccagctaatttttgtatttttagtagaaacgaggtttcatcatgttggccaggcttgtcttgaactcccgaccttgtcatctgcccattttggcctcccaaagtgctgggattacaggcgtgacccaccgtgcggaaagattacattttaactgggttgagtgggagggtttatatatggaaagaacttttgccaggacacaagacctggtccggtgagagctgggcaactgtgaatgagtctcttccctctgcttttcaactcctcacctataaaatagggatggtccttcttgtctactttatagaagtgcttgtggggtacgggattgtgagaagttttatgaaaacgtgcacccatgaaatgttgcttgaggaacacttatttgtttcctggtcttctcccattggattgtgagcatctcaggggcaccaagtctgatcctgtgtccaggacctagcagttacctggctcagtgactggctgtcgaactaaactattgctctaatgtaatcactttgtattacaaatctttgtagatcagtcatctacgtcggggttacctagagaactctgactaaaggaaatccattgcatttagacactattactcacagtttgtagtggtatctccaaatttcaacacattttccctttcccacgtacattatgcatttgtgggaagttcttttttttttttttttttgcgttcattgatttacaacatctatatctacatggatggcgtggcttcttcattttcctttgtgagtgcctgcaaatcatcttaatctgatttgctaaggtatctgcttgttttctcattagactgggaaatggagaggaaaaagaaaaaaaaaggccgggcgcggtggctcacgcctgtaatcccagcactttgggaggccgaggccggcacatctcgagatcaagagatcgagaccatcctggccaacatggtgaaaccccgtctctactaaaaatacaaaaattagctgggcgtggtggcgcgcgcctgtagtcccagctactcgggaggctgaggcaggagaattgcttcaaggaggcggaggttgcagtgagccgagatcgcgagcctggcggcagagcgagactccgtcgcaaaaaaaaagcgtctgaaatgctgttttactggctccggtagcgacgtacagcgaaagccaaggtcacttcaagtttgtaattggttacaatgtctgtcagtcacgttgccggaaaccctgtccaattatcctgcttgtactgtgccctccctttccgattggttttgggaccggtttaagctggaagggtagtcattggttcgccgctctgtctcggcctgagcccgcccccgctcggttgccgtggttgcgggccctgcccgcccgccagctcgctgacagcacgactcagggcggagggaagtaggtccgttggtcggtcgggaacgaggctcaggcggccaggcccgcgcggagccgttgccatggcagccgccgccggggacgcggacgacgagccgcgctcaggccactcgagctcggagggcgagtgcgcggtggcgccggagccgctgac

SEQ ID NO: 28441 - DNA, 2300 bp, Homo sapien
tgaacattttgagaattgttgtcaaattggagcaacctgtatcaaattcctgtcatatatggactataagatttcaggtaatttcttttcttttttttttttttgagacggagtctcgctctgtcgcccaggctggagtgcagtggcaggatctcggctcactgcaagctccgcctcccgggttcacgccattctcctgcctcagcctcccaagtagctgggactacaggcgcccgccactacgcccggctaattttttgtatttttagtagagacggggtttcaccattttagccgggatggtctcgatctcctgacctcatgatccacccgcctcggcctcccaaagtgctgggattacaggcgtgagccaccgcgcccggccaatttcttttcttttttctttttttttttgaggcagttttgctcttgttgcccaggctggagtgcagtggtgcaatcttggctcaccacaacctccgcctcctaggttcaagtgattctcctgcctcagcctcccgagtagctgggactacaggcatatgccaccatgcccggctaattttatatttttagtagagacggggtttcactatgttggccaggctggtctcgaactcctgacctcaggtgatccatctgccttggcctcccaaagtgctgggattacaggtgtgaaccactgtgccaggcctcggagaagggttattatttaaactagaaactaaatgtctcccaaagttagctcggttcgagccaggaatgattaagggcagtctgaagattaaatggaagatgagggttggttagatcagatctctttcactgtcattattttctcactgttacaatttttgcaaaggtggtttcagcaataaaaatatttcacaaattttacaaaagcaaaggaccatgaggacattgttggggaccctccctgaaccaaggaagagactgtgactcttccttggttcagggaaggtcctgaaccaaatcgagggtcggtaaagcttaagctccattatttccaaatttgtgtcacctctggtgacagcacaaggaagaaacacaaaacaagaacgcagcatagggagttggggctgggcattgcaattctcaataggatgttgagtggatggcatcagagcagacacctgaaggtgccatgcagataccgatggggaagggaatgggagtgggggtgccactgcattcgattctagacttggataacagtgagtgcaaaatcccagaggtggagcgtgcctcagtgggaaaagcaaggagggcggcgtgacaaagggacccagagagtcctggtcacacagcaaatcagtggcggagtagggactggaactcggatttccactaggtgttgtgtatgggcagatggctaaactaaggcctctccttgactcatacaccggtttttattggtttgctttataaccccatctctaccttgagggtttcccctggcctcgaacccggtgtactcaagagctgcccatgtcccaggcttcgcgacacagctggcctcatctttgcctgctccaactttaatgtccaaagttgggtggctcctgttctccattccctcttactgcatgggaccaaatctcaatttttttttttctttttttttttagacggagtcttgctctgtcgcccaggctggagtgcagtggcgcgatctcggctcactacagcctctgcctctcaggttccaccgattctcctgcttcagcctcctgagtagctgggattacaggcggacgctaccactcccggctaatttttgtatttttaatagagacggggtttcgccatttcggccaggctggtctcgaactcctgatctcagatcatccacccgcctcggcctcccaaagtgtagggattacaggcgtgagccatcgcgcccggccaaatctcaatttttatccccagtaagtttagtcttgtgaagtccgaacgtttgaataatttactcgctgcaggcaaaccgcctacaactaaatccatcaggcccccgtatccgaatcttccttcacgcgagaagccggccatcttttgtgtagcattctttctggttcctctaactttgcctctcctttacgccaaatacgtgtccttatatctgaatctacaccactattatagattcaccttctttgagaagtccctatttgaagagaggaaaattcaggctacttgtaaccctcttattctttttagacggagttttccctcttgttgcccaggctagagtgcaatggcgcgatctcggctcaccgcaa

SEQ ID NO: 28442 - DNA, 2300 bp, Homo sapien
catgcccggctaattttatatttttagtagagacggggtttcactatgttggccaggctggtctcgaactcctgacctcaggtgatccatctgccttggcctcccaaagtgctgggattacaggtgtgaaccactgtgccaggcctcggagaagggttattatttaaactagaaactaaatgtctcccaaagttagctcggttcgagccaggaatgattaagggcagtctgaagattaaatggaagatgagggttggttagatcagatctctttcactgtcattattttctcactgttacaatttttgcaaaggtggtttcagcaataaaaatatttcacaaattttacaaaagcaaaggaccatgaggacattgttggggaccctccctgaaccaaggaagagactgtgactcttccttggttcagggaaggtcctgaaccaaatcgagggtcggtaaagcttaagctccattatttccaaatttgtgtcacctctggtgacagcacaaggaagaaacacaaaacaagaacgcagcatagggagttggggctgggcattgcaattctcaataggatgttgagtggatggcatcagagcagacacctgaaggtgccatgcagataccgatggggaagggaatgggagtgggggtgccactgcattcgattctagacttggataacagtgagtgcaaaatcccagaggtggagcgtgcctcagtgggaaaagcaaggagggcggcgtgacaaagggacccagagagtcctggtcacacagcaaatcagtggcggagtagggactggaactcggatttccactaggtgttgtgtatgggcagatggctaaactaaggcctctccttgactcatacaccggtttttattggtttgctttataaccccatctctaccttgagggtttcccctggcctcgaacccggtgtactcaagagctgcccatgtcccaggcttcgcgacacagctggcctcatctttgcctgctccaactttaatgtccaaagttgggtggctcctgttctccattccctcttactgcatgggaccaaatctcaatttttttttttctttttttttttagacggagtcttgctctgtcgcccaggctggagtgcagtggcgcgatctcggctcactacagcctctgcctctcaggttccaccgattctcctgcttcagcctcctgagtagctgggattacaggcggacgctaccactcccggctaatttttgtatttttaatagagacggggtttcgccatttcggccaggctggtctcgaactcctgatctcagatcatccacccgcctcggcctcccaaagtgtagggattacaggcgtgagccatcgcgcccggccaaatctcaatttttatccccagtaagtttagtcttgtgaagtccgaacgtttgaataatttactcgctgcaggcaaaccgcctacaactaaatccatcaggcccccgtatccgaatcttccttcacgcgagaagccggccatcttttgtgtagcattctttctggttcctctaactttgcctctcctttacgccaaatacgtgtccttatatctgaatctacaccactattatagattcaccttctttgagaagtccctatttgaagagaggaaaattcaggctacttgtaaccctcttattctttttagacggagttttccctcttgttgcccaggctagagtgcaatggcgcgatctcggctcaccgcaacctccgcctcccgggttcaagcgactctcctgcctcagcctcccgagtagctggaattacaggcatgcgccaccactcccggctaattttgtatttttagtagagacggggtttctccatattggtcaggctggtctcaaacccccggcctcagcctcaggtgatccgcccgcctcggcctcccaaactggtggggttacaggtgtgagccacggaacgcggctcctcttccttctggatatggctgtctcagatggccagaggcctcggaaaggcttccggtttcccggcaggcccgagtggggctgaacttccggcctcaggacgcaggcgcgggccgctcatttcgctctttccggcggtgctcgcaagcgaggcagccatgtcttatcccgctgatgattatgagtctgaggtaaggtggccgtaagggcgcggtgggctccacgacggggtgatctctgggaccactggatgtgggtcccggcgcgaggcagcttccgggtcgcggccagctccggccgacctcccgcccggccctcaggctgc

SEQ ID NO: 28443 - DNA, 2300 bp, Homo sapien
aggccgaggcgggtggatcacctgaggtcgggagttcgagaccagcctgattaacgtggagaaaccccatctctactaaaaatacaaaatcagccgggcatggtgacacatgcctgtaatcccagctacttgggaggtggaggcaggagaatcacttgaacccggaaggcagaggttgcggtgagccgagatcgcgccattgcactccagcctgggcaacaagagcgaaactccgcctcaaaaaaaaaaaaagaaagaaagaaattgggaattggtaagtcctccaactttgttctttttttttttttccccaagattgttttgactattctgggtctcttggatttgcttattgattttaggatggacttgtcaatttctgcaaagtagccagctgggattttgagaggaattgcctagaatctgaagatcactttggggagtattgccgtcttaacagtattaagtcctccaggccaggcgcggtggctcatgcctgtaatcccagcactttgggaggtgaaggtggacggatcacgaggtcaggagatcgagaccatcctggctaacacggtgaaaccccgtctctactaaaaatgcaaaaaagttatctgggcaggccggcatggtggcgggcacctgtagtcccagctactcgggaggctgagacaggagaatggcgtgaacccgggaggcagaacttgcagtgagctgagattgcgccactggactccagcctgggcgacagagcaagactgcgtcccaaaaaaaaaaaaaaaaaaaaaaaccaatattaagtcctccaatctatggacatgggatgtctttgatttatttaggtctttggttgcgttcaccagtgttttgtgttttcagtgtacaagtctctcatttgttttgttatagctaacgtttttttgaacacttaactccttttttttttccccctaagatggagtcacggagtcttgctgtcttgcccaggctggagtgcagtggcgcgatctctgctcgctgcaacctctgcctcctgggctcaagcaattctcctgcctcagcctcccgagtagctgggattacaggcacctggcggattttttgtatttttagtagagatggtgtttcaccatcttggccaggctgattttgaactcctgacctcaaatgatccacccgcctcagcctcccaaagtgctgggattacaggcatgagccactgcacctggcctgaacatttactctcaattgactaaacacagaatgagttcaaaactcattctgtggctgggtgtcgtagctcacggctgtaattctggtactttgggaagctgaggtgggaggatttcttgaggctgggagatttagactagcctgagcaacatagggagacccccttctctacaaaaaattttttaaaaaaattatccaggcatggtggcacatgcctgtagtcccacctactcgggaggctgaggtggaaggatcacttgagccctggaagtcgaggctgcagtgagccatgatcatatcactgcactccaaccttggcaacagagcgagaccctgtcttcaaacaaacaaacaacattctgaaattaatattttctttcttcctttttttttttttttttttttttttgacatgggggtctcactgtgttgcccatgctggagtgtagtgtgataatggctgactgcaacctgtgcctgctgggctcaagcgatcctcccaccttagcctgccgagtagctgggaccatgggtgcgcaccaccacgcttgtctaattactcttgtgtgctggtttttttatgcacttggatggcagaagtctctaaatggtgaaaggaaatagatctgaatgagatcttaatctcatcgacagagattgaggttgatggagtcaaatgagaagtggattttctcattgcatgtattcttggggcatatgcatagcaatttagatgttgtttagtcttcagaattacctttattcctccccaccaaagagctaaagctgccaggataccccagttttatggttagtgaagcacccttctgccatctctttcagatgctgtcttcctgattttatacaaagaattatactacaggcacatatatgccaaagtcagtgtaagtatttaagtgtcgcagttttttttttgtttttgtttttttaactctgtgctgtttttgtccctagaacacagtcatttgtttatattggttcagtgtctgggcatgattggcatgtttttgagttttaagaagcggtggaaggaacagtttaacccagaa

SEQ ID NO: 28444 - DNA, 2300 bp, Homo sapien
catttcctgaaactttccccctccctccctgggctcctggcaatattcgtggcacttcagagcacttatctcttgtacgttgtatttgtttatttaggggagggagtttcttaatctactggaaggttaactccaccggggtatgtgcttgtcttgttcaccaatataatccagtgcctagaataatgtctggtcataatggtgttaattgagcatgtgtgtgcttgcatgcatgtgtaagtgaaggaaattggcaccaagatctccacctaaggaggtcctagtttctcacagttactcacccctcttctccttgaggaccgcttgatatggctagaactcctgccttggccacaggagccactgtcagtagtggtaggtggaaaagttcttgctgccagagtaaggggccatgtttttccggcatcccagcgggatctctgactactttatctgatagaaagtaaagattcctggccaggcgctgtggcttacgcctgtaatcccagaactttgagaggctaaggcgggtggatcacgaggtcaggagttcgagaccagcctgaccaatatggtgaaaccccgtctctactaaaaatacaaaaattagccaggcgtggtggcgtgtgcctgtaatcccagctactcgggaggctgagacggaagaatcacttgaccccaggaggcagaggttgcagtgagctgagattgcaccgctgcactccagcctaggcaccagagcgagactccgtctcaaaaaaaaaaaaaagtaaagattccctactaccattgatgctaaagttcaggtactttgtggatatgctaagaatctagccattatgtgtacactgcttttttgggaacaccatgacaccatagcccatagtatagctggttttaccacctctaatctctctgtttggtctgtagatgaagattcagcagaagcttattgatgctgttatctttttattagctaccaggactcctacataaatgaccagttttaagcccttgggaagcagtttttcattgaatgtgcttagattgtgcttaatgtattaagcaccttacataacttttattaaacagagacggggtcttgccatgttgcccagcctgttctcaaactcctggcctcaggtgatcagcccacttcagcctcccagagtgttgagattacaggcgtgagccactgcgcccagctatataatcttacttcattgtgactagtcaacaatcttttgcccacattttacagagattaaataccttgtgagaaccccacagttaataagaggtgggactgactccaaagttgtgtttcttctccatcacaaatacattgctcatggtatggttccccagctcagaaactatcagtggttctcagatgcaagcaacataaagaccagaccaggggtcagccaccttctctgtggagggtcagataataagtattttagtctcgagggccatgatggtttctgtcagatctgttcagctatgtctttgtggcagttatcaacaatatgtaatgagtgggcatggctgtgttccagtaaaacttctttatttacaaaacaggtggcggaatagatttgcaggccccctgacctagatgcttgtttggcgttggaagactgcaacattcctggcccgtagtctagtgatgcccggtgcagcattatcttctcttaactccctagccttcaagtgccacgatttaacttcttcgcctttgctagtgtggtttttttctgaaacacttttccttctctctgctttgccagatcatcatccctgctctgagggtcatttaaggtctgttgctgtagaacctaaccacgtgttgcagtattcagtgcgtcagctgctataggactttctatcttccctctcacttgcatatttacatagtaagaaagagaggacagataccaattctcttgtatttgttcacagctgtcacagtataccatgggtaaaacacattaaaattaaatatctgtatcttgatatctcttgttttctttacaggggggaccttccttggagcagaggtttgaatcctattacaactactgcaatctcttcaactacattcttagtgagtctgagatttggccaagagggtgtgtgtggttatgatgaggttcagcattggcctccagcttttttttttttttttttaaattagcaggatcttaatgtgtaggtgggaagaggggaggtcttgtgattcatggtccttttaagagagaaattacaaagcattctgcagcctacagaatgggcag

SEQ ID NO: 28445 - DNA, 2300 bp, Homo sapien
gattacctgatccagaaccttcttgtttacagctaaaaaaatggattcctcaaaacatacaacttaattgatgaataggaagatccgctctcaaactctgggactccagagcttcctctggatagttgagggcctctgcagggaaaactcttggtgtttctacctctggttctatctaggatgaattgggactcatgaatgtttgttctacctccttctacagagtatgtattcccgtgtgccagagtgccaggtcaccacatactattatgttgggtttgcatatttgatgatgcgtcgttaccaggatgccatccgggtcttcgccaacatcctcctctacatccagaggaccaagagcatgttccagaggaccacgtacaagtatgagatggtaagggggactctgcctgccaccagtggcctttctaatcagggggatccttggcacctatgccaaccattcttggtaaacaccatccaaaatattgcacttttaagccaggagttcaagactgtagagcgctctgtgattgtgcctactaatagatcacccagctggagtgcagtgacgcagtcacagctcacgtcagcctcaacctcctgggatcaggcgatcatcctaccttagtcttccgaatagctgggcttaaaggcgcacacaacaacaccggctaatttttttttttttttttttttttttttgagacgaagtctctgtcacccaggctggagtacagtggtgcaatctcagctcactgcaacctccgcttcctgggttcaagtgattctccagccttagcctcctgagtagctgggactacagacgcgtgccaccatgtccagctaatttttgtatttttagtagagatggggtttcactatttggccaggctggtctcgaactcctgacctcaggcgatccatccacctcagcctcccaaagtgctgggattacaggcgtgagccaccacgcccagccaaaatgaacttttaatggctagcatactcttaggagtttctgttgtgatgcctgttacctcagatcattaacatcttgatgataaggacttgatgataatatcttttgtttcagttatatcctccagcagtgcctacatttatttattcagcatcagtatgctgagtgttcactgggttctaaatgttttgatataaggtgtggatattggtgggaaggaggatgggttcaagaattgggaggagcttcctaggcagagaatatcatgagcaaagtggttgagacttgaaagtgtggtgatgcagccgcacaataaactgttctggctggagggcaagtaggtagtaggaattgggttattagattctgagaaccttcattaacccaggtaaagtatagtcctgtgtcatttgatgctgcagatacattctgagaaatgcatcatttggtgattttgttgtgtgaacatcatagaatgtacttacacaaacctagatgggataacctactacatacccgggctacatggtatagcctatggctccttggctacaaacgtctagaacatattactgtactgaataccataggcagttgtaacacaaaggtatttgtgtatctaagatacagtaaaaatacaggattataatcttgcaggatcaccatcctatatgtggcccatggcccgttgttgactgaaacgctgttgcacggcacattactatttagtctatatttctgtcgtcatcaaggttgcatcaaaggttttgggtaactcgatcctaactgtgtaaaaggattgacctgctagtgatgtgtgggacaaactggagagactaagacagaggtgccagtaaggaatccagaagatggctaaggaggatctggagctaggatggaagttaggtagatctagagggaggattggaagagatgttggggaagttcaatggctggtatgaaacaactgggtaagtcaaagatctgtgcagagaatggtgaggccagttggcagtggggacctcaggaagtccgtctcatttgacccagtaccactctccaccccatccccagattaacaagcagaatgagcagatgcatgcgctgctggccattgccctcacgatgtaccccatgcgtattgatgagagcattcacctccagctgcgggagaaatatggggacaagatgttgcgcatgcagaaaggtgacccacaagtctatgaagaacttttcagttactcctgccccaagttcctgtcgcctgtagtgcccaactatgataatgtgcaccccaactaccacaaagagcccttcc

SEQ ID NO: 28446 - DNA, 2300 bp, Homo sapien
agacacgggctttcaccatcttagccaggctggtcttgaactcctgacctcatgatccgcccaccttggcctcccaaagtgctgggattacagtgagccaccgcgcctggcccaattttttgtatttttagtacagacggggtttcactatgttggccaggctgttctcaagctcttgacctcaggtgatccacctgcctcggcctcccaaaatgctgggattacaggtatgagccatggtgcccaaccccgccccccttaggttttaatgagagtcctgggtggtctttgaaggcctaggtggatgctggtgtcaggatcctgaacccaagtccctgatttcataaaaagcatccggaatcctgctttcctgccactgttatcccacaggggacagggcaggagttggcagctcagggctggtgagaagtccagagggctagccaggcactctggccatgctcttcctaggtggcctgagagtccatatactgagccaagatggcggccttccagttgcaggagtgttaggccagcccagattggcaagctgggttctccaggccctgggccagtattctggactgggactcagtggactttgaagaggtagaattccctaagtcggcctctctccttgataatttacccagaatggcccagatgacaatctgggtacaaaatatttcagtccatttcatcatgtttaccaagtaccaggagtcaatagaatttatgagtgataactaaagggtaaggcactttacatcttaatcctctcagccaccttgtaaagcaggtattatctccatttttaagtcgtggaaactgaggtccagggaggcacaagatcacatgactaagggagtggggaaagccaggattggagattgggttaatagggctccaaaatgcctgatctttccactcccctgagtgctcaggggtgatgaagatgactaagaccctgttccttcccttgggagggagcgaaatacccactccagctaactattgcatgggtcagggtgacatcaccacctctgcagcagatggaggctgattcatctgtgggagagtcaggaggggcctctgcggaagggtcggctggctggaagggttggctggctggaagggtcggttggctggcgggggttttgaagacggcaaagatagagaatgagccttggggaggttccagggccagatacaaactgcctgtatgcctcccaggcaggggcctccttggcctaggtccttcccataggaactcaaaccaccaccacactaaccatggctgaggggacccggcaggccgcagtggggagggacgagatccctgagcttacacaggggctgaggggagctcagtgaatcacctaggggacacctggaccaaaggtggcggaggggcgcatgggtctccctgccaagctatgggggaggggatggtggacatgacaacttccagctcagcggtgctttagggtggggagccgggatgagggaagctggtggctatccgggggggggtgctctgaggtctgcaggggaactgcctccccaaagtttcaagctaggggtggaaggggggatttgcggtcattaggagcgggaaggaggccggatgggagcacgaggtgtcccgcctccaaagggtggagggctcccggtgggtggcgcggcggcggccgcggcggtgaagtcatcgtggggagtggtccgcttgcggcgggtgcgggggcttcgcgggcacccagtggagcagcgggagcccggcgccgtcgaggggcgggcgatggggcgccggcccgtcttggtaggggtgggctccgcactggaggcggagctgctgctgggtggggcgcgcctccggcgcggacggaggcggcgggacgcccgctcccacgaccggcccacaatgaggcgagcgggcagcgcggagtaggcggcggccggccgggccgggccacgcggcggcgctgctcgggcaggttagggcagggccgcggggcgcccgagcgaggacaccgcggccccgcctccgcccctcccctcgcctgccggtcggcgcccgagctcggagccgcagccgcagccggaaaccgggcccgcgcggcggccgccgtcccggccaagccggggccccgaagccagagccggagccgggcgggccgcggggtcatggctgggccgcggggcgcgctgctggcctggtgccgccgccagtgcgagggctaccgcggcgtggagatccgcgacctgagcagctccttccgggacggcctggccttctgcgc

SEQ ID NO: 28447 - DNA, 2300 bp, Homo sapien
tttttgaggttattatatatatatatatatatatatatttttttttttttttttttttttttgagatggagttttgctcttgtcccccaggctggagtgcagtggcttgacctcggctcactgcaacttccacctcccgggttcaagcgattctcctgcctcagcctcctgagtagctgggattacaggcatgcgccaccatgcccagctaattttgttttgtttttttttgtttttttttttttttttttttagtagagacggggtttctccatgttggtcaagctggtgttgaactccctacctcaggtgatctgcctgcctcggcctcccaaagtgctgggattacaggcgtgagccactgtgcccagcctattattattatttttgagatggaatcccactctgtcacccaggttggagtgcagtggtgcgatctcggctcactgcaacctttgcctcccggcttcaatcagttatcctgcctcagcctcttgagtagctgggattacaggctaccacagcctggctaatttttgtatttttagtaaagatgaggtttcaccatgttggccaggctggtctcaaactcccgacctcaggtgatctgcccacctcagcctctcaaagtgctgggagtacaggcatgagccactgtgccgggctctttttattttttttgagacggaatctcactctgtcatccaggtggagtgcaatggcacaatctcggctcactgcaatctctgccttccaggttcaagcgattctcctgcctcagccttccaagtagctgggactacaggtgcacaccactatgtctggctaatttttgtatttttgggtagagatgggttttcaccatgttggccaggctggtctcgaactcctgacttcaggtgatctgcccgccttggcctcacaaagtgctgggattaaggcctgagccaccatgcctggcctgtttctgaggatattaattcctgccccaaatgccgagttcctgcagcctctgccgtgctctgttctccatgctgggacggtgcaaacaatacagacccaggccccgcccttacactgcctccctctgcatgcgctcttttgcatctgttcttgtgggctttagtttcagggtgtgtagtaagtgccactctgcatgtgcccgtgtgtccccgagctctctgggactctgcacattggtgtccttcctgtgtgtcctggcccatccacaggcacactgcaggtgacctccatgcccagcctctatgcttgtctatgtctagaaggggagagctcaggggcttgggggagagcagaggggtcaggtgggccccggagccagtgtgagctgcagtggagacccctggcccattctgtgggtgcattctcccccaaccccacattgtagaatgctcccagatgacctccctgggtttccgtgagcttgtaggattgagactccttgtataaggctgctgggcagcccttatcattccattagggaaggcattggtggccacggggagagagactcccagggtcaccctgcgacttgcaccagaacattctatttgttcagctcttgtggaggctggatctgagctgaccgctggggacacagattactgttcaggcctatctgtgccttcagggtgctcccagtgttgaggtggagacaggcacagatgcaagggtttcagtggattgtggaagtcttgctaagttggaaggaggggagcaggggctgctgtgggattcacagaggacacttgggagtccaggacttccaggaggaggtggctcccaggctgacttgagatgatgttttctgcccacactggcggggggtgtctgaggggatttgggtttcttctcaaatgaaatgcaaacggggtctcaggtggcctggccttgacccctgactgttctcaggcacctgggtgcttatctaatctccatgggctggcctggggaggtgcgagggtgccaggaggaaggcggggcgctcctggggaggcaggtgctgtggctggctccctgggtgcccacctcctgctgcccatgaaggcctggctcactctcctttcccatctagggagactgcacgaactgcctgtccccaagccgagggggacaccgaagccgtccgaggggtatgtcgatccctgaggggctttcctgctttggaggtcctggtggtgggaatcagggtactctggggccgggtagggagagaggcttcctgtggatgggcagggcggggctcaggaggggaaggagagctgggcccacaccccttc

SEQ ID NO: 28448 - DNA, 2300 bp, Homo sapien
aggtggcctggccttgacccctgactgttctcaggcacctgggtgcttatctaatctccatgggctggcctggggaggtgcgagggtgccaggaggaaggcggggcgctcctggggaggcaggtgctgtggctggctccctgggtgcccacctcctgctgcccatgaaggcctggctcactctcctttcccatctagggagactgcacgaactgcctgtccccaagccgagggggacaccgaagccgtccgaggggtatgtcgatccctgaggggctttcctgctttggaggtcctggtggtgggaatcagggtactctggggccgggtagggagagaggcttcctgtggatgggcagggcggggctcaggaggggaaggagagctgggcccacaccccttctcctgaggctcaccccgggattcctgcggccagtgcctggccccctccccaggtccctgctcctgtgggcagtgcccggtgcaggcagccacctctggtacccgttgcctctccaggctcctttgccctgtaacatgggaggccgaggcttgattatagagttgatttgaggcttagcagcagagtatagaaagacctggaaaagctcagctgtagtaccagtccctcaggtcctgcagcacgggaccctgcttcacgtggaggacatctacttcagctgttatttgagggccatgcttcccccatgtggtcggtctgtagggagccaggtgggccatggctgtgccagttgttaacgtttactgagtccctggcactgagcaggtgccccagtgccccgcccagtgctgcactccatagctcactgcatccttacaccaaccctgtgaggcaaggattattaaggtccccattgagtggaaagggagactaatacagagggagggcaggtgactttcccagggtacatggattgtaggtggcagagcccctggtcgatcctttcctgggctgggttaacagcagctctgtgacttgaaggttcacattctctgggcctcaaaggctgtgactgtaacattccatttcagactgtccccatggggatgggggtgggagaagggaaacagccgtttctcatccaccccctttgaagtagagtcaaaactgtctagagagagaaggaagctgacccttgcctctgctaatggtttctgctgcttcccccctcctccaggacaccagcccccaggaaggaccccccatggatcacgctggtgcaggcagaaccaaagaagaagccagccccacttcccccaagcagcagcccggggccaccaagccaggacagcaggcaggtggagaatggaggcaccgaggaggtggcccagccgagcccaacggccagcctggagtccaaaccctataacccctttgaggaggaggaggaggacaaggaggaagaggctccagctgcacccagcctggccaccagccctgccctgggccacccggagtccacacccaagtccctgcacccctggtacggcatcacccctaccagcagccccaagacaaagaagcgccctgccccgcgcgcacccagcgcgtccccactgggtgagtgcctttcctggagctctcctgacagtcggaactcgggggtggggcccgggcctggggagggggtgtggtggggcagagcctaccaggccaggcaccacgtgtttcatgggtgacttctcatttaatcctagagcaaacctgtgagtaggtatcgtcacctccactttgcaggtgaggagactgaggcacagagaggctaagtagtttgcctaaagcctctcagtgcttaagcaggagaggcaggatttgaacccacggagtctggcccgagtccatctcttcaccctccctgtcgtgctcgttaaacgtgctgtctagtggtgtgctcagtgcagcgaggggctcatggaaaggaggcgtttgcttgaatcctgcctaactctgtcactgtcgctgcagttcctgagcgacctgggctctcacctggccatgtgtgaccaggtgtaatgactctgactgtccctgagtctgtctgtagtcctccatgtgacatggtggctcagctccaggctgctgggcctcctccgcccagtgcttcccccctcacccaggaacgctggagtttttggccctcaccttctcccagtcttctgataccctgagctgggtttttggccctaaccttcaccatggctgggtctggccgcctctgagagttccatgggaccccctctcacagtggggcaagagcatgccagagctggcagaggcag

SEQ ID NO: 28449 - DNA, 2300 bp, Homo sapien
ccagggtacatggattgtaggtggcagagcccctggtcgatcctttcctgggctgggttaacagcagctctgtgacttgaaggttcacattctctgggcctcaaaggctgtgactgtaacattccatttcagactgtccccatggggatgggggtgggagaagggaaacagccgtttctcatccaccccctttgaagtagagtcaaaactgtctagagagagaaggaagctgacccttgcctctgctaatggtttctgctgcttcccccctcctccaggacaccagcccccaggaaggaccccccatggatcacgctggtgcaggcagaaccaaagaagaagccagccccacttcccccaagcagcagcccggggccaccaagccaggacagcaggcaggtggagaatggaggcaccgaggaggtggcccagccgagcccaacggccagcctggagtccaaaccctataacccctttgaggaggaggaggaggacaaggaggaagaggctccagctgcacccagcctggccaccagccctgccctgggccacccggagtccacacccaagtccctgcacccctggtacggcatcacccctaccagcagccccaagacaaagaagcgccctgccccgcgcgcacccagcgcgtccccactgggtgagtgcctttcctggagctctcctgacagtcggaactcgggggtggggcccgggcctggggagggggtgtggtggggcagagcctaccaggccaggcaccacgtgtttcatgggtgacttctcatttaatcctagagcaaacctgtgagtaggtatcgtcacctccactttgcaggtgaggagactgaggcacagagaggctaagtagtttgcctaaagcctctcagtgcttaagcaggagaggcaggatttgaacccacggagtctggcccgagtccatctcttcaccctccctgtcgtgctcgttaaacgtgctgtctagtggtgtgctcagtgcagcgaggggctcatggaaaggaggcgtttgcttgaatcctgcctaactctgtcactgtcgctgcagttcctgagcgacctgggctctcacctggccatgtgtgaccaggtgtaatgactctgactgtccctgagtctgtctgtagtcctccatgtgacatggtggctcagctccaggctgctgggcctcctccgcccagtgcttcccccctcacccaggaacgctggagtttttggccctcaccttctcccagtcttctgataccctgagctgggtttttggccctaaccttcaccatggctgggtctggccgcctctgagagttccatgggaccccctctcacagtggggcaagagcatgccagagctggcagaggcaggtgctcagggggtctgagcggagccctgggaccccagctgaggctggcctgtctgggtggaagtggtgggcagcttcaggggacagcagaggagcatgagctctggagtcagatacagtggattcagtcccaccccgtgctggggcgagtgccctctcctctctaagcctgttgcctcatctggaaaatgcagataatgtgtttggaagcatcatatccatcagccacgaggagataaattggtgcccggcagtgcctgtcccagagctggtggctgcgagggctgcgtgctcctcccctctgcctccgcactgcagatcaggggcagaggaggggccacctctcttcctctggcattcccaaggtggttttgctgtgggtgccctcatgggggctatggggagtgtggggaagtggaggcagcaggcagaacgcaaggcgggcgggttggactcgggtggctggatgcacctcatgacttccgtcctgccgggcgtttgctgttccctgggccttggccctgtctcgatgtggagggcttgggtttctggggctgcctgcggctctgttgagagtggagccgggaggtggggctggaagcccttgtggtgctccccttgtgaggtgtcctggtgctcgtccgcacagctctccacgcctcccgcctctcgcactcggagccgccctcggccacaccatcgccagcgctcagcgtggagagcctgtcgtctgagagcgccagccagactgcaggtgcagagcttctggagccgccagctgtgcccaagagctcctcagagcctgctgtccatgcccctggtacccctggaaaccctgtcagcctctctaccaactcctccctggcctcctctggggaactagtggagcctagagtggaacaaatgcctcaagccagccct

SEQ ID NO: 28450 - DNA, 2300 bp, Homo sapien
cacccagttcatgagggccctgtcttgcagccacagcgcctttggatggcccaacgctctgcaggcctctgagctcccaaggctcatctggccccaggtagagggtggcaggacagcctttgtggggcagctgaagttgtagcctgaccctgcccatgtgcctcaggcatcgttgaaccttccctggtcccggcaagagcctcttgggcattgattctggctctgcctcccacctgctgtgtgtccttgagcaggccccatcctcctctgggcctcgggctcccacagatggtgaggggctggcggcaccaagtgtcctgagtgctcgaaagaccccctggttccttggtggtggagggcacgggggtgggtcaccttcggattctcgtgtttcgtgtcctgggctgcgtgaatattggtctgaagttttggggctgagaaaaggctgaaaacctttgaggggctcaggggctttgggctgcttggctctgctggcccctctgggtgtgttagagggagggggcagaaccccgggtgcacttgcttgtggggaacccctgtcccactgtcaccccaggattaggggagactttcagaggcagtgggggccttggggtgccaccctgggtcattgggtgggtgctgccctgtgggagccaagccctggcttcttgctgtgcccagacctgggccccagcaccctccctgcttcagaaaccccagagcagctcccaccccgagagcctctctccctgggctggcacaggcctccacctgctccgcagctgccgagggaaagctgggtcagtgcttcttggagcatcccaggtctcaggtgaggcctctgtaaggggctcgcagtgacgtctgtttccaatgagctgggaagagtggttgggaaatagtgacattgcccgtgtggtgggcagggccttgccgtgccctggcagtggagctgcccggcctgtgctggcctcagagagggcgggggtctccccagaggcacggaaggatgcagagcctgggctctgggtgtgtgggtactgggctgtgcagcagaggatgagatctttctctggcagggagggaggtaccctctgactccatctgctggtcaaacacttcctggctgggtgaccctgggtgaggaacttcacctctctgagcctcagagtccccagcggggagagggtggttatgaggcctgaatgaactaccatagctctgtcttgccttaaacccaatgccattctgtgcttctagggaaacccctgccctctttgaggctagcacagccaggcacccccaccagtggggcacagtagggcactgcctgccacatgggcaaggttctaaccactacccctcaatgctagatggctgcccaggccctgaaacagacagattctcaccccagcttgggctcatgggaagtgtgtggccgtgagcaaatgacttaacctctctgaacttgagtttactcagctgtgaaatggtcattgtaatatccacttggcagggtggttgggagaattaaacaagaatgtataaaaaggccaggtgtggtaatcccagcactttggaaggccaaggcaggaggatcacttgagcccaggagtttgggaccagcctgggcaacaaagtgagaacctgtctttacaaaaaaaaaaaagtaaatacaaaaaattagccaggcgtggtggtgcaagcctgtagtcccagcttctcgagaggctgagctgggaggattgcttgagccccaggaggctgaggctgcagtgcagccatggttatgccacagctgcacccagcctggtgacagaatgagactgtctccaaaaagtgtaaaaagtatccagtgcagtaactgacacacgggaagagctctggaaaaggaaatggaaatgtttattgaatgactgagtgcatcagagacggaattcaaggagactgtctctttgcctgggtcctgctggccctggagtgctggcctgctttccatgttcccaaatatgaggctgctggggtctcacgtgccctcttcccaggctcaccctctgtcatgtctccttccctttagtcctcctgcaaggagaatccttttaaccggaagccatcacctgcagcgtccccagccacaaagaaggccaccaagggatccaagccagtgaggccacctgcccctggacacggctttccactcatcaaacgcaaggtaccagctgggagccccccgagaccaggctggcctgggctggcaacccccactctgcagctgcagtcttcccctgggactctaa

SEQ ID NO: 28451 - DNA, 2300 bp, Homo sapien
ctactgaaatttaaaaccctacatcctagccccattctgcactgagcatgccttctctatctttcctgcttcgttttttctatagcacttacgaccacctaaaattctatatattttattttattgttatccttctatattagctgtatgataagaatttttgctggtttaataaaatttctgccctctgttaaatattttttcctctttctctttttttttttttttttttttttttttttttttttgagatggagcttccatcttgttgcccaggctggagtgcagtggcgcgacctcagctcactgcaatctccacctcctgggttcaaggaattctcctgcctcagcctcccaagtagctgggattacagacatgcgccaccacgcccggctaattttgtacttttagtagagactgggtttctccatgttggtcaggctggtcgtgaactcctaacctcaggtgatctgcccaccttggcctcccaaagtgctgggattaccggtttgagccacctcattttctttcactgctgtatccccagcacctaaaacagagtctaaggcacatggtagacttaaaaatgttgttgttggaaaaaaacaaaaaagttgttgagtaaaagaacacatgaatacttgttcatcatgtttcaggggctggagctacaattgtgggccgaaacaggcacggttcctgcctgatgaaattcatgatctggagggatagatgggacaccaaataactgactacagcttgtgctaagcccagtgaaggaaaatgtgtgagggcacataacagttgatcctactgtggtggtgaggagcagaagtcttcctcgggaaagttgaaagtgtgatctaaaggatgcataggagttaactactctaaaaattttagttctttgacttttggcaaggtgtagcaccttgaaccttcccctcccccccgccccgccccgcccccgaataaggcatatgcagtagaattttgaagctttctgaaccccaggctccttatctgtaaaggaaaatagtgctaagccacaggtcaggtacgggggaactgagttacagagggtaactaccaccattcttctctcatcctttaactcaggggtccccaaccctccgtccgtggactggtaccagtccctggcctgttaggaaccgggccgcacagcaggaggtgagcggcaggctagcgagcctcaccgcctcctttcaggtcagtgacggccttagattctcataggagcgcgaaccctattgtgaactgcgcacgcgagggatctaggttgcacgctccttatgagaatctaactaatacctgatgatctgaggtggaacagtttcatcccgaaaccattccccacacctccgtcagtggaaaaattgtcttccacgaaaccggtccctggtgccaaaaaggctgggatcgctgctttaacggactgacctctgagcagctcgcaggtccccggggtgtaagtgatggtcttggggcggcgccggaacccagttcctttggtcactacctccatctgcttctgtgaagccatgggaggactctgaggagggaaagacgcaatgacacaccccctgtctcctgtccctaatctctgttccccgacgcccaacacccccagaagtctggaagcggggatcgagccagagaatgatgccgccagttaatattgcgacagtgcccaaacctcccatccagacacacagatacacacacacagtcctcattctgacccagcgcctgtggcagggaagtctcctcgggagggagtgttaacacagccatggtcacaacagtacccactgagtgatatgccaaaattgaaatttcaccctaagaccctctctgggtgctcccctctccacatagaagtgggctcccggaggcggtgaccactgctttacagccgcatccgcaccggtgccacgcagaaatactgcgcgatctgggctgctggagctggcagctagcgcctctcgctactatagaaacgcgcacacaccagtcagcgcatgcgcactttccccgctctgtcctgcctcccggaagtgatttcctctgggttacggcgcaggcgcaagataagctaggagccgcgcgagtcgtagtgtcgctgtttgcgggtctccgcgcgggaccggggcgcagcggggtcgctgaggcgagggtgtcatgtcagacaacgaggacaagtgagtgcgggagcggagtggcctttgcggcaaccttggaaggggcggatgaggcaaggcttgggtcggctgaggag

SEQ ID NO: 28452 - DNA, 2300 bp, Homo sapien
aataaaaaataataataagaagaagaagtaaatccgacttttgttccattttaccccttcaatttttccccatctgcccccaaatattgctagtactcattcatcatcactgtttccctctctactggatcattcccatcagcattttttttttttttgagacaaagtctcgctctgttgtccaggatggagtgcaatggcgtgatcttggctcactgcaacctctgcctcctgggttcaagcaattctcctgtctcagcctcccgagtagctgggattataggcacacgccaccatgcccagctaatttttgtatttttagtaaagatggggtttcaccatgttgaccaggctggtctcgaactcctggcctcaggtgatccaccctcctcggcctcccaaagtgctgggattagaggtgtaagccacagcacccggccccatcagcatttcaacatgtgcttttcctcatctaaaaaaaaaaaaaaaaaaacccttatttctcttctctctccccctatagccctaattccatggtgtcctttgaagcaaaaatgtgtgaaagagctgtccaccctcactatcttcctctcttcccattttgtcataatctcactccaaaaagcctttcaccccaacagctccatcaaaaccactttccaagctcattaatgatctccacgttgctaaatccaatggccaactctccttctcatttagcctgatctatcagctggcacattaggccacttgctctcctcacttgactccaaggacacctcaccctcttggtgttcccccacctccccggcttctcttttcccccaagcactcaatgtccaaatgccctaatgctcagccacgggtcatctcctcttctctactgacactcactgggaatggggtagcaatcccacacgtttcttatttttatcttcagactagctctctttgcacccacatatcccacaggtaatttttgggctctatctttaaaatagtaatatatccagaattcaaaaccagttctcaccacctctactcctaccaccctactataagctactgacttctctcatctagattactacaagcaggccgggcacggtggctcacgcctgtgatcccagcactttgggaggccgaggcgggtggatcacaagctcaggagttcgaggccagtctggccaacatggtgaaacccgtctctactaaaactacaagcaattagcaaggcgtggtggtgcacgcccataatcccagctagtcgggaggctgaggcaggagaatcccttgaaccccggaggtggaggctgcagtgagccgagatcgcgccactgcactccagcctgggcgacagagcaagactctgtttcaaaaaaaaaaaaaaattactgcaaaggaccgtcccagacttttatttaatgccacccggtggagctgccccagaccctcctctggagtactcctatactacatacgtctagaactggggaagctcacgcgaccaccgttacctgcttgcttgcttacttatgggcctgtgaccccttttctagaaagtgagcacgtggagaggcagggacgattgttcattcacctcaatattcccactgcatgatacagagcccggctcgctggaacatttgctgaaggacaccttttctacggatcccctctggaccctcgagcctgggccctcctgtgcctccagccggggctgtgctcctgggtcgcccgcccttcccttcctcggctccgccggccccctcaggaccccagtcccctcagacattgcccctagacgccaggctcctcagccgacccaagccttgcctcatccgccccttccaaggttgccgcaaaggccactccgctcccgcactcacttgtcctcgttgtctgacatgacaccctcgcctcagcgaccccgctgcgccccggtcccgcgcggagacccgcaaacagcgacactacgactcgcgcggctcctagcttatcttgcgcctgcgccgtaacccagaggaaatcacttccgggaggcaggacagagcggggaaagtgcgcatgcgctgactggtgtgtgcgcgtttctatagtagcgagaggcgctagctgccagctccagcagcccagatcgcgcagtatttctgcgtggcaccggtgcggatgcggctgtaaagcagtggtcaccgcctccgggagcccacttctatgtggagaggggagcacccagagagggtcttagggtgaaatttcaattttggcatatcactcagtgggtactgttgtgaccatgg

SEQ ID NO: 28453 - DNA, 2300 bp, Homo sapien
tgtccaaggccagcaagcgagagaaagagaaaacccttatcaaactcctaattcactgggctccgaggccccagacacactggcccgattgtctggctggttgtgtgtgtgagcatgtgtgtgtgtgtgtgtgtgtgtgtgtgtgtgtgttccagtgtctgctccccccacccccaacatgcctctgcctcgtgtgactacctcattgtgtcccatttcccaccccctacacccctttggactttcccaagcatgaggccttgcctccccagaccctttgcagcccactccagacaggaccccttggggtggtcttggggctttgccctgctgttgaggagctcagaacgtcacatggttgccaatgcgaccccagctccattacataacccacatacaccccacctcggcctcaacaccccggcggggctgccctcagttaagagaacagcactgcgacctttggaggagaggccaaggaaagagagagaaaaaggtgtcaacggaggatgggcaggaaagaaaaggggagggagggagaggtgggcagaggagggaagaggcagggcaagtccccaccccttgttggggtgggggagtagaggacttcgtgacaatcaggactaggactcccctaccctctcccaagacagggtgagcccagtgtggaaggagctgggtcccagtaggtagcaacccaaaatgcctctaagacctactgagagagggcccccaacctgtcccaccttggcctcctggcagctttagtcttgtgtttccaccttgaaccagaccagaacgcgcgtgtgctgggtgtctgcagagaagggaccaggggtcaagctggggctctgcacttctcagagggatccctgagaagtctctcttactgtgcaggatggggcagaaagggctgcctgggaaaaggtaggaggcagggtgaggagctgggcatcagtgcctggcacacactaggcactcaacaggatttcgcagacgaagcagctagggccagccaccctcacgggcccccaggaccctcaccgccttcacgtctctccctagtcccctgccaagtgcccatcctgccacctgaggcagacgttaggagtcctggttgggcccaattttcttccatccaacaggttctgaccctccagcctacatctcttccttcctcggcctaacctcccctccacctcccagactaagcccaagataagcctcagcaagatgggcctgggcagtagggcagggagctgggtgggggggcctgggctccgggtggaggagccctgagtgttggggatgaaggaaagcctggaggctccaccttctgcccttccctccctcctctcccctcccccctctccccctccttccttccccagccctccgcagcggctcaggctcagtcgctcagtcagtctcgggctgtccggccagggtggttggtggtaaggattcaggctccgtcctaacgaggccgtggcctgaggctcagggccccccgcccctccctcccagcccaccagcgtcacctcccagccccgagctggaccgcacaccttgggacacggttttccacttcctaaggacgagccccagactggaggagaggtccgaggaggtgagtgcgcagcctgctcctccctggcccgcccaggcctgggaccctgctgtgaggtggagagaggcgacaccccgcccttgccccccacctggctctcctctaaaccccgttggggcaggctgagggaagaaggaaaggtgagagaaaaggtgggaaattccaggggccgggattagagcaaaataaaggctccgtttttttcttccttatcatcaacaaacctccacccaaaaaaggaggctaaaaaaaaagccacccacaccaagagacggttgggaccaggtggtgggaagacacagaggcgggacgcacccacctagagtctggcatgtgcgtgggccccaggggccagatgggtttagctggagcaggaagggccgccacctcggggctgtgcccacgtcctgtctcgggccgccctcggggctgcgcgcgcggccgctccatcgcgccctccttccatccaggtgggcgttggactctttgcgaggaccccggcggctggcccgggggaggcggccgaggcggcggcggcggcggccgggggcgacatggcggaggagcaggacctatcggaggtggagctgagccccgtgggctcggaggagccccgctgcctgtccccggggagcgcgccctcgctagggcccgacggcggcggcggcgg

SEQ ID NO: 28454 - DNA, 2300 bp, Homo sapien
ctgtgcggggacaagggagagagagagggagtggccccttctgtctagcgtggcttcctgcagacagagcgtgcccactgctacccccacccccatcctggcacagctggaccaaggagggcaaaggaggaagcagggagttagagagggggcagctgtgggaccccacattccacctcctaactctgggctctttccttccacaaccacccctcctgccccaggcgggtctcaggccagtcacagacacagcagagagcggggaggtcctttcctcaaagaggaggaactgaggggtggaaggatgagtggggacccaccgggagagagagatgccaggcaggcaggcagcgggcgggcagcagcgggtgttggaggcgactgcagggcagccgggacacgacggcagatgctcgtccctcgtccctctgtccatccagggcggctcctctccgggcggttctgaggccgagcgggcgctgttaaaaagctttttatgtgtgtgtgtgttaatcacatgattgccgttcacctgtatttcgaacaaagacagctcactgtttcaaggccccgaacaagagtctgggcacagggaagagaagggaggcggggggaggagggttggcagcgccgggggtggcgtcgaggaaaactggggggagattgtccaaggccagcaagcgagagaaagagaaaacccttatcaaactcctaattcactgggctccgaggccccagacacactggcccgattgtctggctggttgtgtgtgtgagcatgtgtgtgtgtgtgtgtgtgtgtgtgtgtgtgtgttccagtgtctgctccccccacccccaacatgcctctgcctcgtgtgactacctcattgtgtcccatttcccaccccctacacccctttggactttcccaagcatgaggccttgcctccccagaccctttgcagcccactccagacaggaccccttggggtggtcttggggctttgccctgctgttgaggagctcagaacgtcacatggttgccaatgcgaccccagctccattacataacccacatacaccccacctcggcctcaacaccccggcggggctgccctcagttaagagaacagcactgcgacctttggaggagaggccaaggaaagagagagaaaaaggtgtcaacggaggatgggcaggaaagaaaaggggagggagggagaggtgggcagaggagggaagaggcagggcaagtccccaccccttgttggggtgggggagtagaggacttcgtgacaatcaggactaggactcccctaccctctcccaagacagggtgagcccagtgtggaaggagctgggtcccagtaggtagcaacccaaaatgcctctaagacctactgagagagggcccccaacctgtcccaccttggcctcctggcagctttagtcttgtgtttccaccttgaaccagaccagaacgcgcgtgtgctgggtgtctgcagagaagggaccaggggtcaagctggggctctgcacttctcagagggatccctgagaagtctctcttactgtgcaggatggggcagaaagggctgcctgggaaaaggtaggaggcagggtgaggagctgggcatcagtgcctggcacacactaggcactcaacaggatttcgcagacgaagcagctagggccagccaccctcacgggcccccaggaccctcaccgccttcacgtctctccctagtcccctgccaagtgcccatcctgccacctgaggcagacgttaggagtcctggttgggcccaattttcttccatccaacaggttctgaccctccagcctacatctcttccttcctcggcctaacctcccctccacctcccagactaagcccaagataagcctcagcaagatgggcctgggcagtagggcagggagctgggtgggggggcctgggctccgggtggaggagccctgagtgttggggatgaaggaaagcctggaggctccaccttctgcccttccctccctcctctcccctcccccctctccccctccttccttccccagccctccgcagcggctcaggctcagtcgctcagtcagtctcgggctgtccggccagggtggttggtggtaaggattcaggctccgtcctaacgaggccgtggcctgaggctcagggccccccgcccctccctcccagcccaccagcgtcacctcccagccccgagctggaccgcacaccttgggacacggttttccacttcctaaggacgagccccagactggaggagaggtccgaggaggtgagt

SEQ ID NO: 28455 - DNA, 2300 bp, Homo sapien
ggcccacccatgacagaggagcttgtcatcccaagcaggaatgccacctggtctgacattaggattcaaaaggcaaatgataaactcctgactgtgaggccgtggtggctgctcggttaatacttgtgcacttgacctgaggtgagcatcctccacacctcccagtgctggcctaatagctaaatgatttcctctgactcacatttattgagcagtcactatgctaggtaggggagatgtgtgtgtgtattcttatttaattctctcatcacttggggatatcaagggtgcataagattatcaacatcgtacatatgcaaaagccgagtcctgagaggttaatagcgtgatctgcctaaggccccttgggtactagtggcaggatttcttgacttcaagtcactttccactacatccgagactgaggatgacacagccttatccaaaggtggaggtggcctagaaaatgctcaggggagctcccacagccaccccagcgcactcagactcggctgaagacccacagggtagcttctgtctgtcactatgctgccctcgaccactaacctgtgcccgtcggccctccaccttcccagtgcataggccctcccctgccacaccccaaagctctccggataccccagtataacctgcctggctggtgggtccagtacccaagacccctcctccatccctggtgattttggctctggaagggggtcattcacagcctcagggatccagagactctgtgaagacctcccagggaactttatgcttgtacctcagccccagaaattcagaatcaaccagtctggggtgggatctaggctccagtatgtttttttgttgttgttgttgtttgtttttatgagacagagtcttactctgtcacccaggctgcagtgcagtggtgcgatctcggctcactgcaacctctgcctcttgagttcaagtgattctcctgcctcaggctcccacgtagctgggattacaggtgcgtgccaccatgcccagttaatttttgtatttttagtagacatggggtttcaccatgttggccaggctggtctcgaactcctgccctcaggtgatctgcccgcctcggcctcccaaagtgctgggcttacaggaatgagtcaccacgcctggctcagtatgtttttctttttttctttttttttttttttttgagacagagtttcgctctttttgcccaggctggagtgcaatggtgcaatctcagctcactgcaacctccacctcccgggttcaagtgattctcctgcctcagcctcccaagtagctgggattacaggcgcctgccaccatgcccagctaatttttttttttttttttttttagtagagacaaggtttcaccatgttggccaggatggtctcaatctctcgacctcatgatctgcccaccttggcctcccaaagtgctgggattacaggtgtgagccaccacacccaaccaaggcccagtatgtttttcttaactccacaagtgattgtaaattcaacaagaattagagccagtcctaggcaactgattagaaatgcagaacctcaggccccaccccaacctgaagaatcccagtgcgccttcccatttgagaagcactgccctacgccaaaccccgtatccgcaagccaggccctgtgaaaggcccccgcagggaaactggaggtaggagggcacacagtccagatagaattaaagagtggaggccaggaccccccaggtcgcatccacacagcactcagaggtgctaaacgctttccctgtgttccctcatcccatctcagccctgtcctctgaaagtcaggaagacagtctcatgcctgtgtggggaaactgaggctggggcagagcctcaacttgaccagaccatccctcactcctgcatggcccctggttctgcagccagcagatttcctgaccttcatctcagtgtatccttcagggcaggcagggagggagggtgaccatcgccccacgtgacaggtgagggaccagggacccagtgggggaacacaggcggagccttccataaagccggaccagctccctcaggaagaggacttgggagctggggggtgaagggtcactgctgaccggaggcagctctgccaggcagtgtcatcagtgggcttcacgtttgactgacaggtattcctttcctctcctcctctctggggcccatcttctgagtaaatccgggacctgccttaacaaaagccaggctgagtcccaggaaaaccctgttgctccggaaaggcctccttgggcca

SEQ ID NO: 28456 - DNA, 2300 bp, Homo sapien
cctgccctgaaggatacactgagatgaaggtcaggaaatctgctggctgcagaaccaggggccatgcaggagtgagggatggtctggtcaagttgaggctctgccccagcctcagtttccccacacaggcatgagactgtcttcctgactttcagaggacagggctgagatgggatgagggaacacagggaaagcgtttagcacctctgagtgctgtgtggatgcgacctggggggtcctggcctccactctttaattctatctggactgtgtgccctcctacctccagtttccctgcgggggcctttcacagggcctggcttgcggatacggggtttggcgtagggcagtgcttctcaaatgggaaggcgcactgggattcttcaggttggggtggggcctgaggttctgcatttctaatcagttgcctaggactggctctaattcttgttgaatttacaatcacttgtggagttaagaaaaacatactgggccttggttgggtgtggtggctcacacctgtaatcccagcactttgggaggccaaggtgggcagatcatgaggtcgagagattgagaccatcctggccaacatggtgaaaccttgtctctactaaaaaaaaaaaaaaaaaaaaattagctgggcatggtggcaggcgcctgtaatcccagctacttgggaggctgaggcaggagaatcacttgaacccgggaggtggaggttgcagtgagctgagattgcaccattgcactccagcctgggcaaaaagagcgaaactctgtctcaaaaaaaaaaaaaaaaagaaaaaaagaaaaacatactgagccaggcgtggtgactcattcctgtaagcccagcactttgggaggccgaggcgggcagatcacctgagggcaggagttcgagaccagcctggccaacatggtgaaaccccatgtctactaaaaatacaaaaattaactgggcatggtggcacgcacctgtaatcccagctacgtgggagcctgaggcaggagaatcacttgaactcaagaggcagaggttgcagtgagccgagatcgcaccactgcactgcagcctgggtgacagagtaagactctgtctcataaaaacaaacaacaacaacaacaaaaaaacatactggagcctagatcccaccccagactggttgattctgaatttctggggctgaggtacaagcataaagttccctgggaggtcttcacagagtctctggatccctgaggctgtgaatgacccccttccagagccaaaatcaccagggatggaggaggggtcttgggtactggacccaccagccaggcaggttatactggggtatccggagagctttggggtgtggcaggggagggcctatgcactgggaaggtggagggccgacgggcacaggttagtggtcgagggcagcatagtgacagacagaagctaccctgtgggtcttcagccgagtctgagtgcgctggggtggctgtgggagctcccctgagcattttctaggccacctccacctttggataaggctgtgtcatcctcagtctcggatgtagtggaaagtgacttgaagtcaagaaatcctgccactagtacccaaggggccttaggcagatcacgctattaacctctcaggactcggcttttgcatatgtacgatgttgataatcttatgcacccttgatatccccaagtgatgagagaattaaataagaatacacacacacatctcccctacctagcatagtgactgctcaataaatgtgagtcagaggaaatcatttagctattaggccagcactgggaggtgtggaggatgctcacctcaggtcaagtgcacaagtattaaccgagcagccaccacggcctcacagtcaggagtttatcatttgccttttgaatcctaatgtcagaccaggtggcattcctgcttgggatgacaagctcctctgtcatgggtgggcctcctctgccatgccccttaacagcgaaggcgacactctagggcctccccaggtgccggctcagctgtgagggctcctgtcatcggacttcatcctcccaacaaccctctgagtagatgctattattctcattttagggaggaaactgaggcacaaagcgattcagtgacaggcctgagctcgcccagcgaatgatgacagggtgtggactgggacctgtggttggtcccagcccagcctctgaccactctgctctattgcccctaggctgcaagtgcagctgcaggttggcctgctcctgcctcctctccttgcctgggcct

SEQ ID NO: 28457 - DNA, 2300 bp, Homo sapien
ccagcctcatggtgccgtgacatcagcaaatggcctagaaaagcaggggctcggctgggtgcggtggctcacacctgtaatcccagcactttgggaggctgaggcaggtggatcacctgaggtcaggggctcgagaccagcctggtcaacatggcaaaaccccgtctctactaaaaatacaaaaacttagccaggtgcagtggcagacgcctgtaatcccagctacttgggaggctgaggcaggagaattgcttgaacccgggaggcggaggttgcattgagccaagatcctgccactgcactccagcctgcgcaacagatcgagactctgtctcaaaaaaaaaaaaaagaaaagcaggggctcagtgcctcacctctgacctcaggctggttcctggcctcccagggcctcagtttcctcatcagtaaaaccacacccaccctggagctttgtgggttcatcaaaagaaggcagcttgccctttgggggcaggaagggggctctgagacgtgaggctgcaactcatggtcacccagctgggaaggggcagcacctcccacccgctcccgccagggcttcccctcctcttctgctgttcccagtggcccggcgggtgcctcagttcagccatggttatgaagcagatgcatatgaagtgcctgcgggtgtcaggcagcacctggagagtgaggtggggcagtcatgcagaaagtggtgatagtagcaggaggtttcagatggcagagaggccggtgggcaggagagggaggctgcatggccccgaggacacgagcaggatagaccgagggattgcaaatgaacagaaaagaaacgtgctcctgccaggccccctgccctgggaagggaagagagcgacccctgattcccacttgccccactgacttgctctagaccgttgggcagcagccccttggcctgttaggcctcagcatcctcatctgtcaaatgggcttatccctctcgtcccataggatggtgctgagaatcaggcaaggtgaggggtatgcacacaccacactggatgtaaaggcctcggaggcgcctgttgttaacagttaatgggctccagatgtgcaccatttacagaataacccaccatggtgagtttgtgccacaggcgatgccacagaagggtgtgagaccgagagagagagacacacacagggggagagagagagatggctatggcagagagcagggaaggcttcctggaagaagcaagacctacactatgtgtgttatggagggatgggcaggatttgcagaggccaagaggtgtggggagagcttaggtggaaggaccagcacaagggaatctgcttggggagtggggagggatgtcagccccctggctagcaaggtggggtggggaggctggggtgggatcctggaaagccccagctcgtcctaggccacggccccaggtctcacctcccaccactcccagccctgggccgaaagctcccaactggtttctcctctggcctctgctcaagccctgcccccacctccagtgcgctctgtgtctctgctggctgcttctgactcattgttccgagctgcgcaggcacaaccccctccagaaagcccaggctgacaggtctcccctgggattagttcattctgtcccaaggggaagctgctattattatccccattttacagagggggacattgaggctcagagaggggtccagggctgcacggctggtgtcagcgctgggatttcaactccaagtggcctggctctcctttgagctcttggctgcctccgcaccccgccccatgctgggcacttcggtctccttagagctggtgcaggaggtcgctggttttgcattatcccctcccccgcttcttggaggaggaagctggagcccagagaagggttgggacctgcctgccgccacgtggccaggaagtggccgagcagattctgaagccaggagtggctgaccccactcctctgtgacaggcctggggaagctgccaggcctgggacgcaggggtgcatggaagggaagaggctgtggcccgaggcccagtgagagcccagtgcagccctggaaggcggaaaagacaactagtggggatgaggagcagcgtggacaggcccaaggagctgggggacagatggtggtggtgaggcagcaaggctgaaacggtgggagtagaggaagcagaaggggaggcggaaggagctgacaaggggagtcgggaggacaccaaggggccatgccaagccctaggttttggggcactcctgccctgtccgggt

SEQ ID NO: 28458 - DNA, 2300 bp, Homo sapien
gggagcaagatatatgagctgagattgtctgctaaggctgccgggaagaggtgaattagagcggagcctgcaggcaagggatgaacaaggcagaaaacaggggcatcttccccaacctgagaagaagggccagagtgggtagggggttttgaggtcagagtgacagctgtgccatgcaaattgtttacaaagcactcacacctgtttctccttttaatcttttgtttctgagatggagtctggctctgtcacccaggctggcatgcaatggcgcgatctcggttcactgcaatctccgccacccgggtccaagcgattctcctgcctcagtctcctgagtagctgggattacaggtgcataccaccatgcctggctaatttttgcatttttagtagagacggggtttcaccatgttggccaggctggtccagatatatgatctagatcttataccaactcctgatctcatgatccacactcctcagcctcccaaagtgctgggattacaggcgtgagccaccgcgcccagcctctccttttaatcttgactttcacaaatacctggtggcaggtgtcatttccccattctacacgtacctgaggctcagagtgagacagcgactcacccaagatctcccagctacaaaatggcagagcctgggcctgagctagcatggtcatgggctggaagagccacaatccatgttaaggcacctgggtttggagactgctgccttttttttttttgaaacggagtctctctctgtcgcccaggctggagtgcaatggcctgatctcggctcactacaacctccctctcctattttcaagcgattctcctgcctcaggctcccaaatagctggaattacaggtgtgcgccaccgcacctggccttagactgctgctttttgaaaccaaaattctggcctggaaacagagcttggttttcccagccccagccctgccgctatgataccagaggaagaggcttcccagggcctccgtttccttgcctgcacaatgtggctggcaagatttggtcttctctcacagggtggtggtgagctttcaaatcctgtgaaagtgatctcacaggagagcagtggacacgtgggaaggctgttattgtcacggcattctgcacatctgtccggactcaattagccacctaaggagagagtagggcggggcttccaccggccgtgggatatgtggataatcatccttctgtatctttcttccatggctcctggggcagctggggaagcaagctggatgggcctggccccatgctgccggatgaggtggatgcctggctgtggctctgggagagccaacctcccccagggaacccactttacacaatagcagtggcagcagaggctggcgaggagacaagattcggactctggggagcactgatagcatttcccgagcctcaggtacatgcggaccgtgaccctccctgggaccccaggggggctgctcctcaggactaaggaaggaggagggggtgtgagaaacctttcaccatataccatagaaagcatttacctcaatggccttggtttacatatggggaaactgaggcacataaagggaagggagcatgtccagtctgtccttaatagcaagacccactgaatacacctctcctggctctctgtttagtgtttggacgttcaaagatccctagactaggcggcgggagtttcagggccacgatccagatcttacaccaactgtgtgtggccccgcacaaaatcactccccgctctttggcacttaagttggcgaaactgggatgggctgggacctcaaagggccattctagtaggggagtcacaggcccaggtggtgaaggggtgaaagggcatgatgtcttggggtttatagtccactgagcctcgccggaggtaaccccggctcagggatgctttcgttgccatggcaaccgccgggccggcgcgggcccctgagtgcagctgaggaagctgggacaaaccctgcccttcccaagatggcggcggcggcagggcaaagggcggggttagacgctgtcagcctgtccagaccgttcctctgttttcgcttgttcctactaacagcgagcttccgccaatacttgttctcgttcttggttccgagcgtcccgggagccgggaagggaaggattgtctgcagggattggagcaaatatccagtggggggaaagccgggacttccgcgtcttgccggaagtgacgtgacaatcgcggccaccgccaggtggaacggcaggtgggttcaggtaccagc

SEQ ID NO: 28459 - DNA, 2300 bp, Homo sapien
caatggcagcgacagcagcaacagcagcagatccaagaagcgggtccctgagacggggggtggctgccctccccagaccaccccggcagcctgagcagctccaaagcactggcttggggtccgagaccttcaaagtaaagcaggcggaatggggggacaggacaatttctccccctccaggggctccaggactctccctggggggcccacctcttgccccctaacctctttcccccttttctgcccccgtggggaggagccccttgtacctgctccgtgcccaacacatgccctctctgtacatcttttgtaaatgatgagaaataaaggaagtggacgcaaagtgatgcggcagcaggactggtggtgtcttatttgggggacagggcagggggtgagggatagagactcccccattggagaatggggtctagggggtactgaggtcctggctgttccccgggaagccatctcactcccagccccttgtttgtttgtttggagaactctttagggctgccccaaagccctcgcgctgcagcccccatctccacctgctctcatttcgacctgtgggtttcctaggaagtagcggctgctcgggtcaggggagaggtggcagtggccaagggctgggaccaccagcaagctgccctcaggcggcctggacacagcaccctttgttttggcccctcccccccccacattcccaggcacaggcgtggattagcttcattctagagaaagctgccagcccctcctggaatgtggcctggggcggggggttggggcgggggcagatgaggcactgaggtgattagaaccgttggggtctcttcagggcagggctgtgcccccagcaccagactaggaccccctgggcaaggtctctgtgtctaccaccccaggctccaggaggcacagggattctcttcctccctcctggactggcttgggacagggagcccaccgccgaggcccagcctggcctggggctcccagtctcttctcccctcctggacaaaagcctcttagcaggggtgaggtgtggtgggggcacacactctaagctccaggcctggggcagggagcgtcaggcgggagtcggccagaggctcagcccaggctggtgggaagctggggtgtctggcagcccccatccgggtaagcttcaccgggagctgcggcggcggcccctccctgcaggcctcaggagatgtgaggctggacccccaaacccacgaggcaggctcaggtgagtgtgatgtgagggctgcctgggatcaccctcctgtctccaccttcaagtggctgcccctgtgacaagaggacaacaggcaggaaaagccacaacctggtcctagtggaggaggggcagagtcccggataccctgggggtggtggcactgcccagtgccaggagggacactccaggcaggagggcaggaggctatccccagcccccggctcctggtgcacctgtctctgagtacaccctcctcatctgttatgggggcgcttgtaactgctgtgagggccccgggtggagccccaggaatgagacaggctttggagccattcttttcatatagagggtttgaggtttggagggcagaaggccactctctcagtgctgctaaggttcctacctgtctggcagaagccagagacctgactcctctcccgcaagattcccagctggcctcggggtgatcaatcacccatcttacatcggaggaaagggaggttgggagaggggaggcgaccggcccaagtcagggagggaatccatggctgagctgagatgcatgggaactcagctcccctggctgatatctgttgaaagtggcttttgtccccttaatgttctaatgacaatagtcatttgtgatcactgagaaacattaggaacatggcggaaggctaaagaggaaaatcacgcacagcggccctttgcagccggcatctgcccctctgctgtttgttctgttgtcccgagaccctcacgcgtacggggcgactttggtgctggacgcccacctccaggcacatacctgctccacttcccgacgccttccacctgaggccctgaggggccagcagttgtccttcagagggagcctgcagaggtgcagagtcaggtgggacccgtcgtcctcccctcgtccttcagcgccctttgcaggagaaggagacttggggtgagagtcctacctccgtttccccttttggttcccagacctgagccaccctcacgtgggtagccctgtgcctcagtttccccatgcttcgtctccatc

SEQ ID NO: 28460 - DNA, 2300 bp, Homo sapien
ggattttattatgactgagtgacaacacagaaaggtcagtgccattgaaagaagttttaggccaggctcggtggctcacgcctgtaatcccagcactttgggagtccgagggcaggcagatcacctgaggtcaggagtttgagaccagcctggccaacatggtgaaaccccgtctctactaaaaatacaaaaattagctgggcatggtggcaggcgcctgtaatcccagctactcgggaggctgaggaaggagaatggcatgaacccgggaggcggagcttgcagtgagccgagatcgcgccattgcactccagcctgggcgacagagccagactccgtctaaaaaaaaaaaaaaaaaaaaaaaaaaaaaatgcattttccatagtgttactgggtaagtaagtaatgggactgggttctttggtcgtagtttctatctaagcgccattcctgagcctatcgctgcaggaaggaggatggggtgattgagtggccaggcctgggtgccacccctacccctgaagctgggcggtgaggacagccccgctcaaagcacacacattgacgcgggaagcggggggtcagaggaagctcttcgtggaaaatggaggtgcctttgccaaaagtagagggtgcgggttggacggtgagctggcttctggctccttccagctagaaaatccggtcgtcccgagctggtagggcctgagctctcaggtcgagggtgtcattttgggtccccaggattcagggagccgcccggacctggctgacccccgtgtccccgcccggccaggcccgggggatgctccagaaccgcgtgctgctgtggaaggagcagtctgaggccagccgcagcccgtcgcgcgcccactcccccggcctgctgggccccgcgctggggccgccctacccctcgggccgcctgacgcccacctgcctggacatggtgaggccctgggcgcccccgccgccgttcgcgcccccgccgccccccgcgggggcccggggcctcaggcccccagcctggagcctcctgccccccaggctcccgctctacgctgcatcccccggcctgcccttccgccccggcgcgttctccgcgcccccgtggtggcccggtctccgcccccagaacccctacgccgacgcctgggactgggggtgggggctggactagggcgcggccccgcccccccccccccccgccccaccctcccctgcccatctcccccgcagcccccgaggcccctgggagagttcagctccccccgcagccggcacggctccggctcctacggcaccgagcccgacgcgaggcccgcgtcccagctagagccagaccgtcgctccctgccccgcacgccgtcggcctgtgagtgcccccgccccggggcggcaggagggccgggagaggcgcgggggtggggctgcagcaggagggatcgagggcagacgccaggaagaacttcctgcccacgtgccgccgcgctctcccgcccacagcctcgctctacagcggcagcgcccaaagctcgcgctccaactcctttggcgagcgcccgggcggcggcgggggcgccaggagagtccgcgccctggtctcccactcggagggcgccaaccacacgctgctgcgcttctccgctggggacgtggtggaggtgttggtgcccgaggcccagaacggctggctctacggcaagctggagggctcgtccgcgtgagtgggagccttggaggggccgggggtgggttgagaagaaggccctgggggccgggaacccggggacctgccggactgaggtttccctggcctcccccgggggcctcggacaatgctcctctcctcccgacccccgcaccctgcctcagtttcctcattcattcagtgggagtaggaagagccgccttaccaagttcaggatgacggtccttgagagcgggcagaggatgggggatgggcaggttcttccaaaagtgtggaaatggcagaaatcctattgcttgagcacctactgtgtgcctgcctctgggaggaggctgcttcccctctgcagagtcagccctggaactctgatgcagggggctgggctgggagtaggggcttaaatgtgctcacctctttgcggtcaggctccgtggaaatcctgaaagcacttaaactgggctgttttgacacttgacgtggaggaggatttggggagtttcatacagtgaggttgccagaaagtgcggaggacagcagggctggcagctagcagagggaatggacaggcaccactgtcctgcaggggaaa

SEQ ID NO: 28461 - DNA, 2300 bp, Homo sapien
aggcagaactagaatgaggacgaagcttctgagcctgagcccagcagcctttcctgtcctgccccggtggccagacatccacttgccatgggaacctgtcacctcccaggcccatctgagacctcaacagcttctgagtgtttttgctgggctgtgccctgcccatggtgctgaggacacagaggtgagccatggccatagcagctccaaggggctatgcatggggccctggccataaattctgtatacaactggaggaatggacaacgaaggaacaaatgtgcacccattccagagacaaaacgagggagcaatggattctgcttgggaaagtcaggaagacaggaagctggcactggaagatagggaggaaattccaggcagagggaatgatgtcatcaaagcacaaactaagaataagacaaaaaataagaaccagaagactctgacacacttatcaagggttcgtttccaggcagcactgcactaaacattgtgaatgtttaaccatttcgtcctccctccagccaggtggtgttcttgtctccgtttctctgacaggtgggcaggtgcctggtatattaggagcacgatgggcagtctgttatagcagaaagtgcaagggggtgctggggcctgggaacagtaggggggccttgatcaccctcaccctgcactccgctcaggtgcagacattccatggaggcctgctgcagcacatggagaagaacaccaagctggacatgcagttcatcaaagtgagtctggcctccccactcggcccccaactcactgcaggcaggaccccctctcccatttgacaggtaggcacacacaggccagtgctgagcactgactgggccccagattatccatgttcccagctgagccccaagtctccaaacttccagggccctgatctctgggaggggtgtcttgagctctctgatgtggggggattctccctccccgactccaccctaccccaggacagccgccagcactatgagctcgagtaccgccaccgagcggccaacctggagaagtgcatgtctgagctgtggcgcatggagcgcaagagagacaagaacgtgcgggagatgaaggtgcgagggccgggaagcgggggtgggccaggaagggcgggtgggcagacctcggggcgagaccgggccctgggaaccccgaacgcctccctgagctcccccaccgagcaccagcccaactgtgatgagcgtggctggggaggtcagccagcccctggtggggtgggcgtaactagctcctagggccacgcccagcaccgccccttgccctgtggcttactggccttacccagaatccccgggcctctcctgcaaacccatcccacctcccccatctcctacttcaccgagaaaattgctcgcttgaacatggtgccaaaggtgtcatccaccagccgcccatcctcctcccctctctcctgcctggcagaggtatcccgcccccggctagggccattccccttcctgagcctggggccccatccctggcctctgtctccaagatccaaacccatggattaaccctctgcctcccttcccgtctcttctggctcctttaagtgagctcacgcctcccctcctcagaatcttccccccaagtaggggctattaacctactcattcatattctcattaaacccgtccccctgcccccccagcccgtgcttgggcttgtgctgggtgccagggacagagcgaaggctcagacagcagccctgcttgtgagaagcacctgggagagggagacgcagggcccagactcataacaaggctgctgatgatggggcaggctcaggagctaggatgggccgggtgatggggggtgggcttggggagagggcagtcaggaagaacagggggcttgaacagctggcgcctgtgggcgaggggggtgggatgagacacacccaccgcccccagccagaactcccgttcccccccaggagagtgtgaaccggctgcacgcacagatgcaggccttcgtgtctgagagtcagcgggcggctgaattggaagagaagcggcgctatcgcttcctagcagagaagcacctgctactttccaacaccttcctgcagttcttcggccgggtgagttggactggggggcagcaagcggggcgcttctaggagctgccccctcctgagtggccgtacatagaggtttccctcccttcttccctcttccctccctgcctgcctgtctgtagaaattcattttattttgctatctccatccatttcttcctttgtt

SEQ ID NO: 28462 - DNA, 2300 bp, Homo sapien
cacagctgggacagtccctgcagtcccaggaaggggttttgcccgagccgctctgctgctgtgtggctcagcctgactcgaaagagcctggggctccccaggctggggctccgagagtgcagggcagggccgggcggggtgcgggccgggcggggtgtgggcccggcactcaccaaggctgcttctcaccagtgcacggatccagacgggcgggctgtggaccgggcacgggcctggtgcgagatggtcggcatccagtacttcaggtgagggctcagccgccccagcccttggccccgtgccctggcgtggtcggactcaccgaccttcccctcccagccctagtgtggactttcccttccccaagggtctgctctgttccccaagcccaccctggtcctagctggcgtcccctgcccagcctgagcatcctagggtgaccccctcctccctggcccgaacagattgaacccccagctggggacggacatcatgctggatgaggtcagtgacacagtgctggtcaacgccctctgggagaccgaggtctacatctatgagcaccgcgaggagttccagaagctcatccagctgctgctctcaccctgagggtccccagcctctcaccggccccagctgacctcgtccattcagcccctgccaggccaagcccagccactgccctcccgggcagatctgggcccaggcacctctgagtccatagaccaggcctgggagaatgccaagctgcctgcccgaggctggtcctgaaggcctgtctcccactaaccccgccttccagcactttctgtcattccaggctgggaaagtctagagccccctttggcccctttccctgactgtcaaggacaactgactcccccatcagctcaaacattaagggtacccgggcacaaccgtacccctgcccccagccccagcctccctgagggcctgccgggctgcctctgccccagcccccagcaagggcactcccaggcttcctggtgggtgcagcccactccctctgccctctgctccgttccctgggggctgggactaaagaaatgggtgtcccccaccccatcagctgggaaagcccaggccgcaggagtgggatgcccgttggactttgcccctcacactggcccagcccctcacactgccccaccccgagaaccctcagctctcaaaggtcactcctgggagtttcttcttcccaatggaagtggcttaagagccaaaactgaaataaatcatttggattcaagttcacctgtgttgtgtgtgcagtggtgtgagatccacctgttcccctgacccccggctcccctcggccttgacccttggccttgaccggacttttcctttgtacccggacactctgttttccaggatccctgggcagggacacctcctctttcctctaggcctcccctaaaccggcccttagggtatgcagaggcagctgccaggcccacatacccccggcaggcccaaggagggccacaatcttcaacttcatcttggaggaccagggagagccccatttgtcacccagagaggccggggactccgcgtggacaggcagcgcgtgtgcagggccgaggtctgcccagggctgggcaactccagcgtttgtgctgctcctgctccggcaagtggaggagctgggcgggccagagcggctgtgggagccaagctcagagggcgtggccccactgtgagccgcaggcctgaggacagtgagaagtaaagcggcgttcccctccaggggctgctgctgctgggtctggcagagagagtcctgggggagggcatcgggcagcgcccgcccagtaaggtgggcaatgcctggtataggcaggtgggagggcggggccccccagggttggggtccttgaggagggggtgacccaggagggggctcatccacatgggcacttgtatcagcccacagctccaaggggtgaataattgaagggcaggtcacacgagcctgcccggcacaggatgccttccctgccggatctggttacgccccagatcacattctgacatcccgagttggtgaataattaagctgccactcctctgaggcaggcctccatctccaggtccctctccgaggcttcctcgctgccagctgagtcgtgggcacctgagggactacctaccactgctcccggctgtgccatcgccaccagctcccagcctcctgctcagacccgggacagcccctccatggcccccgagatggaccagttttacaggtccaccatggccatctacaaggtgag

SEQ ID NO: 28463 - DNA, 2300 bp, Homo sapien
catgaatacaagatgaagtgcagagccgtggggcttcagtggtttttgagtctctccgttgcccaggctggagtgcagtggtgcatcttggctcactgcaacctccgctcccgggttcaagcgattctcctgcctctcagcctcccgagtagctgggactacaggcgcccgccaccacacctggcgaatttttgtatttttaatagacggggtttcaccatgttgggcaggctggtctcaaactcctgacctcaagtgatccacctgcctcagcctcccaaagtgctgggattacaggcgcgagccaccatgtccagccggaaggaggtttctctctgtctgtctgggaggttgcaaaggaagggcccagaatttgggtttgcttaggcctcggtaaacccgcttcctcctgccacctcctgcgttcaggcgctctgcaggctgttctacgggagccctgcgtgtggccgctgcatctccccgcctctgacccctttgttcctaggtaagtccatggcctacatgcgcggcatgtactttcgcatgaaggatgaggtgttccggggctccaggccctacgagtcggggcccctggaggagttcctgaagcgggagtttggggagcacaccaagatgacggacgtcaggaaacccaagtaagccctggcgcactggggccgtggccgcagctgtgcccactgtggctgttccctggggacagagggctccctgtcctgctgagggagggggaagagcgccccacgcttgaggggagcagagggaacccccttcccagggaggcagagggctggggtgtggctctcacttgggcatgcagacacctgctgagcgcaggaggggcgtggcctggtgggcctggctctgccctgcctggctctgccctgcccggctctgccctgccggctctgccctgcctggctctgccctgcccggccaggggtctggggcttgcctggagagagcctgggccacccttctctgagaccacctgggcagaggctgggtttttgctgcccaggcaaaaggaacccactggcctttcaaatgacacggctaaacattttctcacatttcagacagcactcgctcccaggatcggactactaggttataatcagagggcttcagtcttacctttaatttaaggcctacaagacttgaactaatttaagtcagactgaaggagaaagtcacatttccaggaaacatttgtttgggaagcccaaatcctaggactaagcaatgcatcccgttcggggctggatgaatggtgtgttccaagaggagtgttttgagcatttctgagtgattttttcatattttgaaagtgagtgtcccccagtcttaggggcccggcatcccctctgcggtcttccctagggtccaaggccagggaccttcaatcttttttcccactctgtggcttgtctttctgctctgtggtgtttctaggtttttgttttttgttttttgttttggttttggttttggtggcccatgttcttaatgaggtagataatatttataaatatttttcttcttgtagtttgtgattttttcctttctttctttcttttttttgaaacagggtcttgctgtggggcccatgctggagtatattgctgtgaacacggcttactgcagcctcgacctcctgggttcaagcagtcctcccatctcagccgcctgagtgcctgggactactagcatgtgccaacacatgtattttttgtagagatggggtttcaccatgttgtccaggctagtcttgaactcctgagctgaggcgatcctcccgccttggtttcccattacaggcatcagccaccatgcccagcctagtttgtgctttttatttctcgttcataaacccctttgctgcccccaagcagcacacgattctcctgtgtcgagctggaaagctctctagatctgccttttacattgaggtcttttatcaacctggaattgatttttgtatgagggtgaaatccaagatccaatttaatgttttccacgtgattggccaatttttcccagccccatctgtgaagtctgtccttccctccgcttcctcagcagtgggtcaagcatccctctgctcttggatctgctccaggctgtgttttgttccactggttggaaagctgtctctgtgcccggaccacagagcataaaaaactaccgctgtgtggtgagtcctggtgtctgggtggcagatcctccaccttggccttcttcaaaaacatcatggctattcttgggggcagtagagagaa

SEQ ID NO: 28464 - DNA, 2300 bp, Homo sapien
gcatctgccccggtgcattccttggtgcccagggagacatccccagactagacaggacccttctctggactttctgtgggctggcccactcagggacctccattgtttgggagcggggtcccctgaacagagggcagccaggagccagtccttggtgagccagacttcactgtggaggcggcagcaccttcagccagggtagcccgaccaagcctggaactctggagaggcaccgtgactgtggcttctagtcctggctccacctctctctcccctcccaggaactccccctccacctcccatctttatctctcaattttgcaggcagtcacccaagccaggccggatggtgggcctggggtgcggcgtcagatgggtaacgccctgggcctggagaggccaccgagcctagccatgcggcattagctctagctctcactccctaatccgtccttcttagctgcgcacacaccacacgccccctcccctgcaccctgtccccggcctctctcagccactcttctgcttcccttgttcactgtggagccgtgtgccctggggagggggagacaccgcttcgcagccctcggttctgctttgctgcttctagactctgcacagtggtggggggctgtcagagttggggtcacgcgggctgctgcaccaggcacctggggactgggctgcttgtcaggaggggcagctagtcagttgggtggacgtcaggcaggccttggacacaaaggaagacatggacagagtggatggtgggcctgatcccggaggccactgggatttccagacctgggatcaggacgagggatgtctcctttcatccatggacttaaaccccgaggaacgtcctgactcagccttttgactaaatgaccttgggtgaattatggaccctcttagagcctcacctgtcaatagggaataagaattcttaggccccaggtggttattgcagcatcggctccgatgcaagaagaagcactttgtctgaagaggacacgcaagggtattcatgccttggggtttcaagaggaagagattgaggggaacctgggagctggctgggcagggtggggagcccttcccagagcagtgggcccccctttccactccagcccatttctctcctgtggcctgtggctcagctttctcctgggacagagtccttcctgtggggaagggacagatgacagggggagtggggggatgagggcgtggccgtgggcgaggcacagcccaggtttgatctagggacctctggggtagcagggcttggggacccacctgaccacagcatgccctgctctgtgcctcacagaactacaggatctcatgcacatctcacgggcccggaagccagcgttcatcctgggctccatgagggacgagaagcggacgtaagtggatcgagatcgggggcagagcggggaacgtgtgcgctttcctgcccctcacccaccccctgttgtgggctcagggctttactctctgcaccctcacagccggcgaagtggctctgctcctagtcttatagttctcagcagagacagaacatggagagcctgtgtcgctcgttcattaatgctgggcggtgcaggctctggagaccagcccagggtgccaggcttcttggacttggtggggctggcgcagtgttctggcctccctccctgatctccttatggctagaagagggggagatgcctgggtcccccctggggagatctcagcagctgcttcccactgctcctactggcttccttaaccacctcccactgcagaatagtggcgtgggctgccttccccagcacctgctgtatacctagtcccattgtaagaggcgggcctgggtgacaggatgcaaagagaagacgcccaggccttgcccttcaggcataatcccgggtgcttgaactcagtgccagctggcacggcaaggtaccaggacaaatgcgtttccagccactgtgctgtcgccacctcccttgattgctgcagttgattcatttattctttattagtctctcatgttcctaatagccttcccagggaggaatttgtaaccttgttttacagatgcagaacctgagcccctgagaggtgaagtgacttgctcaaggtcacacggagtgagtgtcagggtggcaactcacagccgggtcttccgaacccacgtcctttgtgctaccgcaggctctctctgggttctctgtggactctatacctagtgccagccctctgcagggaaagctctcttctcagaatcagaggcagctccactccca

SEQ ID NO: 28465 - DNA, 2300 bp, Homo sapien
tggcaaaatagcaagaccttgtctctacgaaaaaattaaaaaattagcatgtgtctatactcctagctacttgggatgctgaggcaggaggattgcttgagcccaggagttagagtttacagtgagctatgattgcaccactgcacttcagcctgggtgacagaatgagaccttgtctctaggaaaaaaaaaaaaaaaaaaaaaaaggtgctgcgttgctaccagattaaaatgtaagaaggacaatgtaatgtttccagagtccggagtgctcaccaggtgccaggtctgtgggagctgatttctacccaccatgaaattgaattttcccaacccccacaaggtatcgtcattttattttactttattttattttattttattttattttattttattttattttatgttacgttatgttattttattttgagacggagtcttattctgtcacccaggctggagtgcagtggcgcgatcttggctcactgcaccctctgcctcctgggttcaggtgattctcctgcctcagcctccggaatagctgggattacagtaatgtgccatcatgcccgggtaattttttttttttttttttttttttttgagacggagtctcgctctgtcgcccaggctggagtgcagtggcgcgatctcggctcactgcaagctccgcctcccgggttcacgccattctcctgcctcagcctcccgcgtagctgggactacaggcgcccgccaccacgcccggctaatttttttgtgttttttagtagagacggggtttcaccatgttggccaggttggtctcgaactcctaacctcaggtgatctgccctccttggcctcccaaagtgccgggattacaggcgtgagccaccatgcccggcccaggtatcatcattctagagagagctaacaggacttgtgcaggtcactcagccagagagggtgaaagaggggcttggatccttggtgtctgcccaggctgctcttctggaagctgaaggcctccttttgtgaatccattcagccagcagatggagcagctgttgcccctggtgagggcactgtccccacccttgcacagggcaccagttggccatcttgtgcagaggtagccacacctcctctgagtctctatcctagatagctcagttaagctcccaggcccagaactcaaaacctcactgctggccgggcgtggtggctcacacctgtaatcccagcactttgtgaggccgaggcgggtgtatcacttgaggtcaggagtttgagaccagcctggccaacgtggtgaaaccccgtctctactaaaaatacaaaaaattagcaaggcgtggtggcgcacgcctgtaatcccagctactcgggaggctgaggcaggagaattgcttgaacccagaggcggaggttgcagtgagccgagattgtgtcactgcattacagcctgggcaacaagagtgaaactccacctcaaaaaaacaaaacaaaacaaaaaccctcactgcactttagtttccaggcgtgcttttggacagcactgtctcatctcaccatcactctgtccatttcctggggcaggcacagcagcttgtgtcgataaggatattgacgcccagaaaggttaagtgaattgcctgaggctagtgagatatccgtgttctgtgaccctttcctgtgccaccaccctgcccacttcctgctggtgtggccctggggcccatctcttgtacgagtgagcaaactgaacagaaacctgatacaggtcacatcagatataattacattcaaatcagcccaactagctgagtggcgggaatgctcttgagctcaaataaaccagaaagtccgagtttccgagtgcacttccctgcatgtgcacttaggtccccctgccaccttgtaccacacctgctcacctctgctcaccctggccctctcctgcagctgtgccaattgcgcggagaacgaggagggctgcacacccctgcacctggcctgccgcaagggtgatggggagatcctggtggagctggtgcagtactgccacactcagatggatgtcaccgactacaagggagagaccgtcttccattatgctgtccagggtgacaattctcaggtgctgcaggtgagcagggggaggggcagggtgactggtactgatacctcccggtgtccacggttccctttgggcccctaggctcaggtgtcactctcaggcctctcactgtcccccattggtccttgaggcctgagctccttcatggagggtgcagacccctccctggctcttc

SEQ ID NO: 28466 - DNA, 2300 bp, Homo sapien
cacagtagctgggaccaaaggcatgcaagaccacacctggataatttttgtattttttttaaagacgaggtttctccatgttgcacaagctggtcttgaactcctgagctcaagtgatctgcccacctcggcctcccaaagtgttgggattacaggcgtgagccactgtgcgcagtcaagctgaaactcttaagcaaattttaaatcttactttaaggaacaatttcctcacctgtaaaatggggacacgaggatatgatggaagtgaagtcactttgtaactggtaaagctctgtacagatattagttaagatggttaatttcattaacctgtgaagattcttaactaaaccttgcgcaagttgcattggctgccctgtctaggcactaatatctttagacggactaaggaggaaacacactttttttttttttgagacagagtctggctctgtcacccaggctggagtacagtggcatgatcttggctcactgcaacctctgcctcctgggttcaagcaattctcctgcctcagcctcctgagcagctgggactacagactatggccagcacacccagctaattatttgtatttttagtagagatggggtttcaccatgttggtcaggctggtctcaaactcctgacctcaagtgatccacccgcctcagcctcccaaactgctgggattataggcgtgagccaccgcacccggcctacacgcttcttttcacaagaatgacacccgcaactatacttcccacgtaaatggagagcagtctggcagattcatctagacctagggttgggtgattattagggaaagaaaaggtccaaccaagccagtgggctgaagagaggacatgacctgctcagtccgaagcagatgtgtgactaaagtctagtctcctggcttctctgcaaaatacctcattatcggcattattaaccctaacaactgccatttattgaaatcccactatgtgcacgaatggggaccaatttacttctagatattacaacaatcttgtattactgtgcccacttcctggatgatgggtctgaggttcacagagatcatttgcccaagttcctactgaaagtgctaaggtatttcctgagactggctcagggtgtgttgccagacaacaatgcacacatttttaacacaatactaaacttagtatattatacttatgttaaaaatttcggagccgggcgtggtggctcacgcctgtaatcccagcacttcgggaggctgaggcgggcagatcacttgaggtcaggagttcgagaccagcctggccaacatggtgaaaccccgtctctactaaaaatacaaaaaattagctgggcgtagtggcgggcgcctgcaatctcagctacgcgggaggctgacgcaggagaatcgcttgaatccgggaggcggaggttgcagtgagcgagatcgtgccactgcactccagcatggtcgacagagcgagacttgtctcaaaaaaaaaaaaaaaaaggacatgtggtaattcccctagggaatttggccttagttgtgaaaaataaaaaagctataatcaatttctgttctatcggaaaaaaatgtattggctgtttagctgaaattcaaatgtaacttaacatcccgtattttttatatgctacatctggcaaccctggcttgaggctacctggcaaaaatcaaaacaggttcctccttgttatgccctatgcctctgttgcctttatttttatctttacgagcaatcattaacagtaacttcagactccaggctctggtcgctttaggaggcggaaggcggactagggtaggactcctggccctcatcaacaggactgccaagaagccgggcaccttctgccccgcacaaacatggccgcgcctcgccgccgaggattggctcccgccgaaagctcgtcctcctggctaagggagccccttccattgggcagttaaaaaaaatggcggaccccgcctcccgccgtcctcgggcgcgggggcggagcctagaggaggcctgggacagggccaccagtgattggcggagagcggtggtcaggccatcacgtggcccgaggcccgtttgtttgcggaagtaggaggaagtagaagtgctgagtaagccgaggtgagtgacctcgcgggtgggcggggcctgggggtccgttccccaacttcctcggcgctccggactcccaagtctccgccggaccctcctttggatattcctcgtgtctccgattctgaggcatgtcctccattaacccttatgtgactccctga

SEQ ID NO: 28467 - DNA, 2300 bp, Homo sapien
taagtgccatgatgtcggcttcacaggagggactgtgggagcgatggaatttcaggcagtgggaacatcatgagcaaaggaaagcaggggatgaacagcaacatccaccccgcacgtggcctccaaagccatctcttttgggtggggcttcccaccacggcgcacacccctcatgtttatgtggccctcctcccctggttgcgatgtacccccaaacatctgggccaggaatcattcagacctggataccaattccagtgcttgtacttcctagctgagtgaatttagaaagtcaccttcacctctctgagcctccagtcatgtattccttcaacatgtatttactgtgggcctactatgtgccaagcactactccaggcactgggcaggcagtggtgaacaagataagcctggccaggcgcagtggctcatgtctgcaatcccaacactttgggaggccgaggtgggtggcctgaggtcaggggttcaaaaccagcctggctgggcatggtgactcacctgtagtccagctactggggggctgaattccttgaacctgggaggcggaggttgcagtgagccaagattatgccactgcactccagcctgggcaacagagtgagactctgtctcaaaaaaaaaaaaagaaaaagaaaaagaagcaaggcctgccttcataaaacatacattctggttggggaagacagacaataaccagcactcacatacataaatgatgaaacaccctacagaagtattaagataatataagaacaaatttcaaggctgggtgcggtggcttgcgcctgtaatcccattactttgggaggccagcgtgggtggattgcctgagtccaggagtttgagaccagtttgggcaacatggcaaaaccctgtctctacaaaaaaaaaaaaaaaaaaaaaaaaaaaaaaatacaaaaaatgaacctagcatggtggtgtgtgcttatggtcccagctacttgggaggctaaggtgggagaatggctggagtccaggagaaggaggttgcagtgagccgagattgtgccactgcactccagcctgggtgacagagtgagaccctgtctcgaaaaaaaaaaaaaaattcagaggtgaagactgctttaaccagggtggtcaggaaatgtctctctgaggcagtgacatccgggctgacgtgaaagatgagaaagagtcaggcaagtgaacagaagaccagacagccagtgccaagggcctgtcgcaggaatgagcttggtatgtttgggggacagaaagaagggcactgtggccgaagagcagtggatgaggagagagtggccaaagaaggtgtgtaaacaacctgagctttgttttgagaagaacattggctggtatagaaagaaagactttggaggcaaagtagggagcctcggaggctgctgccattgtccgggtaagctgatggtgccgagaccaggtgccatgactggaggtggtgagaaatggtcctatgcaggagacctggagacaccgctagcttgagtcctgaggtggggaggaagggagagggagggatggagccaggctccaaggttttggcttgagcagctgagatggggtggcaagggagcagaggtagggctgacgatcaggagcgggtttttgggccgagtcctctgcagtgcccatctgacacccactggatgcgcagagtgggcagctggctatgagtctggaactcagagaagctgttcgctccggaaatacaaacctggggctcatagccatataaatgtcatttaaagccacgggactggatgagatcattaaggcagaaggtctaggtcgaaagaagagggccaggaccactacctgtaaaatgagccaatgacacctacacccacggggctctcgcgaggtgtcacgtgaacgcacccagcgagccctggaaccaggcagagaatcgcggcagccccgggggcggggcttccagggggcggggtcatacgggggcggggccgagggaccaagcggccgctcctggccggagggcggccgggtcggtgacgtcaccgcatgactgggtttttatgaatgaaaggaatcctgtgagtgagtaattccgggaagctcgccttacaactccgcgcggcctcggccccctgcgccgcccgccccacaacaaaactcagcgcagcgctcccgggcgcccggttcagagcgacctgcggctcagagcggaggggagactgaccggagcgcggatcgggacagcggccgggacagcggcgagacgcgcgtgtgtgagcgcgccg

SEQ ID NO: 28468 - DNA, 2300 bp, Homo sapien
caggctggtctcgatctcctgacctcatgatccacccgccttggcctcccaaagtgctgggattacaggcgtgagccaccgcgcccggccactggggatcactttctgcagcactttgtgggccatggtgacaactctggctttactccagtgagccgtgggaaggtcctgagagaggtgtgacatgagctgacttaacacagctacctgtgtcacccagggggaaagtgaggcacagaaagagtggctgacctatcagaaccacacaactagagagcgagaccacccccaaaaggccccaggtgtgtctggcaccaaggtccatgtgctttccatttctgcaccttgtccctgggagacaccccggtcctgccagaatgtgtcagaggctgagccaacccgtgaggtcaaccctgtagacagctcaaggaaccaggacttggatctggcttttgccctctgctgtccacaaaactgggtgatgctctttccgatacggtacgtgtttataggatgctacagctcagatcacaaagcatcttcctttgttttctttttatttatttattttttttgagatggagtctcactctgtcacccaggctcccaggctggagtgcagtggcgcaatctcggctcactgtaacctccacctcccaggtttaagcaattctcctgcctcagcctctcaaatagctgggactacaggcatgcaccaccacgcctgggctaatttttgtgtttttggtagagacagggttttgccatgttggccaggctggtcttgaactcctgaactgaggtgatctgcccgtctcagcctcctaaagtgctgggattacaggcgtgagccaccgcgcccagcctatcttcctttattttccttggcttcttatcactgccccctccccttggagacagatgagaaaactcaggttctcatggcggagaacctgagaggattggcaaagtagatcctatcagctagagacagagaggactgctgctttaaaggggactttgggagatggtccccttctccagcccagagcaatgaccactgaccctccacgagttttattcacctttttctccccattaccaagtacatgtttggcaaagagctcaataaatagttgttgaaggagcatgtggctgtcaggcctgtgggagggaggattaggagatgagaggccctcattggtctagggatggctgccccatctgcctagggcatgctgagttagtatggggcagcccccaggaggttgggaaaactttcccaaaacagaggtctagatgaaggaggcctggggagagaggggactggctgatgttgtatcttacggggtgctggatgggctttgtgtaaaggcatttactggtgcacatatgctgtgtgtacttttctgtatgtaggttatactttaagaaaagttctgaaaaattggctgggcacagtggctcacacctgtccagcactttgggaggctgaggcgggtggatcacctgaggtcagtagttcaaaaccagcctggccaacatggcgaaaccctgtctctaaaaataaaaataaactaaaaatacaaaaaattagctgggcgtggtgacaggcacctgtaatcccagctacttgggaggctgaggcaggagaatcccttgaacacgggaggcggaggttgcagtgagccaagatcgcgcccctgcactccagcctgggtgacagagtgagactctgtctcaaaaaaaaaaaaaaaaaaaaaaaaagaaagaaagaaaaagagaaagaaaagttctgaaaaatcaaatcaaaggcacatgtccaagccccatgtggaagaatggtcaggagaggcacatctattcatttggtgcacacttactgagccatctactatataccaggcactgatttaggcatattgatgccgtggtgagacagggaaggcctctgccttcattggcttccgttttggtggaggaggagtgggaaggagaaacaaatcatagatgaggaaccaagcatgagaaatgcagaagaggtgactgttacaagggttaataggcggggttatgtgatgtgacacagaggcgtttagccagaatggtcaaagaggacctcctgaggaggtgacattgggcaaagacctaaatgatgaggagtcaccatggggctagaacagtaaagagcacagcctgtgcacagctcccgcggctggaaggagccattcaaggaggcctgtggaccaatgtggagagaggaaggtggcaggtatgaatcagttctaagatagcagagg

SEQ ID NO: 28469 - DNA, 2300 bp, Homo sapien
gcaccgaaggataagagaacctgctctggggagaagtgcagcattagtgctgctcgggagtggcgggagcttgggcagggaccaggtcacccattgaaagatcaagtgccaagctgggcggcaccagggagcctaaaaggactctgtactgcaggggctggcggggtcagatgagaagaagccctctggctggagggccaccgtggctccctcgacctgttctgaccctgttctgcccctccccttggccttgtgcctttactggatgcccatcctcattcccatgtcctcaccctggctcttcctcttgcgttctttcattttgggtaccgtctgctgcaccccttcccccgccttctccacactctcctccatcctggcatgtccatttgcctctagcaccctgcaggcagcagccttcattttgctgacccagaaggaaccacctgaccaggagacccgttacagcgtgttgctgtatttatagcatcaacatttacagcagacttgctgtgccatcactcccggtggcaaattttgggtctttgtggagatgttgagccgagtcccaatttagaatgagcagcccaagcttcccaaggtttttactgtgttctgtgtgctgccgtgtgctttgttgtagctcatagtgctgtgcgtattccggataccgctacaggttgttgactggatgaaggttcttccctctcactcctgcttggaatttctcccaagattttcacagagactgttttgttgttatcttataaaattgtgacctgtaacacacaagtatgtaagacaaatatttatttataaatacattagagatgaggtctcgctatgttgcccaggctggagtgcagtggctgttcagaggtgcgatcccactctggagtttgacttgctctgtttccaacctgggctggttcacccctccttcggcaacctggtgatcccccactcccaggaggtcaccgtactgctgccagacttggtgcagacaccagatcagtgtagcacactacagcccagaactcccagactcaagacgtcctcctgccgcagcagtagctgggaccacaggcgcatgccactgcgcccggaaaaactaataaaggcaatactgtttcgccccagggtcgacactgccagccctcccaaacctcctgagtacccacccttacctcagcctcctctggcctccccacataaccctgaactcacgacagtcccttcatagtattacgccagtgcaggggtgcatcccgggataagataatttaggtgtgccgggttttgaacttaggagtgggaggtcagatgtctgtgttcttgacgggctccttttgcacaaccttatgtcccccagcctcctccctgttgccacacacagctgtggctctttcacctccattgctgtttagaatcccagcatctgcggacccattctgctgatttgactggtttctcctggacactctcttcgcagccttggtcatctataatttcctgagcctgtgctatgagtacctaggaggagaaagttccatcatgtcggagatcagaggaaaacccattgagtgagtatggagtcttcccagagccctaaaccaccccgtttcctgggcctggtgtacctcgagccgtcctggcaccagctggacacagaccatgtctgcccgtgaccttgacctgctgtgcctcaccacatttcctgagcaacgccattcttctgggcgttttaggagggcctctgcggctcagtctttctctctctgtctcttcctgtctcagtcttagtgctttcctgtctgtttctgcctcctgcagtttttacattcagagctctccaagttggtttgtcaccccagggccagtgcagccctgtgtccctccgcctatggcatgtgcggatgccctgccatgcctctccctgtgcttggcctcgggttcaaagtctgcccagaatgtgtgccccagctcgtctggatgggtgggagggcggccttccccaccccactgttcccaagtcctggctcttcactcactgccactgcctgctatgcttgtctcttccaggtccagctgtatgtatggcacctgctgcctctggggaaagacttattccatcggatttctgaggttctgcaaacaggtgtgtgcccccagcagctgcctagctcaggaggagcagggcggggtctgggaggccctgccgtgggctgccctgggccccaccttagaggtcccctttcctatgaggcaccccaggcccccagcacccaccccccgaagct

SEQ ID NO: 28470 - DNA, 2300 bp, Homo sapien
cctggaagattctttccaatgctgccacttgccctgggaggagactcacattgcaatttcttctctctaggctagcttgtcactttctgcaaaggtttccctcagggagcctcctgctgccaggcaccatgacagtgaggggggatgtgctggccccggatccagcgtcgcccacgaccgcagcagcctcgcccagcgtctccgtgatccccgagggcagccccactgccatggagcagcctgtgttcctgatgacaactgccgctcaggccatctctggcttcttcgtgtggacggccctgctcatcacatgccaccaggtacccaagcctggcaaggggcctctagaaaggtccagaaaggttcctggctgaacagagtgtgggttaggctaggctaggccaggctgcactgcagtagtaggtaagccctctgttctcagaggcttccctcgatagaagtctacttcttgtttgtttgtttgttttttgagacagagtctcactctgtcacccaggctggagtacagtggtgcgatcttggctcactgcaacctctgtctcgtgggttggaacaattctcctgcctcagcctcctgagtagctgtgactacaggcgtgcgccaagaagtcgctttcttgcctgcgtcccagggcccagtgcagcgcaggttccgacgtgtggctctggcttcaagcctcgcccatctgacacctagcagcagggaatgtgcgaaggcactctgtatatttaaccacctccagccagaggtgacactcgtcactctgttcaccttccattggctggaactagtctcgtgtccagcctaaacaacagagagcctagaactgcaggagcacagggacagggaccgctttgcagatgagaaaatggagagcctgagagggagggggagaggaactagcctggtcacttggaagttggtggtagagtgggatagaagtcaagtctcccgtctgcctgtacttgtggccccagaggaggctgatgtgggctgggacgggccttggtggctgcagaggtttgaaggtggtccagtggagaggggcagggtgagtctgctcgtgttccctagtcagccccttgccagctgccctgtgtccccatcccttttagaacccatttgcgtccaaggcttttggctcatagcagatggagaatattttgttcttttcctccccagcccagggctcggctgggccaagtgtgatgtcatgagagctgggacgagacacccaggggctgcctggactgaggactgtggtagagcagctcttggcatttgtgtgtagcttttacttttttcctctgcttcctaaaagtagcattcattctcctaacttcctggtgaggtagctgcctaactaaacagagcagcagtggtgctgcctctgtttaccagatgggaggaggaggcacaacctgaggacatccctgcagccactcggccaggaagtgtgtccacccgccatagcgtgagggctgcgtctgtcttgccataagttaagggacggggcaaggctgcaacccaggtggcagtgatttagctcagtgctgccacagtcacagccggagtgaggtagagggaaagggcacacactgatggcccagagctgccagtgcgtgaggtcccctggggagcttgtggaaactgcatttccatcctcatccttggccttcctgtgggcaggggtgtgggctcactgccacctgcacctgcaagactgccccacaggcactgctgcatgcactccacgagccttgtgcacgcccgctggtctgagtctcacaatggccttgggaggcaagtcctgtcatcccgcattttgcagagcagggctctgaggctcaggggtaggtcacgtgcatcgggtcacagatgagtcggtggcagagctggaagcccacctgccctcccgtccctgtggacaggagggtccccagctgaccccacacctctgcccccagatctacatgcacctgcgctgctacagctgccccaacgagcagcgctacatcgtgcgcatcctcttcatcgtgcccatctacgcctttgactcctggctcagcctcctcttcttcaccaacgaccagtactacgtgtacttcggcaccgtccgcgactgctatgagggtgaggatggggacggagtggggagggctggcggggggctggggggctgggagcccctgtccccacattcctccccgaggggcttcatgaggactgtcttgacacaccccttgctgctttacctactacagggtttctgtcccaa

SEQ ID NO: 28471 - DNA, 2300 bp, Homo sapien
ggacttgtaaggcttttacttagagcgaaacagtgagccaatggagggttttgagcaaaaaagtaccatgttttgacttcgattttattttattttttgagacagattctcattttgtcacccaggttggtgtgcattggcacgatcttggctcaccacaacccaacctccgcctcccgggttcaagcaattctcatgcctccagagtagctgggactacaggcatgtaccaccacacccagctaatttttgtatttttagcagagacaaggtttcaccatattggccaggctggtctgtaactcctggccttaaatgagccacccgacctcacaaagtgctgggattacaggcgtgagccaccgtgcccggcagattttaaaagaatcttggctgggcgtggtggctcacgcctgtaatcccagcactttgggaggccgaggcaggcggatcacaaggtcaggagatcaagaccatcctggctaacgcggtgaaaccccgtctctactaaaaatacaaaaaattagctgggcatggtggcgggcgcctgtagtcccagctactcgggaggctgaggcaggagaatggcgtgaacccgggaggcggagcttgcagtgagccgagatcgcgccactgcactccagcctgggcaactttgagacaaagagcgagactttgtctcaaaaagaaaaaagagaaaaaaaaaaaaggatctccctcacccctgaattgatagaatggatcagagggcaaggctggaacaagggagaggggttagcagaactctgcaataatcctgtgcaaatactggaccagggtggtagcactggaggaggagtggcagacatctgagtctagatctattttgcaggtagagccaacaggatctcctgcctgccttattgggtagcgggcagaaggggggcattcattcacagctgactccgagttctggcctggggactggaaggatggaattgtcaacagctgatggaggcaaagctgagagggagcaggtttttgtgtgtggaagtggggttggctcagctcagacacgctgactttgagatgcctgctggagctccaaggaagaggtgttgggtagacagttcaggcgaggagtctggagacataaatacatttggggatcttgagcacatcaatgccagaacttaattgcattttatcttgttcagttaacctaggtgatgtctggaccggcaaacagaaatggactaggcggcttgaaccctatctgaagacttttgctagttcggcagcctagagccagacggggcaagaaagaatcgctgctaagcggagtgggaaaaaaaggcctctttcagtgctttgccatttcatctggcctaattgcacacaacactcggtccacgttcattccacaattccacacgcatccttcactcaacaaatagccattgtatttcgtttcatcttcaaaacaggctcaaatggaggaaattagggttaaaagaagtgaagcaccagcgagggtcaggggcagagatcgcagcccagaaagctctcgcggttgggggccggtcgtagctggttttgtgagtggcaagagaacccgggtcgcgccccaacccgcggggcggcgggctggggttcggggcggcgggctggggttcggggcgcggcccctttaaggcccaggcagtgatctcagccgcgtccgccgccccgccctccccggcggcgagcccagagcgcatgcgcgccgcggctgcactccactgggcccgggacgcgccggcggcggcggagactccggggctgcggcgccgcccgccccgcccgcagagtccggctgccgcgcatcgtccgcagacgccgccaccgccatgggctcctgaggtatcccgcctggccggcctcgcccgggagccccaagggggagctgcgactcccgagcgcggggggctgcttgtttcggagaggcccgcgcgagggacgcccggcttcggccgccggctcccgggcggggagggcactacggaggccggtgcggccgcggagggagggggcatccgtctccccacccgtgcctcctctccgccccgcgaggtcgcccgtgggtgtgcccgctccctttccacgccaacgtggcgggggcagctcctggagtgtaatcggacctgtccggggggcggccccgggagagggaggcggatggaccaaggcgctttgcaagagggattgtgtgctcccgggtgggtgtgctggcgactggcacggccgagtgagtgggggaggcgtccgtgccctgtgcgggt

SEQ ID NO: 28472 - DNA, 2300 bp, Homo sapien
aaaaagaaagaaagaaagaaatgaagtgacagggaaagtagggcacggtaaagggaaatacagagtgcatgtgaggggtctggtagttttactaggggtgctcacagcaggcctcactaagtggaggacattcgagcaaacccttgaagaaggtgatggaggagccattcaggtatctggggaaacagcgatcgcagcagagggaacagctagtgcagggggctcggggctgagtgtgctcagcttgttctaggaacagcaagggatcagtgtggagggaaagggtaagagatgaatgagatcaggaatccccaggagagtagaatgtcagatcaagtgtttgtaaggacttgtaaggcttttacttagagcgaaacagtgagccaatggagggttttgagcaaaaaagtaccatgttttgacttcgattttattttattttttgagacagattctcattttgtcacccaggttggtgtgcattggcacgatcttggctcaccacaacccaacctccgcctcccgggttcaagcaattctcatgcctccagagtagctgggactacaggcatgtaccaccacacccagctaatttttgtatttttagcagagacaaggtttcaccatattggccaggctggtctgtaactcctggccttaaatgagccacccgacctcacaaagtgctgggattacaggcgtgagccaccgtgcccggcagattttaaaagaatcttggctgggcgtggtggctcacgcctgtaatcccagcactttgggaggccgaggcaggcggatcacaaggtcaggagatcaagaccatcctggctaacgcggtgaaaccccgtctctactaaaaatacaaaaaattagctgggcatggtggcgggcgcctgtagtcccagctactcgggaggctgaggcaggagaatggcgtgaacccgggaggcggagcttgcagtgagccgagatcgcgccactgcactccagcctgggcaactttgagacaaagagcgagactttgtctcaaaaagaaaaaagagaaaaaaaaaaaaggatctccctcacccctgaattgatagaatggatcagagggcaaggctggaacaagggagaggggttagcagaactctgcaataatcctgtgcaaatactggaccagggtggtagcactggaggaggagtggcagacatctgagtctagatctattttgcaggtagagccaacaggatctcctgcctgccttattgggtagcgggcagaaggggggcattcattcacagctgactccgagttctggcctggggactggaaggatggaattgtcaacagctgatggaggcaaagctgagagggagcaggtttttgtgtgtggaagtggggttggctcagctcagacacgctgactttgagatgcctgctggagctccaaggaagaggtgttgggtagacagttcaggcgaggagtctggagacataaatacatttggggatcttgagcacatcaatgccagaacttaattgcattttatcttgttcagttaacctaggtgatgtctggaccggcaaacagaaatggactaggcggcttgaaccctatctgaagacttttgctagttcggcagcctagagccagacggggcaagaaagaatcgctgctaagcggagtgggaaaaaaaggcctctttcagtgctttgccatttcatctggcctaattgcacacaacactcggtccacgttcattccacaattccacacgcatccttcactcaacaaatagccattgtatttcgtttcatcttcaaaacaggctcaaatggaggaaattagggttaaaagaagtgaagcaccagcgagggtcaggggcagagatcgcagcccagaaagctctcgcggttgggggccggtcgtagctggttttgtgagtggcaagagaacccgggtcgcgccccaacccgcggggcggcgggctggggttcggggcggcgggctggggttcggggcgcggcccctttaaggcccaggcagtgatctcagccgcgtccgccgccccgccctccccggcggcgagcccagagcgcatgcgcgccgcggctgcactccactgggcccgggacgcgccggcggcggcggagactccggggctgcggcgccgcccgccccgcccgcagagtccggctgccgcgcatcgtccgcagacgccgccaccgccatgggctcctgaggtatcccgcctggccggcctcgcccgggagccccaagggggagctgcgactcccgagcgcggggggctgcttg

SEQ ID NO: 28473 - DNA, 2300 bp, Homo sapien
cagtttaagggagaggttgatctgtgcccttaggcaagcactgggaggagcctgattccttctctgaaagaatacagtgtaatctgttgttgtttgagaggattaaatgagataacaaataacctcctctcccagggctggttgccttgaaagtgctgaagaagaggagggctttgggaagcagggcccaggttggaaggttaggggtggtaaggactggaggacacaggggcagacttcaccccctgctcaattgtgcccaggcctctctgcctgggctcatgtgaggaaagaaacaaaatgggtggcggtggggtggcgctcaggccggctgagaacttgggcccagagttaccggatctcctaatgcccccagagaaacagggaatctggatctgaaatatgaaatcttccagttttaaaactttggggagtggccaggcatggtggctcacgcctataatcccagcagtttgggaggccgaggcaggcggatcacttgaggtcaggagttccagcccagcctggccaaccccgtctctactaaaaatactgtgtggtcctgggcaaaaattagccaggtgtggtggtgcacatctgtaattccagctattcaggagggaggctgaggctggagaatcacttgaacccaggaggcagaggttgcagtgagccgatattgagccactgcactccagcctgagccacacagcgagactctatctcaaaaccaacaaaaacaaaaagcaaaaaaaaaaaaaaaaactttggggattaattaacaaaacaacaacagaaagcaccgcgcaggccaagtaaagcccaccacctggctggtgaccccctgctctggcaaaggtgtcactgaaggcaggccctcctgggaggaggcttctcactctcctgctcttggaaatgggctctagatagacccagtttcctggtgatcgctgggagaacagagctgtcctgttgggctttgtggtcctgggcaaagcccttcccctctctgggccagtttcctggccggcgaaaggacttagtctgtggggctcctgcccgtttggacacgtgtgtgactcagtccctcagcctcgaggagggaagatacggctattatagaagtgactcctcccaggaactgtgcttccgggattggacgcagggcctcaggcattttgcgtgtccacagtcacaactgtgtgaatataggtgtgtcataattggaagctttgcatggctcagtgtaaatatcatcactttaatgactttgttctgcaacctttcatcgcggctctgcatgccggtagaagcttttattaattctgtgacctggggaggacagggtccttcctcccatttgctgtttaaggaaacccaagctcagagctgggaggtggcttggctaaacgtgcaccactcggagcccagactcaagtgtcggtgctttggtacttgtggcacccctccttcaacaggggagaatgaggttgggatctgaggggtcctctctgtgcccatcacagtttgagcttcagggaaaagaagaagaggtctttgcccttcgtttttccacgggaggagaatgtatgagcccaggctacctttctgggccttgtgtcgacatccctagctgtctcctcaaatctcttgccctgaatcaacctggcctgtgttctctgcggcactcggaacctggaggcggactgagcctccagcagtctaacatcttttgcagtgtcgtgaatagccgcctgttttcgcaggggcccagtgctctgcctggagaggagagagatcctggcaggcggggagaggagactttgggtctagaccctcccctcccatcccctcacctccgctttttgtgcgccctcctcttccctctgtcccccccgcaccccgtcttttccacctgtgccctggactgcattagggtgtcagtatctgtgtgctcccccacccccacgcgtaagcccgcgcgcctgcactgaggctggggaactgcgtctcgcagctgcggcccccagcgcggagggcgcgggccctttaaatcctccggggcggcggcggcgggccggggatgacatcagcgggcgggcccggggctcaatgggagccggcgggcgcgcgcggtgcgagagcgcgcgagccggcggcgggggcgggcgggcgggcaggaggccgggaggagggaggcggcggcggcggcggcggcggcggcgagagcccagagccagagcccggccggggccgagcggagcgcggcggcggcggcggcggcggcggctgggccggga

SEQ ID NO: 28474 - DNA, 2300 bp, Homo sapien
tttcaccgtgttggccaggctggtcttgaactcctgacctcaggtgatcacccgccttggcctctgaagtgctgggattacaggggcgtgcccggccccaccgttgggttttaaagttaggagttaaatctgagaggaatcactgtgaaccaagtcggagagagaagtcaggctgtggggctgctggaacacgtaaggttttgtttttcactttggaccagtctcccctcctcagctgggttttgtgtcatggtttgccttcccttatagcttcactgcaaagctctttggaagggcccacacacaggtcttccagggataggaaggacaaggacttgggcccacaactcaggcagtggacaacagcatgtccttccaatggcaaggcagggaggctccctagcaggcctggggatgagccgggctcctcagcctggctggcccagggaactgagcaggatcttaactggggcagggggtggggtgggggtgctggggtgggaggtgtggttacaagtcctgaatgcagaggggagaacgtgaacgtgctgcagtcagacctggcgatctggctgggttaggaaggggcagggggtctgttccagccaggcccagtttaagggagaggttgatctgtgcccttaggcaagcactgggaggagcctgattccttctctgaaagaatacagtgtaatctgttgttgtttgagaggattaaatgagataacaaataacctcctctcccagggctggttgccttgaaagtgctgaagaagaggagggctttgggaagcagggcccaggttggaaggttaggggtggtaaggactggaggacacaggggcagacttcaccccctgctcaattgtgcccaggcctctctgcctgggctcatgtgaggaaagaaacaaaatgggtggcggtggggtggcgctcaggccggctgagaacttgggcccagagttaccggatctcctaatgcccccagagaaacagggaatctggatctgaaatatgaaatcttccagttttaaaactttggggagtggccaggcatggtggctcacgcctataatcccagcagtttgggaggccgaggcaggcggatcacttgaggtcaggagttccagcccagcctggccaaccccgtctctactaaaaatactgtgtggtcctgggcaaaaattagccaggtgtggtggtgcacatctgtaattccagctattcaggagggaggctgaggctggagaatcacttgaacccaggaggcagaggttgcagtgagccgatattgagccactgcactccagcctgagccacacagcgagactctatctcaaaaccaacaaaaacaaaaagcaaaaaaaaaaaaaaaaactttggggattaattaacaaaacaacaacagaaagcaccgcgcaggccaagtaaagcccaccacctggctggtgaccccctgctctggcaaaggtgtcactgaaggcaggccctcctgggaggaggcttctcactctcctgctcttggaaatgggctctagatagacccagtttcctggtgatcgctgggagaacagagctgtcctgttgggctttgtggtcctgggcaaagcccttcccctctctgggccagtttcctggccggcgaaaggacttagtctgtggggctcctgcccgtttggacacgtgtgtgactcagtccctcagcctcgaggagggaagatacggctattatagaagtgactcctcccaggaactgtgcttccgggattggacgcagggcctcaggcattttgcgtgtccacagtcacaactgtgtgaatataggtgtgtcataattggaagctttgcatggctcagtgtaaatatcatcactttaatgactttgttctgcaacctttcatcgcggctctgcatgccggtagaagcttttattaattctgtgacctggggaggacagggtccttcctcccatttgctgtttaaggaaacccaagctcagagctgggaggtggcttggctaaacgtgcaccactcggagcccagactcaagtgtcggtgctttggtacttgtggcacccctccttcaacaggggagaatgaggttgggatctgaggggtcctctctgtgcccatcacagtttgagcttcagggaaaagaagaagaggtctttgcccttcgtttttccacgggaggagaatgtatgagcccaggctacctttctgggccttgtgtcgacatccctagctgtctcctcaaatctcttgccctgaatcaacctggcctgtgttctctgcggcac

SEQ ID NO: 28475 - DNA, 2300 bp, Homo sapien
ttgggaggccaaggcaggtggatcacgaggtcaggagatcgagaccatcctggctaacatggtgaaaacctgtctctaccaaaaatacaaaaaactagctgggtgtggtggcgggcacctatagtcccagctactcgggaggctgaggcaggagaatcgcttgaacctgggaggcagaggttgcagtgagccgaaattgcaccattgcactccagcctgggcaacagagcaagactccgtatcaaaaaaaaattttttttaattaaaaaaaaagaaatgaagaaactttataaaagtgatataagcttattagatgttgaaaaagcaggaaaacagaaggataataaagaagcctcatagtgccaccacccagaaataatcgtagtgaacattttccttccagactcttccttgtgcataaattgttttgcttttaagtatagctgtgaccctgctgtcaccacacattgacatcctgcttttattctcttcatattataacatatttcctcatattattataagctgtttgtaaacataacttaatgcttgcataatattctatcgtgtgtttgctctgttaaagaacccccttctctggacacttagaccagccccaaccctccccattataaagaactccacaatgcctgggtgcagtggctcacgcctctaactctagcactttgggaggctgaggtaggttcatcacttgagcccaggagttcaagactagcctgggaaacatagtgagaccccaccttttttttttttttgagacaggatctcactctgttgccaggccggagtgctgtggtgcgttctctgctcactgccacctccccctcccaggttcaagctatcctcctgcctcagtctcccaagtagctgggactacaggcatgcaccaccacacccagctaatttttgtatttttagaacacacgaggtttcaccatgttggtcaggctggtcttgaactcctgacctcaagtgatccacccacctctgcctcccagagtgctggaattacaggcatgagccaccacgcctggccagagaccccatctctacaaaagatggaaaaattagaaaggtgtggtgctcgcctgtagtcccagctactcaggagactgaggtgggcagatggcttgagcccaggagttcgaggctgcagtgagccgtgatcacaccactgcactccagcctgggcaacagagcaacaccctccctgcttcaaaaaaaaagtaaataaaaagatctccacaatgaacaggtattctgcatgacttccttggaagagatttccagaaatggaattgctgccctaaggcaaacgctaatttacgactcttgggcagctggaacctgtccgacagagcggagacccttatctctgccaccaccagcaggctgatattttcaagaaaaaaatttgccaaatacaagcagtctcagataatacaaagaagatggaaagtttccggagcgcaggtgtcagatccaaagataacttgacccaaacaccccgatctccatgtccctatctctctcttaggtgttggagcgggccggagagaagtagagtgggctgcgaggagaaggaaacaggcctttcggaggctcctcatccctcggaggtcatcccttactccaggtgatctgaacctgaagtccgaggccccaagagttctaagtaacccaggggtggaggtggggtgggggatcccagctctttccgatctgggagatcagaaagatgctcatctgggagagtgggacctcccctttcagtccgcccacccccgaggaccgcacttggagggccgcacttggaggaccgcgcctccaaggcgggcgcggctgacgcccggggcccaggccatgtggggcgtgcgtgccgggagaagtgtcccagcgcctcaccccgcaagcatgagaaccacgaaacccccggggccgggaaaccggggcggggcggggcggggcggggccgggaagcggcgcggggctgggccggtgacgtcgcggccccgcccccggccggctccctcctcccggagcgctccccagcggagtcctcacctgcaggcacaggtgtgcgcacttcgcatctcgaaggccggccagcaagcttcaggtgagcgccagcagcagctgggggtaggtgctgggaggaggagggcccggggtgggggtcctcactcgacggagaggagaaccgggtcaaaggagaggaggaggaggtgggcgtgggtctgtggagatactgcctgctccccccaaatcctcccttgtct

SEQ ID NO: 28476 - DNA, 2300 bp, Homo sapien
aaaaccaagtagattcttggaacctagtctaagtttagaaatctcaagttagaatagcgcaagcccagtcctttcagaaaaaaaaaaatcagaacaattaaatagctttctgaagatactcatttaaaaactttatcttctcgaccttcctcacgcttgaagaaaatctgaggtgtttttcgcgcacagctgccttctaacccgcgagcaacggcgttaaggttttgtttgtaattcggggtgacccaggagttcgggccgcgggcccctcccctcgcccgggcacaccttgcagaggagggggcggcggggacgggacccgggtctgcgcctgcgcacaccctcgcggccccccccgccccccccgccgggtacctgtcacggctaccgccgcggcgctcgcccgccacgttaaatcggatggcgggagtaggggtatggggcggggggcgcggggagggtggcacggcgcgtgcgtgcgcgggagtcgccgagcgataactgggagtgcgcgcgctcgccgctcgctcgcgtcccggaggcggagtctgtggcggggggcggagcgggggcgggcctatgctagtcacgtgggcgcgggggcggggtggggcggggcggggcgtctccgagcggcgggccgagggagggcgcagcagctgctccctgaacactttctgacccaacagtcccccagcgccggacgcgccgcgccctggcggctctagggaccccccccgcgcctgcacttagccccgcgcccgaggtgagcccggcccctaaatcctccgggcgggggtgggggtgcgggacgctccttttttgttgggggtcttggaggcgcgaaggcactaggcgcctcggcagatggctgcacccctcgcttgcggctccccgtgtcttttggggggccgggtgcgggcgcggaatccgggaggtgtccgcacaaaaggccgagaaaactgcgcgaggcctccctccctccgccctccccgccccctcccctccgcgcccgctcctcctctttcaaacccggccggcccgagtggagtcagctcagtcccggcagccgccgcgcgaggaaatggccgaggggccggagccacaggtaaaggggggcgccccccgcccgcgccagccggggcgcccgcctggtcctgcggaggctcccgcgccgcccccgaggcgcccggctctcgttgtcttgtccccccccaggatgacctcagttccccgtctcagctttctagctgctctttctagggcgccccctccccagccggctcctgcgcttccgctggcgggaaggtgcgggcgatcccgggctgcatccgctcttggccgtcacactcacgccgcacgattcagaagggcttggggtgcggggttccctgaatctccgccgggagcgggggtccgggggtctgcgggggtgggcggtggggggctgttccgaaaagttgggtcgccccgcggggcgggtctcccaatttgcccagtcggcccttggggcgcgggcggaggggggacgttggcgtagggtcccccgcgataccccgggaagggccgggggaagttggaaatggccaaaacaatgcgtcgggacaggcttcccccgtaaacaatggccgggacggtccacacgggccaggcggagggcgcgtctaagggaccgcgggaggggctgggcctctccgcggaccccgaggtgcgccgggtgactccctcgggtgcccaaaaatctgtccccgggagtcctggggcgcctgcttatccctgagcagggatgcacggggctgcgtttcctggatgtgtgcgataaggtggcttttttttccctcctctaattttaaagatttttcttaagtcttaatgttctataaacacttaaagaatatctttacaactcaattgtagtggaacacccaaaggcagctggaagcagaactgggaactctaaagggcaggaaggattgaaatgctagcccaaaagtgctgctgctttttttttttttcttttctttttttaaagggaagtttctgccaggaggtgccaagtggtgaaaccgctcagtttcaggcacagccctcttgtctctcgatttggccccgactgcgagccggacgggatggtggaggggcggagggcgctgctgggggcctgggaggctggatttagggctgcctgggcggtaccgcccgaggggcaagacccgacagcggggcgcgcgccgcaacgtaagtcccggggatttgagaagacgttcagggcctgggttggaatccacattttgggattc

SEQ ID NO: 28477 - DNA, 2300 bp, Homo sapien
cttgttcttactgaaacgattatttgtcaaaatatttgattgtttccctattccccctgaaaagtttggacttttctttttgctcgattttgacactggaatttttaactgtcagtgctattgtgtttacagcattcaagttctcagagttcaaaggttatccattaacatgtagaatgaggctacacttaaaggctcaacctggttgcacttgttcatagtttctttgttgtgtagcaaggctcatagtcatttgttttcataaagttaaatgaagtttcttgtttatgaagtgtttttggactgtgttttagaatgtgacaataagattaaaaaatatattttaaagataggtattcatcttttgtcagaaaaggactcctaatactaaaagtgatcaatatcagtggacttgagtgaaaaaaaattcacccaatttagttttttagtgctggcctaagaatctaccggcactgctaattaattgtgagtaattgattggcttcctttttaaaaaagactaaccagaccatatggggggttagtagttatatataaaatgacagcaaaacatgacacttggcaaattcttcccctttgctgagctgtcttctcaaattccttttcctatttattaagattgcattgctcaccagctccggatcgtttctgtagtgcgttctttcttttgatttaggaaatagatattttaaatgcttttcttgatgtgttttaaagttttttcattttggatatgccgaaggccagtaaaaaaacaaatatttggctattttgttggtagcgacttgcatagatccatttcacatttgcattagtttgcattttggggtagaaaaattgtggatatgtttgttatgtctgtggttcctcgaggcttacttaaaatggggaaatatcacaggccttaggaatcaggattttttttgtcctttttttcagtaagaaaaaaaaaacagttgggaaacgatttaaatgagttgtgcgtagggaggaggggaaagggtagcggttttttgtttttttttgtccccggtttcctccaaatggatttctatcaaaaccaagtagattcttggaacctagtctaagtttagaaatctcaagttagaatagcgcaagcccagtcctttcagaaaaaaaaaaatcagaacaattaaatagctttctgaagatactcatttaaaaactttatcttctcgaccttcctcacgcttgaagaaaatctgaggtgtttttcgcgcacagctgccttctaacccgcgagcaacggcgttaaggttttgtttgtaattcggggtgacccaggagttcgggccgcgggcccctcccctcgcccgggcacaccttgcagaggagggggcggcggggacgggacccgggtctgcgcctgcgcacaccctcgcggccccccccgccccccccgccgggtacctgtcacggctaccgccgcggcgctcgcccgccacgttaaatcggatggcgggagtaggggtatggggcggggggcgcggggagggtggcacggcgcgtgcgtgcgcgggagtcgccgagcgataactgggagtgcgcgcgctcgccgctcgctcgcgtcccggaggcggagtctgtggcggggggcggagcgggggcgggcctatgctagtcacgtgggcgcgggggcggggtggggcggggcggggcgtctccgagcggcgggccgagggagggcgcagcagctgctccctgaacactttctgacccaacagtcccccagcgccggacgcgccgcgccctggcggctctagggaccccccccgcgcctgcacttagccccgcgcccgaggtgagcccggcccctaaatcctccgggcgggggtgggggtgcgggacgctccttttttgttgggggtcttggaggcgcgaaggcactaggcgcctcggcagatggctgcacccctcgcttgcggctccccgtgtcttttggggggccgggtgcgggcgcggaatccgggaggtgtccgcacaaaaggccgagaaaactgcgcgaggcctccctccctccgccctccccgccccctcccctccgcgcccgctcctcctctttcaaacccggccggcccgagtggagtcagctcagtcccggcagccgccgcgcgaggaaatggccgaggggccggagccacaggtaaaggggggcgccccccgcccgcgccagccggggcgcccgcctggtcctgcggaggctcccgcgccgcccccgaggcgcccggctctcgttgtcttgtccccccccaggatga

SEQ ID NO: 28478 - DNA, 2300 bp, Homo sapien
gtgagcgccctgtcctgggagatgtgtaagcaactgctgaatggcatctgttatcagggcaggagggggctctattaaaagacccggggaaaaaattggaaccagaccccaaagagtccctgttatttgggctgcagagtggcggtcctgtgagctggggggtctaacagacttttcccagtattcccccataacatccaacaattccccacatggttgtgtgtcacaaagcccggagtccaagcaccgcccgtcacagcttcaagacacacgccggatcccatttcaccgctcctaacccccactcaggccagtgctttaaaattgcacacaggtcctgccccgttagtgggttgggaaattgacttagtgagttgcactacttgttttccgaaaatgaaattaaaaagaaaatttcaaaatactatgcatgtagtgagggtaaatattattttgtgacgctcttacttcagctttaaatatatagccgggtgcagtggctcacgcctgtaatcccagcacgttgggaggccgaggcgggaggatggcaagaacccaggaggttgcaattgagctgtgatcgcatcactgcactccagcctgggcattggagcaagactctgtctctaaaaaataaatataaagtaagttaaaataacaaacaggatgtttgcttttactacggattttggtcaaaaaacttgaaagctactgtcctgtgtagaaatccaggaggcgccctgatagaggttctgatgctcaggttccgatttccctggatgtttggttcctaaagacataggtgccacaacttccaggatgctgctgtcctgccctcagaagtagccgcctgtcccttgctcagtggaccacccaggtccaggcacccatgctcctccagagccaccacctctccccagggcctagatcccaggccgggccaaattccctgctttccgctcagcccaggcccagccctgctctgtccttgtgccctcctgcttgccctcatcttcctaggaccttctctttatgccctttcacacacacacacgcacacacacgcatgcacgcacacatgcgtgcacggagctcagcaaagccggtttgtgacttacctgcttcccttcagcatacagtaggtgctcaataaatgttcactcaattatttacagaccgccctccaaggcaaggcactgcgctgtgttgagacacatctggcacctggcaggaaggcagatgctgttccagctcaggggacatttagggtgatgaatgaatggatggatggatgggggtcggctggagttggagattctctggcctgaggagccagtgggaaggtggtcagcagtaaagaggggcatgcagcccgtggccccccccatggcaggcgttctgtcagtgacagtcccttggggctgtggcccagcattgagtcatgggcaggggctgactgttcctcctgctgtctctggtccttctgaggcctgtctcccatgccctctcccactaggtcctgtacacatgtccctgccacccatccctgggtgaggccaggacatcctcccccgagcccctgacacctgggggacacctgggaagagaagcccatgctccgtggagggtgaggcagaggcatgagccctctgacatcctgtcctctgtcccctctgctcatggccattgtgctcatgtacagtgacacagagggtctcctggtcactgctcagaggccacctccgctgggaagttctccctgactaccgtgtcaaaaatagcttctccttggtcacaatgtgtcacatgacccagttagaccctttccgggaattttgacgggctgggttatcttgtttgtcagtcgttagatatttatgaagcagctactctatgccaggctctgggagtcggggtgaagtagggaggcaaggttcctgcctgtaatgatgttgcagatgagactggtttgactgctaagggctgccaggaagatctgagagctggatgggagggagggcctcggggcctcttggaacaggcagcctttgaatcaagacctgaatggtaggaaggcacaagcggtggagtcttggagaagagaatttcaaccagaaagaacagccagtgcaaaggcccagagacaggaataaacttggtgcgttaaagggacgggaaggaaggtctcttcccgtggttggagagtggagggggtgcagtcagagagggcaggacctctctgaggcggggcgttcatcccgagtgccctggggagacgagagctctgagcagggagtgat

SEQ ID NO: 28479 - DNA, 2300 bp, Homo sapien
cctaggttagcctgactcctcatcccactaagcaagaaccatacttgtgccccgcccaggggctggtatgtggtgggtgcctagtgctggttgaatgaatgagtgggtgataaatgacttctgctggggtcatcaggaggccttctcaaggaagtggcactgaggctgggcttggggaacagcaggaattctctgggcaaaaaaggtggaaggatatcttagtgaggaggaacagtgcgtgcaggcagagaggtgtggaggcctgtggcgtgttctggaatctgtggaatcagggtgtacctgtggatttatgggatgtgggatgccggataaggtggggcctgactataccacactgaggagttgggactgaatccttttgagtagggagagcccacgaagaagggaaacacttgtggtggtttgtgtgttgctgttcttatgctgacatcctcgaggctcaggagagccagaggggatttcagatttcatcagttctccacctggctttggggtgcctcggtctctccctctctgtaatggggctagtcggtgatggccagactcccagggaagttttgctggctgtctaactgcaggtgttctctcgtcctaccaccctggaaggaggagcactttccctcctgtctcctcggagggctagagtgacgtggcaggatggtcaggatgtagctggctagacaggtgctgtgggtgctgggggttccctgacaccccagagtgtggggcccaggcctgacagcttggggtaatggagagcgacagagaataagagactagggtttggcctggctttgtcatctctgggtgaccttggccgagtttctgaccctctctggtacccagtctcgccatctgtaaaatggggcagtggtgactgagtgatcgcgagggtccctccaatagggccccctcagactcccagagtgaggtgcttcgggtccttgaccggcggtactttgggagagtacgaggaccgctaaggagaggggcggactccgtgggaccccagagggaccagctcccacccaccccccttcccggctcggaggaaccctctccacctgcccccttttggggggggggcacaaaacccgggagcggatccaggaacgggttctgggaggagcgctcctggggcgaggaggaaaacccgggcaggatccagggcaggagcggggccagcagccccccgccccagcccctgctccgcgccgcgggccccgcgggagggggcttgaggccgggttaggccgaggggcgggcagggcggggtcccgcgggcagccggggctcccgggctggggggcgcgcggcctccgcagtggggcgcgggtcacgtgtgaggaggggcgaaagtctcgcaaagcggggcggcgtgccgcgagttgggagttctcggcgcgccgcgggcggcgggagctcgggctcccgggcgagccggggacgcggccaaggcgggggccggggtccgagacagagggggccgcacggagagtgggagggggagagacagagaaggacaggggccgcgagggagacggacagagacgcgcaggggagagaggcagcgcgggcagagggaggcggggggaggccggcgggcgaccgcgacggagacggagaccccgcgggcagagggcgagcggggccgcaggaggcagggaggccgggagagggaccgggacgcgagcgcggcggagaccccggcggcaggagagagacgcgagagcggtcggggaggtggcgacagagcccggccggcgggggcggggagggcgaccccaggccgggaggccgaggggtcgcggggccggggccgagcgcagcggggccgggagtggagcgcagggccgggggcagagcgcgcgagcaggagcgggtgacagcgagggagctgggcgcagcgggggacggcggcggggagggcgcctgcagcgggggtggggggcgcgggcggcggggcgccccgggcccccggacccccgcgctgtgagcccggccgggcccgacgatgctgacgccgaggcggcgccgagggcgcggcgcggggcagcgctgaaagttgggcggcccgcggggagcggcgcgggacggccgggacgcgcggagaccccaagacccacgcgcagaccgagcggcagccggggaggggagcgcgggccggccggccgagttcgcgggcagggggcgccgggactcccctttccgcgcccgggacgccgcccgccggatcgcgccttgggatgtagcgcccgctcgccgcctcccggactctc

SEQ ID NO: 28480 - DNA, 2300 bp, Homo sapien
cgaggttcatcccctgcaaagcgaggctctgaaggccgctgaaccacgtgcctgttgatggaaagaacctgagtaacaggcctgacccatgcctggcacccagatgctcagtacttgacggctattggggtcaccacctccctgccagggcaggagggcctgctgctgagtctctgacaaatgagcgtccaccggccgctcacccacctctcgcgacagggtgctcatcacctgccatggcaacccacagtgtaagggaatgatttcatggtagaccgtgtgttggaatctgggctacaggactgcttggtgtctgtgtgacctcaagcaagttatttagcctccctgcctcgctttccccatgtgtgaaatgagaatgaggccactgcttcctcacagtgctgtttagatgagtgcctttggaactttacagttaaacacgatccccaggggattcgtgtgcacatcggagtctgattcacccgggaatgcctggggaggggctgagattctgcattcccaacaagcggtagcaatgctgctggtctttggactgcgtttggggtctcaaaggactgccttggctgggcgcggtggttcacgcctgtaatccccgcactttgggaggctgaggcaggcaaatcatctgaggtcaggagttcgagaccagcctggccaacatggtgaaaccccatctctactaagaatacaaaaattagcctggcgtggtggcgggcgcctgtaatcccagctacttgggaggctgaggcatgagaatcgcctgaaccagggaggcagagattgcagtgagcagagattgtgccactgcaccccagcctgggccacagagcgagactctgtctcaaaaaaaaaaggactgcctttccctgggaggaaaagtagggaaagtagggggcatagggagccatagaagggtcttgaccactgaagtgacagatttttatcacagaaaagaggctggccatagtggcttatgcctgtaatcccagcatttggaaggctgaggcaggcagatggcctgagcacaagagttcgagactagcctgggcaacacagtgagaccccatctctgtttaaatacatttgtcatggaaaagcctctctggttatctgtggcaggaggtgggagtgggaggaggtccgttatttagagagagatgagggcgctgaatgggaggagggcttattcaggtcaaggaggggaggctaagggccctcagctcacctggtccactctttcagacgcagagacttatatccagagggggtggtggacctgctcagaccacacagccctgggaggactccctcccaccagggacccttcactccccacccttcctggtgctcagccctcctgggtctctcctgtcctgtgtgtccctgtttaacatcctagtaacaccaagaagagggaaggcacgaacgagggccctggatctccctgaccagcttgacctcctgcctacccacaacaacccgattttacaggtgagaaaattgagaccaagagagaggaaggcccaccgacccaggctgcagccgaggtcagtctgattctgctgctgagtggtgtgccattaccattgtccacctgcagcaagatcgggtcccgaccgggtggacaaccaaattaacagacggaggtggggactccgcttccggctcgccccgccccaccccactctcccagggagggagctccagctccgggaagatgaggacaatagcaggaatcgccccacagggtacttccacgtgctggctcctgccaagcgctggcaccagtgttatggggcctgtgtacagatgaggaaactgaggcagagattggggcttggtggcaggcctccagtttctgcggagggaaggcagagggcacttggggcatgggcgacatgggtcgtggcgggcacccggcgcacacggcagccgggcgcaggccagaagcccccccgcgtcgccgggccgcccagtccgggagccgggcgctgggatgggcgggaggcgggatctccgggccgcgccgcttcctggctccccaccctgcgccggcggccgccctggccacgtcaccgcccggccaagagtgcgtgggcggcggcgcgcgggtgcgatcgcggagctgtgaggcgcaggcagggctctggggcacctagagaccggggccggagacgtggcagccgccctgcccgccagaaagtttcctagaagtttgctgggcgcgggcgcacgactgactggctggaccatgaacgtgttccgaatcctcggcgacc

SEQ ID NO: 28481 - DNA, 2300 bp, Homo sapien
tgggagaggaggcggaggcctgaaagcagtttacataaagctttcagtaatggttggtttttaaacaggcttgctatgtgctggtagcttctttgtgcatcttgcctagacaattaaaaatatttgctccatgtccccttgcatttctaaaccaaattaattggctaccattagaataacttagactcttcatcccacccccactcatccaagtgaggggagagggaaggtacccgagtctgtttcttgttactcaacatcagtgcttgttttgggcccctttgtttgctgccttgtaaaaaatcaaaagagggagaaaacccaccaaaatggcagaattctgaccaatgtcctacaagatcctggaaagtgaaggcttctacctcatagacaggggtgcaattttcagctgagtcaccagggccttttttcacttcctgtcaagcgatggtctcttaaatgttcccttcaggtaagttctttgattcccataattttataatagtcatccttaggctaccacttccctttccactgggatattttttatttttccttttttttgtttgaactacacactgttaaactaaaagtattgaatttattttgttttgttttttaacagaagctttgatatcagctgcagatcactcaatacatggccgagacaaatctacattggccggaagcagctctagatgagcctcttggctagacttagtccctccttattagtgattggcgattcaggccatgtcatagggcctttcagacaaaaggttcttatcccagtcagctggccaaaacattaactttggatttcttaccctgctacagcatcttctagaaaggcagcaagataatattgtggcagtgcacagataacatcagggtagacttgactggagaaaaccaaattctgcgcttgctcctgtgtgcccccatccagctgtgcatgcacacacaggacacctttctagtatgaagaacttgcatcatgtctgccctctattgagcacccccttctagaaatacttccaagtattagcatgtgaactgttgactccaccctggtgctttctgctaggaaagcacacttaacgcatccagtgtagtaattgaacttgttctactgccatggtcatatgcagtgggattgcataaggagcattatcctagctctgaagataccatggagtagaattccccaccccctgtcttacatccaccctggccctgtaaattcttttttcctttgttgcgtcaacgaccctagccggagactcaagctgccccctgtgataagtgccttctcgtctttctggtgtgattcaggactttaggggtcagtaaagaccgaggagcctttattgtaataagaaacagacataatgccccttcttcacaagccctgtaacaacagctaattttttttttttaatctcccctttctcccttgaaattaatccagtctgggcaatagatgcagtctgaccctttggatgtaacttacatttttttttattaattatttttttctacaatcaccccaattatccttgggggaggcgttggaggacctgaaatttttacccgaacccaggttctccggcgcttggcaaccaaatggggctacagagaagcatctaagccagttcacagagcgagcgtgtgtggggacttctcactgccacggacccttgatgcatgctccccgcgctccagtggtcccgtgtcagaaggcggagttttcgaaaggaggccgccaaaaataaaaggcaaagagacgggatcggctgcagcggtttcccaaaggaggagggagtgtgcatcggtctggtaacaaacagagaatgttttttaattatttatatcacaaaaatctgtgttttatctaggatattttctgaatattctttgtaaaatgcagatttttttccacaaaacagtaggattctttgttatattcttaaaattgtttgtttaagtaggtaaaaatatacattcagctgaaagcattacactaacatttacattttaagccttaggaggttattcagcccaattcccagcagtagagagaatactaaacttgtgtctcaaggtttcatggttttcccacgttctttggctattaatttaatttcccaggtcacgtagacaatcattgataattgaaacaagtcctgagttgaaataaccttgagttgagcaaaaatatcctcattttggcagaagctgggcttggtagtacagtaaaattttagtgtaatgtgctcttgtaattgaaaggggataga

SEQ ID NO: 28482 - DNA, 2300 bp, Homo sapien
gtaggccactgtaaggcctttgtcttttctttcaagtggaaacctctggaaaattttaagtaaagtgacataataaaaggacccctatgactgcagtgtgaagaataaattcagagtgagcaaggacaggagcaggcagattaaaaagaggcgagcgcagtcatccaggcaagagatgatgaggattggggcaggttaacagtgtaaataaaagaacatgacccaggccggtgcggtggctcacgcctgtaatcccagcactttggcaggtcgacacgggtggatcacgaggtcaggagttcaagaccagcctggccaagatggtgaaaccccagctaaactacaaatattagccaagtgcgagggcaagcacctgtgatcccagctacacgggaggctgaggcaggagaattgcctgaacccgggcggcagaggttgcagtgagccgagattgtgccactgcactccagacaaaaaaaagaaaaagaatatgacccaggcgagtctcaatcactttaagaggttcacttgccaatgttaagaacgtacttggggaaaaagaacacataaccacagaaaaatcagtggtccatgttttttttctttttgaagctccttttcttatgctatgttcccaaaaatttgggaaacaaacactcagcacccacactgaggggccaaatctccccgcttctacccatctgttgaattgagacgttagatgggcccgtctcgagggccctaacagctcaacagtcgtgtgacgccatttggccaagcttgcggggcttcaaaatgcagtttgagacgacaggaagcaggtaaggagagggaagccagtctggaaggaattgagcggagaacgtggactagcctggttaaacacttgtccttagccttcgccctttctgtgtctaaagaccatcgctctgaaaccttgttctcctgagagtgctggggtcttctccgggccttctgaggagcgccgttcaacggcagcaaagggcccacggagtccactggggctccaagcaattttttttttgagacggattcttgccccgtcgtccaggatggagtgcagtggcacgttctcggctcactgcgacctccgactcccgggttcaagcgattctcctgcctcagcctcccaagtagctgggactacaggcacccgccaccatgtcctgctaatttttgtatttttcgtagagacggggttttgccattttggccaggctggtctcgaactccgggactcaggtgatcctcccgcctcggcctcccaaagtgttagtattacaagcgtgagccaccatgcctggcctccaagcacattttgtttctgtattagcaacagctgtgctcggccagggacggtaaaaatatacggttcagaaaatgcacctcagtgtgaaccaaatgtagctgagggcactttaacctggaagggacatcgccacctcacaaactccggaaagaaagggacacggctcttccatcatggctgccggagacagagcagcgaaaggcaacggaaaggaaatggcgccggggcccgccgccattctcagcgggcccagggcggtggggcgagagggctggcggcgccatataggaaggccagccacggaatttaagaccctcccggcctctggcgccagaggactctgaaacttgataacaatatggaggacggttattgtctctgcaaagcaacttcttcaagccggccgcggggtctgtaccgagatcggaatcaggcaaaatcctctattctctaaacagaatgcgttacgcatactgcgcatcttagcaacagcaggccggctaacgacgcaaagaatgttacgtcgcaccagaggcgcttcctcccacctcatcccacgttctagttcgggtggcgcgagaactctacgctcgctccgtactttgtttttcttgtacagaccgcaaaatacacccatcgtcgcaactgacgtaaagtgcttccaagaatacccgtagttccccgcggagccctcgggctattccgaggcgctgtttacgtatcgtctccgccgtacgcagcgttaagttggagccgactcagcggcggccgccattttgtgcagtcgctgggaaggaaggagacgcctaaaccgcggcactgcccggtttgagcgtagccaaacctgcccaccggctttgtagccccgattctctgtgttttgctcccgtctccgacgagagaggcggcgacggtggcgtctgcgacgggagacagcgcgtcggagcgagagagcgctgcgcctgccgcc

SEQ ID NO: 28483 - DNA, 2300 bp, Homo sapien
aactataatcccactgcctatttttttatttctaaaaatatcataaaaagacacaaaattttaaaattgtgtagagaaattgtggacttcctgaaggatttgaaaaattaggcaagctatattatccagttaataattgacacaaaagctctggtttgccatgttctatattgtggataggaaagtaccattttgccatgcaggatatatttttttaaatataagcatacttaacaatctttcatggcttctgagttttgtagcatacttaaaaagatgtttcttattacaaagtaattttaaatatcccatattttcttctagtacttttattattttattgttcagatttaattttttgatctgtctggaatttattttggtataatgtgtaaagtgtggttccaattttatttttcttccagatggttacctagttgttctaacactattcactgaattcatcatttctccactgatgtgaaatgccaccttcatgatattcagagtttttgtatgatacgaaagacaatttttttggttccgattttagtggaaagtcttcatgtgcactttttaactgtcctagagtttgttgttgttttaaatatcttaaaagttgtctctaaccatcgatatgatacccagataagatttttctcctcccttcatgaatttgtcattacccagctcattttagtttttttaagtgtactgcacacaaccttcaaatattatgaacatttctctctcccagctgtcactacaccaaactacatatgttatatttccctaaatcatcttgctgtgctctttgcagctcttctgtagactgttgatgtcttcacctaacgagttgctcaaaagttcccataattatttaggtgaggcctcagagcgaaagcctttcaccactatccagttcctcccccaaatgggcattcatctccatataacaaggacgactgtgtttgggggaaaataacagatttggaagcacaatggcagttatttgttggctcttaaaacaatccacctgttgggggggtgcgtcctacacaaaatgccaactgctattgtgggaatgttttgctatttattccaccaaaatgattcagacagaaaaaacaaaaaggatcgccctgtactaggtcttgaacccaaagaactgtttgcacagagattcatccaagatacatcacagcctccacctcggcagctgctctctcaaatgtttcctgactctccccaagtcagtctccgcgtgaggggaggaggaggatgctgccagcgatggcgctgctggcacgaaggctggcctgcgacttctatttaaaagctgaaccaaaatatacttggcgtctgtggtctatttaaaacttcaagttaagacagagaaaaaattactctccatcctgaatgggcctcgggtgtctcaatcacagacaagagtggcaaatggtgagagtcagaaagtgggaaattaggaacgctgagggagcacggccaaactctgaagccagcatgaaaacctggaggtgaaaagagaagccatgggcagcgggggcggggggaaacgggcccggattcgaccttctaagccaaggctccatctgcaaccctcgcgaccaagacctatcgccaaagtcagccacctctgctcatcgcccctcccccgactcaaggctacctcctcagaaccccgcctcagggtcttctcccggactttagcgaggtgctcagctcgagggacgccccagctcaacggtctcccttcaaggccccgctcctcagcgcgctccttccacagcgcccctccctccctccctccgtcatcccagctcgccacccgctggggctcctcttcgttttccgcgcctcagccctcgccccgccccctcgccctgagccccctccaggccacgccctctggtccccccacctgtgagcccgctcgttccccgcccttcggtcttcgccccgcccccattgctccccgcccctcgtcgccctctgtaggcctgctccctccccgcccttccaccctcaccctgcgccccgccccggccccttggtcctcgccccgccctcctcgtttggcgccaaaccctgtggtcaacggcgcgcgggtctccaggctccgtgttctaggcccgagttagaatcctgtcagctgaggaggtcgggcggggcagaggggcttcaccttgaaaatctcggggagactgtgggtacgaggggggtaagtggcaaaaacgaacagcgtgcgaagactctgaggggacgctcgttttgagaag

SEQ ID NO: 28484 - DNA, 2300 bp, Homo sapien
catacctgtaatcccaatactttgggaggtggggatgatgtcactgcactccagcctgggtgacagaatgagaccctgtctcaaaaaaataaacaaaaggctgggcgcggtggctcacgcctgtaatcccagcactttgggaggccgaggcaggcggatcatgaggtcaggagatcgagaccaccctggctaacatggtgaaaccccatctctactaaaaataccaaaaaaaaaaaaaaaaaaaaaaattagctgggcttggtggcgggcgcctgtaatcccagctattcgagaggctgaggcaggacaatggcatgaacccaggaggcggagcttgcagtgagctgagattgtaccactgcacactccagcctaggcgacagtgcgagactccatctaaaataaataaataaataaataaataaataccaaaaaaaaaattagcctggcatggtggcgggcgcctgtagtcccagctacttgggaggcggaggcaggagaatggcgtgaacccaggagtcggaggttgcagtgagccaagatcatgccactgcactccagcctgggcgacagagcgagactctgtctcgaaaaaaaaaaaaagtaaaatttttttaaagtaaagcaataaaagaatggctactccatagatagaacagccaagagtaaaattttaattttaattaattcaaattttggccaggcgcagtggcccgcacctgtaataccagcactttgggaggccgagtcaagcagatcacctgaggtcaggagttcgagaccagcctggccaacatggtgaaacgccatctctactaaaaatacaaaaaattagccgggcatggtggtgggtgcctgtaattccagctacttgggaggtgaacacagcagaatcgcttgaacccgggaggccgagatcatgccactgcaatcccagcctgggcaacagagtgagactctgtcttaaaaaaaaaaaaaattaaatttttaaatggaagcagtgcaaatttagaaatactgattatatcttgaaatagtaatgttttggacatatggagtttaaaacattactcaaattaatttcacttggctttcttttttactttttaaaaaatgtggctactagaaaattccaaatcacatatgtggcctgctttatgtttctattgcacaatgctaagccagattgtgaagattttagttctaggacatggaagtctcccctcttttaatgcagggtggtgtagttggaagagaactgcgcttggagtcaaagacccctgggtcctgcccctcactggatgccctgatacacccactaggcagccggtaaactccttgaacggcctaagtttctgcacttatcagacggaaccaataacacacgcttttaggactctaggagatctggagttgattctccagtagttctctgtcccttcctcacaatgcaacctttaagtagtccctgggcctcagcttcccttgcttgtagaagccgccataacggcacggggagggggcaggctgccagaggtgggtcatggtgcgtctgtccgtccgtcttacctgaaagcatcggcggaatttgacgaacccggggccggtcccgccacgggtccctcaggggaccccgcaaagttctgggtcggcccccgacagccggtgcccccaaactcacagcaaggggtgccctttgccttgtgctgggggatgaggaggggagttggggagaggcccattttgctactctgagtccaggcgttctctaggcaacgccggcgcggtctccactttcccgtttagcataacaatggaaccttcgtgagccgccgcgttgtccgcgagatgccgtttctatggtgacagccgggccgggggcccagaccaatgtgtcagtggagagggtgaatgcaggtcctggtcctagaggcatgaaaaggaccccagaagacactgcctttgtataatccgtttgctatcccgaggtgattcacggagtttctggggattggcgcaggctggcgctgggaacccccgcgccggttacccctttcctcggtggtagaggccgggcggggcagcgcatgcgcgtggcgggcaggcggcaggaggcgggtgggtcaaggtaactctgggctacagagtccttgctgggggttcggggagcgcttggaccccggcttctgggacgcgtcaggtacgtctccgagtccggcgtcgccggccagcgctgcctgggttcactcgggggcccgagctgagtaggacgtccgggcctcgcctggagagaggcttca

SEQ ID NO: 28485 - DNA, 2300 bp, Homo sapien
accatggtagcctgtccctagtctaaagccctgggcaccatgcccccacctccaccccctcagttccttcccgcttgacttcaggagctggattccctcctcttgccagaaaagtccagctcatactgcctacggcacaaattctcacaccaaccattaggttcctgccaggtcctggccagtcccaacaccatgaagcaggagggcaggcgaattttgagcagagagactgtttctgtttggcatcagcctctgccaatgcccaggaaagctggaatgctctcctacaagagtgacagttccccacacactaaacattctttttttttttttttttttttttgagacagagtcttgctctgtcgcccaggctggagtgcagtggccgcctcccgggttcaagtgattctcctgcctcagcctcccaagtagctgggactacaggcatgtgttaccacacccagctaattttcttttgtatttttagtagagacggggttttgccatgttggccaggctggtctcaaactcctgacctcagacgatccacccacctcagcctcccaacgtgctgggattacaggcgtgaaccaccacgtccggccaattctgtcttttgatggaacaacagaggcttagactccaggctccagttactttttttttttttttttttttgagacagggtcttactctgtcacccagactggggtgcagtggagcaatcacagctcactgcagcctcaacctccctgggctcaaagtgatcctcccatctcagcctcctgagagactgggactacaggtgtgcaccaccacgcccagctaattttttttttttttgtattttgtttcgctattgccaggctggtcttgaactcctgagctaaagcaatcagcccgcctcagcctcccaaagtgctagtgctaggattacaggtgtgtgccaccacacctggccaggctccatttaattctttttttttggagacggagtctcgctcttgtcgcccaggctggagtacaatggtatgatctcggctcactgcaacttctgcctcctgggttcaagcgattctcctgtctcagcctctcaagtagctgggactacaggtgcccaccaccacgcctggctaatttttgtatttttagtagagacgaggtttcactctattggccaggctggtctcgaactcctgacctcaggtgatctgcccacctcagcctcccaaagtgctgggattacaggtgtgagccaccatgcctggccagctccatttacttcttgagaaactcatggttctctttttagtcactttggtcacagagagattatttaacatcgtttaataaaaaagtagtagtgcaaacaggaaagtagcataaaaatatagtgttgttgtggaaggctggtgcttgctgctgagaagctgaagccagaggaggccaggtgtgaggaaggaggattctttaaaggcaagaagagagaggcctgcctttaagagccaagagagccgctcatccatgaccccaacacagagctctgtagaactgctgtcacacgccaaacaccaacataagggggtgagagaatgaactccagccgcttctcccaacacaacccaacagagctattctgggacatgtgtgtttgcgagcttgtgtgtggagagcaccaaaaagctcatcagcagccccaggcctctgtgcggtctggttttcagactggcacccgcaggcagtgcatctgaagcaccttctagttactatccccatctggaatcttggttttctccattccatgtcaccttctattgccaacccaagggtgccagtgcctgtgggtctcattatatgatactctcttccaggactgaatccgctagtctggccaaaaaaaaagcactcagccacatcctactccccaataaatgtctctggggtcttcattttctcttccggctgatcctcagttcatccagttccttctccattaagtgggattcagcagtggactctgaaagctgaaagtgaagcagcggctgttagcaagcagcacatttctaggaaatgtttcgggttagcaaggccggccctacacacggaggaaaggccccctgccacttctctgatgctgctggcttcctcgatgggaaaccctctgtaactgggtagaatgcaacccctgatgacccaggaccacaagtacttgaagaatattcacagtccactctgtcagcacgctgtcacccacgagggcatggcactccctgcacgaaggagagcaggtctcagaggac

SEQ ID NO: 28486 - DNA, 2300 bp, Homo sapien
ctgtttaaggatgaaagagctctttcaatgattatagaatttccaagggataagaaaaaatactggaaatcatgcaatgcagagtgttcagaactttgggaggagatgagatgatctagaaaagatagagtgaggctgggggcagtgattcatgcctataatcccagcactttgggaggctgaggcaggtggatcacctgaggtccagagttcgagaccagcctggccaacatggtgaaaccccatctatactaaaaacaaaaattagccaggcgtggtggtgagcacctgtaatcccaactacttgggagactgaggcaggagaatcgcttgaacccggaaggcagagtttgcagtgatccaagattgcaccactgcactccagcctgggcgacagagtgagattccatctcaaaaaaaaaaaaaagaaaagaaaagaaaaggcagagtgagaacagaagacagagccctggccgggcgcagtggctcacgcctgtaatcccagcactttgggaggctgaggcgggtggatcacgaaatcaagagattgataccatcctggccaacatggtgaaaccccatctctactaaaaacacaaaaattagccagatgtggtggcaggcgcctgtagtcccagctcctcaggaggctgaggcaggagaattgcttaaacccgggagttggaggttgcagtgagccgagatcacgccactgcactccagcctggcaacagagccagactctgtctcagaaacaaaaaaaaaagacagagtcctgtggaatcagacatttaaagattggggagagagggaaaccagagggctgaggaattgctgaagtcttcaagaggaaggctcagcagcagagatgacatggtgagactggtgccaggatggaggtcgcatcagtggacaagggtgtcagcaagtgagtggcaatgccccatgctaggagcccaggtgactgccatcggatgggagaggcaggttcaagaacgctgggctcttagctcctctactccccatctctcgagcccaagatttccaccttgcttgtttctgtcctgtcagaattagaaacatgtgatatagtagctcttaattggggggtgggggcatggctcccttcgagaatcctataaaaactataagcccctctcattagaaagtgcacattagcccatgcctgtcctgttgtctgcgcagttccccttgctaggactcaaactcggtcttcctgccattactgcctctaatcctgcactcatgccctccctctcgtccacagaatcttcttttcttttctttcttttttttttttttttgagatgggaggcttgctcctttgcccaggctggagggcactggtgcagtctcggctcactgcaacctccacctcccaggttcacatgattctcctgcctcagcctcccaaatagctgagattaggtgcctgccattatgccaggctaatttttgtatttttagtagagacaggtttttgccatgtcggccaggctggtctcaaactcctgacctcaggtgatccgcccgcctcggcctcccaaagtgctgggattagaggcatgaggcaccgcgccaggccctttttaaattttttttaaagagacggtgtcttgccctgtcacacaggctggaggatacagtggtgcaatcttggcttactgcagcctcgatctcccaggttaagggatcctctcacctcggcctccaaagtagctgggactacaagtgtgtgtcaccacgcctggctaacttaaattttttttttgtagagatggtgtctcagtatgttgccctggctggtctcaaactcctgggctcagcccaatcctccttccttgacctcctgaaatgctgggattacaggcgtgagccactgtgcctggccaataaagtctttgaggatgaagaattttagccagaacctgaaggatatatctggctctatttagatttgaaaatatataatgtctcaagaaaaacaaaacaaaacacctcgctgaagcaaacagggttagtgtggcgatatatgggtgattttttttccttttctcctaaagactttcattcatgggactgtccctgattcccagccatcacggggaggctctaccttcaagtgttatccagaatcagaccacctcacctcatctactgtggcctccctgggatgggcctggcctccttcagtctgttctcaccacaaagccaccagaaggatccttttatttttattgattgattgattgatacggggtctgactctgtcagcaggc

SEQ ID NO: 28487 - DNA, 2300 bp, Homo sapien
aaattaccctgtttaataacatggggcacattttaaaaagaagcacttacatccatcatataggcaaaaagtaaaaagatggataacacctaatgctggggagggtgtgggacaaggacatttccatttactgtactattatgaaagcatctgatagaggctgggagcagtggctcatacctgtaatcccagcactttgggaagccaaggcgggtggatcacctgaggtcacgagttttagaccagcctggccgacatggtgaaatcccatctctactaaaaatacaaaaagttagccaggcatggtggcacacacctgtagtcccagctacttgggaggctgaggcgggagaatcgcttgagcccaggaggttgcagtgagctgagatcatgccactgcactccagcctgggcgacagagcaagactccatctcaaaaacaaacacacaaactcaaacaaaaatttatatctgcatactttctgaccagctcacctacttactagaaatctatgtactatgcctcagtttcctcatttctaaaatggggataacagtgcctaccccagtgagctgctgtgaagattaaaggaggacacaccgcacccacccacacccacaggcaccagagcacctggtatttaggtgttaactcttacctttgtttggtacatagggaagatttacctgatgttttcccaaaagacctgcaagacactaatttattcctaccaagtaaaacatggctcaggaaaacgaaactggatcagtgtctctctaaaacagcccaagaagcaggccaaggagatggacaaggaagataaatctttggccctggtcacaggccgaattaagaaatccggcaaggtggggcgcagtggcataggcctgtaatcctaggacttggggaggctgaggcagtcggattgcttgagtctcggagttcaagaccagcctaggcaacacagtgaaaccctgtctttatatatatatgtatgtgtgtgtgtgtgtgtgtgtgtatatgtgtgtatgtatatatacataatacgtatatatgtatacgtatgtatatatatacatatatacacatacctatatacacatatatacatatatacacatatatacatatatatacatatatacgtatatatatacacacacataaaatatatattatatataatatataactatatataggccaggtgcggtggctgatgcctgtaatgccagcactttgggaggccgaggcgggcagatcacttgaggtcaggagttcaaaaccagcctagccaaatggtgaaaccccgtctctactaaaaatacaaaaaattagcggggcgtggttggtggtgcatgctgaggcaggagaatcgcttgaacctgggaggcggagcttgcagtgagccgggatcacaccactgcactccatccagtctgggcgacagagcgagactccgtctcaaaacaaaaccaacaacaacaacaacaacaaaaagctaaaatcttacaaaaagcgacctgttccactgtcccttgggcctgcggtgatggtgggcctgactccattcgtctttaaacatctctattcccggccacatctttggccacctatgctcgaataaagtgttgtcttggagcctgttgtaaatttaagaataaacttttgttaaaaaaaaaaatacagtggctcatcatctcttgagttgttttcactcagccactcctaccttagctgtgaacttaaagtaaaacaagcccccagaatcttgccagagtcagccctttgatctttgttctcccctgaactctattacctggaattaaaacaacgcatttgaaaaaaagaaaaacaagcaagtttctgagctcaccctatacccgctgaacagaatgactgcggtggcgccccagaacctctcacaggcctctcagctgctgctaatgcccgccgaagccccgacgcccggataaggccagggctgccggacccgctgcgggcactggaggacccggggctagagggcgccgctctcgcccggctcgcgcctcggctcccggaaaagcagctctgtccgccgttcggctgcgctcacctcctttccgcttccggtgtcccctacagtcatggctgccgccgtcgctgctgccggtgcaggggaaccccagtccccggacgaattgctcccgaaaggcgacgcggagaagcctgaggaggagctggaggaggacgacgatgaggaggtactagggcctcgcggggtgcagagcgggaagcgggcccgctcgtgggtgtg

SEQ ID NO: 28488 - DNA, 2300 bp, Homo sapien
aaaaatccaaattatcagcagttcaaacacttgaatttcaaacttatcccactgagacagctcaaacagcaataacaatctagatctttccaggaagtgagggtagagcccctggcattcctcctgagagccctgtgttaggtcctagaagtatctggaaaagaaaaggaggggtgtaaggcatcatacaggcctagagagcttattctcaccatacctgatggggccaacgtctacaaaaataatactgaaagcacagtcagacaactaaaagagcatgggcccgatcccaatccccacccacacattaactgttggtcaactcaggtgctacaacaggagccctcaacccctgggctgtggactggcactggcccatggcctgttaggagctgagccacacagcagtagatcagcagcaggcaagtgagagaagcttcatctgtgtttactgctgttcaccatcgctcacattactgcctgagctccacctcctgtcagatcagcagcagtgttagattctcataggaacacaaacccttgtgaacagtgcatgcgagggatctaggttgcaagctccttatgaaaatctaatgcctgatgatctgtcactgtctcccatcacccccagacaggactgtctagttgcaggaaaacaagctcagggctcccactcattctacgttatagaattatttcattatatattacaatgtaataatagaaattcagtgcacaataaatgtaatgcacttgaatcatccagaaccccccccccgacccccggccacccccaacccaccatccatgtaaaaactgtgttccatgaaaccagtccctggtgccaaaaaggttggggaccaatgtgttagtgaaataacttgcgtctccaccactggcaaaaagcccaaggtctgggctcacctgccgctgctgcagttgctgctgttgctccatttgcaacttctccgtctcaaagacaacgggaagaaccaggatcataaaggaagtggtcccaatccacaaggctgccctggaaaacctgcagaggaaaatccccagagggtgagcatgaagacatgcaaacaaaacaggcaagaactacccagtaaccaaacctctcacattacatactccaatgtttttgataaacgtattctacccgctccttacaccatactcctaccagagacaggaggagcagctatggtagctgtatcatctagtgatggcggtttaacattctcctgagttcttacaaagctccttattcattaattatctccaacaatctgaaataacccccacaactcccctgccaggtaagaatccccattttacagaagaggaaactaagaaaggatagggtacaagcccaaggtcacccaacacgggtctgctgcttccaaaccccgtgttctttcacagcaccacgaccatcccatgcacgtacccagtgcctttgccctcgttccttacctgtacattttctgagccacaaagagggaaagatcaaaagtggctccggccgcggaccggaccctctccggaaacatctccgtcaggccccatagtctctccgacagggtctcatctagctgtggtggagtagacgcgggtcttagccgaaaaagcgacatccattcctggccccgctgcggcactgggagccgccgagccccactggagctagggcacccagggcccagcagggcccctaaccccgcctcccaaagcagccgcttcgctccgatcccgtaccacgcggatcccacacccacgagcgggcccgcttcccgctctgcaccccgcgaggccctagtacctcctcatcgtcgtcctcctccagctcctcctcaggcttctccgcgtcgcctttcgggagcaattcgtccggggactggggttcccctgcaccggcagcagcgacggcggcagccatgactgtaggggacaccggaagcggaaaggaggtgagcgcagccgaacggcggacagagctgcttttccgggagccgaggcgcgagccgggcgagagcggcgccctctagccccgggtcctccagtgcccgcagcgggtccggcagccctggccttatccgggcgtcggggcttcggcgggcattagcagcagctgagaggcctgtgagaggttctggggcgccaccgcagtcattctgttcagcgggtatagggtgagctcagaaacttgcttgtttttctttttttcaaatgcgttgttttaattccaggtaatagagttcaggggagaacaaagatcaaagggctgactctggcaa

SEQ ID NO: 28489 - DNA, 2300 bp, Homo sapien
gggttagccgtgaacgcgccactgcactccagcctgggaaagagagcaagaccctgtctcaaaaataataaaacttcaggccgggcgcggtggctcacgcttgtaatcccagcactttgggaggccgaggcgggtggatctcaggagttcgagaccagcctggccaacatggtgaaaccccgtctctactaaaaatacaaaaattagccgtgcgtagtggcaggagcctgtaatcccagctacgcgggaggctgagacatgagaatcgcttgagtccaggaggtgaaggttgcagtaagccgagatcgccccgttgcaattcagcctgggcgacaaaagttaaactccatcttaaaaaaaaaaaaaaaaaaaaaggccgggcacggtggctcacttctgtaatcccaacaccttgggaggccaaggcgggtggatcacctgaggtcgggagttcgagaccagcctgaccaacatgaagaaacccctctactaaacacacaaaattagccgggcgtggtggcgcatgcctgcaatcccagctactcgggaggctgaggcaggagaattgcttgaacccgggaggcggacgttgcggtgagcggagatcatgccattgcactccagtctgggcaacaagagcgaaactccgtctccaaaaaacaaaacaaaacaactaaatttgaagtgcaacagtttcttctcgtttttccagttttacagaaaacccaaaagaagggcagctaaggtggataatgatgcctaccacgcaccctaagagtaggtaaaggggaaaaaatgaaatccacgtgggactgcgagtagttttcgccttttcccgaagacgcacacaatgcgcttaggtatacctcgcgcagaggtctctgcagagaggaaagccaccgtgagaagagcggggagcccccaggcaagaaggcagtggcttgtgtgtagtgaaccgaaatgcgacaccaaggaactgcaacaggattctcctttccacttgaaatgtgactcccagcgagacacctacccttgacgctccctggacagtgcggcacggtcgggcccactaaccaaggcaatttgcgcccgaccgaatcaggtgcttcaaaatcccccctggtgagccgcgcgttaaccacacataaaacagtcaacgcagaaggagcgagaacgttcggccgaaaagcccggcacagagaagggaggggtgctgaaagccgcggactgcagccgctggcctggctgccgccccgaaacaacgcccacgcccgggagaagggcaggctggcgtccaggtaggactccctcaggccgccccgccaggggccgcgccgagcggagcggctggaccccaaccctgccggccgccgccgaggtgcgcagcccgcagccccacacccacggcctttgcaacaccccaaccgttgaactgcgcccctacacgcccggcgtctgcggctcccaggccggtgccgatgacgtcagacttacgtcaggcgtgacgccacggctgggaggagtgaggacggcgcgggagggcgtttccggagcacgcgccgggcgggggccgctgacgtcgggctcaggtgcgcgcgcccgcccgcacggcccagttggcggcgcgcactccaggtggcggccggctgcggtgaggggaccgccagcggcgagcagtcccggcggccctggggtctgcggccgggggcgcggcgggagggcgtctgggcctgcgctcacgtgacgggcggggaggtttgtgtaggggctgcgagccgggtgggcgcgggcccgggagcgcgaggctgactgtccggccccacccctcgcgggccagcccttcgccgcgcggaaccttccctcgggcaggggccggccccgccgctcacttcccgcgcccgctcgccgctgaccggagttgtctcctcctccgcagggccgcggccagagggctagaatccgcgccttccgagggagccgcgccctgcgggccccaccgtacccgaggggatggagggctgcccccgaggcccccgcgcggctcgcggtcccacgcctgccggcccgcgctagctactcgactcgtgcgctaaatttatccgtcacccaggccttgtctcccgagtcattggcgtcgtggttcaaaagaaatggaagaaaaggagcgatgtgaccgattgtgttcggtcctcctgctttgaggcctggcatttgcagagggaaacagcaagaaaatcgtggggattttggaggggggtgggagggaagggtggggaaacggaaacaaggtcttacatttt

SEQ ID NO: 28490 - DNA, 2300 bp, Homo sapien
ctggtctcgaactcccgacctcaggtgatctgcccaccttagcctcccaaaatgctgggattacaggcgtgagccaccgcatccggccgacttgaactctttggaagagccagttggtgagatgctatcaatctgggccataaaggaaaagccaaaatctgttttttaaaatgttctactctcaatacaacacaacacctctggtcaccaaaatgtgtggatttatccccaccagcaacccatcagtgctgcaggggacgccagctggatgtcctctagttcaattcaattcgtctcacactgtctacctggagatactgtcagatcccactgattaagggctcagtcccacaaaactgtgcccctcctttagaagccagttatgagttcaggcctccagtacttcgttgttttttttttttgtttttttgtttttttgtttttttgtgagtgggagtctcgctctgttgcccaagcttgagtgcagtggtgtgatcttggctcactgcaacctccgccccccccccccccccccgggttcaagggcttctcctgcctcagcctccagagtagctgggattacaggcacatgccaccacgcccagctaatttttggtagagacagcgtttcaccatgttggccaggctggtctcaaactactaacctcaggtgatctacccgtctcagcctcccaaagtgctgggattacaagtgtgagccattgctcccggcccatataggatggaggtgagcaatttggcaaggaagaaattaaaaagcacataagaacagtatcaagaccattggaatcagatgacttcctgtccaagattcccagctgtgtttgtgcaaataagacttgatagtagtggaaaacagggacaagaagagactgtctctttcttctcaggtagatccccaaaactgaaagccattttcaatcctgccacttgctcactaaagatttagggtttaggtccaaaccctaagtcttggattccttatcttctcaaacatgctcttgtttgcttgatgcctggttcgagtggccaaggccgacattcatagacgttggttaatccctaatttcgccaaacaatgacggcctaggcttttccggcttttgaaacaggaattcaagacactaaaacgtgtgttgatggcattttgggttggggcttttcacaactgatgacactggaaaaataatccataggaaactaccttatgagaccctagatttcggtttagcagttcaccacaaaagtggtgaggtgttttttggcttttaattttagctgcttgcctctgtttttagttcgtgtgattgcctccgcaaaggcagtgaatggagaattctccctaaggtcagcatttaattattgcctcactctggctgctatagtattacaactcttggaacttacagcatcgatcctactattaaagttgcctggagcatgccagcacgttggacatcggcgttccagcaactgcctcagtcactgaatcgagtgggaggctcattttgcagtttactatctccatgagcaggtccaggcgcgggacctgttctatgactcgattgggtcctgcccttgtccgtcatcggaaggcttacagcgcctactgttttgcagtaagatttgcaggcttagtaccgcctctggaaacaaggagagtgaaggggcgttgacgagtaacgttgtttgtatttctctcctcattggatggctgctgtgtcagtcagacacttctctgcttccgttggcgggaaggcttcaggcgggtagcggggactcggtactgccccctcccaagctgggagcagggcgcgtgacgtctcagacatttgttgttgggatttgggcctcattaattattcattaggtacttgaaagctctgcagggattggtggctgagaggcctagtcgactgtttcttagctagaggtacgtgtcacccagtacgcggctggagttttgcataaattattccgataaggagcggggcggggctctgtgcatagattagtcaaatgagcctgggagggagggaagccggctacgaattagcctaagttattaaagatggcgacggagcgcagtcgctccgcgatggactcgccggtcccggcctctatgttcgcccccgagcccagctccccgggggcggccagggccgcggcggccgccgcccgactccacggcggctttgactcggactgcagcgaggacggcgaggcgctcaacggcgagccagagctggacctcaccagcaaggtaggcccgggcggcg

SEQ ID NO: 28491 - DNA, 2300 bp, Homo sapien
caacgttacaggcgagaacctagatctgctgaagatgttcctcaacctcctctccccccgcaccagctacagggaggaggagcctgctgagtttcagattgatgacacctactccgtcccggtaagtggctctgggcgggtagctgggtgggcacttcctacagtggcatcagggggtgggtctgtgctggggatgcacttatgaggccagggtcttctccttggcagggtgtggggacagtggtttcggggacaacactgagaggcctgatcaagctgaatgacacgctgctgctgggcccagaccccttgggtaacttcctgtccattgctgtcaaatccatccatcgcaagcgcatgcctgtcaaggaggtgcggggtggccagacagcatcctttgcgctgaagaaggtgagtagcgatgatactgaacgctcccctcagactccatcatgctaggctcttggccagatgccctgctcacccactctagtcctcatggctgctctgcaaggtcgggattactggcttcatttttacagatgaggaaactgaggctcagagcccagggacttgcccaagacacacagcttgtaagtgctagagcgaggaatgcctccttctaagctccgttcctccctctggtgcctgagcagggtggcctgagctcagtggtgaggtcaaataggagtatccctgctgtgcaaggatccttctacataggaccattgggatctgcgccacatcctcttcccattcagccttctatctcctggggtttggggtgggttgtagttcaggggtcacctacctttacccaccaactaaattaaccaggaatagtaggactttcttccccacagtggtcaggtcatgcccacctgttgttccccctgaatgcttgcctgcctttgcttcctcatgcgtccttcatggccgagcagctgaagtgctgattcccgcatgaagccttcctgacccccagtagtagtgttgagtcttcccatggagcactgagggtgctcgtgctgtccaccctagaaggcctgtggtccagttggtgaggaaaccaggcagagttggggtggtccctatccctagaaagactcttggtccctgggaccaggggtgaaaccagaaggcataattgtccctgagggctggggctccctctttctttcagatcaagcgctcgtccatccggaagggcatggtgatggtttccccacgtttgaatccccaagcctcctgggagtttgaggccgagattctcgtcctccaccaccccaccacaattagcccgcgctaccaggccatgggtaggtgtctaaggccctgccagcccaggaggccgtcgtgttagctcccctcagaaggtgttccagcaacccaggccccctagttccagctgcagctgggtggtaggcctccttcctgtttagtgatgccgttccttctgttctacccatgagccgcagtgttgattccttcccacaaacactgagggctgggctcttgagacccagacctgtcctcagggacctcacatgcaatccttcagcaaggtctgctgaacgctgctatgtgcccagcggtgttgctaaggtgctgggaacaaagatgaagtagatgggcaaggatccttccccgcagaagcccacagtccagcgaggaggtgcatgtgcagtgtgctgtaatcccaggaactgggacccttgtctgcccagggcctgggggtgggggatgacgggtgggcattagctggaggaaaaggtgggagatggtaaggcaggatcagagccaagaacaggcttcacgggggtctgtagccccagagataagcccccacccttccacagcttaagcgtatttcatgctttcactcactgcctcccgttgtcctgaagccaccaggtggctccagcctatcctgacctctggcttccttgacagtgcactgtgggagcatcaggcagacagccaccattctgagcatggacaaggactgtctgcgcactggggacaaggccactgtacacttccgcttcatcaagacccctgagtacctgcacatagaccagcggctggtgttccgggaaggccgcaccaaggctgtcggcaccatcaccaaggtatggccaggacagaccttgcctgcctccaggaagcaccaggggccactcctgttctgtgaccctgagtgcagggcagaggtttagtcactgccatgggagagctggacccactgaggtgtggcctcggtgccatctctctactcccttagaggtatcctgtggcct

SEQ ID NO: 28492 - DNA, 2300 bp, Homo sapien
aaagtcctgggattacaggcgtgagccaccacgccaggcctcctcaccttctctaagcctcagtttcctgctctttgatggaggccatcgtgtctcccccacccccatagtgagctgtgcgagtagaaagccccagcatggtacctgacaccgcagaggtgtgcagtggagctgaagcgggagtcttgcgtggttcagagaaggctgagagccagggctctggaagcaaacagaccttgtttgaattccagttccgccacttcctagtcatgagggtccctataagcatggctctgtccaacctgtcctctcactcccgtctcacaggaagaactgtctgccctgagagcagagcatcagcaagactcagaagacctcttcaagaagatcgtccgggcctcccaggtcagcgggcttgcggcactcagggcctgtgactgggtcctgaccccatccaacatgttcacctcggacccctcggcccttccaaagggactgtttgggtgttgcatggggaggggagtgccctcctctgacttctctgtttgacccccgaccccttagttggagagctgtgcaggggctccctggggtgtgccagggcacagcggcctgtcatgctggtgtgcatgtgctgagtgtgggtgaacagatacctcagtgtgtcagacatggacgagactcatgagggctttgacaaggaggccagtttgatttttgctgcaggggtcaagagaccttgggcaggggtgtggttaagcaaagacgctaacagacagcagatcctactctggaacaccaatttctgagatgagtatttcttgtatttgtcccttcttcctacacaggagtccgaggctcgcatccagcagctgaagtcagagtggcaaaggtactgggcgccaccagctggcctcggcctgctcctccccagccccacccactctccaggcaggactggggagcagagccgcagagcagagagttctgatcatcttgccaagcagatggtagggggaggggttgaaacccagctcaggacccctgcccagggcctgtctttgaggtgccatggaggttagcaggggggtcctgagggcggggggcaggctgtgtgagaggaccgggattcatttatagacacagcatcctttcttacagcctcacataactgccttctcatgccccagatgtccatgcttgtggaggatgtgagaggctgaggcagagtacattctggactctgggcttagaaagggagcaggctcagaattagctccttgggacaggcaggggttctgcagccagaacccccaggagaggccttgccccttctcaggttcacaatgagtgctgggcacccgctctcctgacgggagcccactagggggtcctctttcatctttggtgtggccttacctcccaccaaagagatccgaggcttactcttctctctctgggaccagcatgacccaggagtccttccaggagagctctgtgaaggagctgaggcggctggaggaccagctggccggcctgcagcaggagctggcggctctggcactgaagcagagctcggtggcggaagaagtgggcctgctgccccagcagatccaggccgtgcgggacgacgtgagtgggaaccaccagggccctgctggtccctctcctcctcctttgagacgacgtgtcctggggcctgcaaagcagcaccccttgcccctgcagcctctgttatgcccaagagactgtggcgttggccttgacacatgtgggctctcactgacaggcgttcttcctgtttttgttagtgcccatggagtgttcataactctttcctccagtggcctccctcctaccctatccctgctatccagctaagcactagccctgtcatagcagctcctgctgtccctgcaagccccccagggtgacacccctttgggttcctataggtggaatctcagttcccggcctggatcagtcagttccttgcccgaggtggagggggccgcgtggggctccttcagagagaggagatgcaagctcagctgcgagagctggagagcaagatcctcacccatgtggcagagatgcagggcaagtcggccagggaagccgcggcctccctgagcctgacgctgcagaaagaaggtgtgattggagtgacagaggaggtgaggcccacatgcccctctccacacacccacccacagctctcctccctgggagccctggacagtcccacactgccagctccctggcaggttccaggatggaagtgccaagcaggaggcttt

SEQ ID NO: 28493 - DNA, 2300 bp, Homo sapien
gcacttgcatctcactgaatttaacttggtattacatttttattattcatttaaaaattttttgagacagggtctcattctgttgtccaggctgcagtgcagtagtataatcataactcattgtaaccttgaactcctgggctcaagcgatcctcctgcatcagcctgtgaagtagctgggactacaggtgtacaccaccatgtctgtcaaatttttaaaaaaaatttttgtagagacagggtctcactatgttgccaggctggtcttgaactcctggcttcaagcaatcctcctgcctcagccttccaaagggctgggattacaggcatgagtcactgcacctggcatagtatcactttttttttttttttttttttttttgagacagagtcttgctaagtcacccatgctggaatgctgcgtcacccaggctggagtgcagtggcacgatctgggctcactgcagcctacacctcccgggttcaagcgattctcccgcctcagcgtcccgagtagctgggactacaggcgcgcaccaccatgccagctaatttttttatttttagtagagacagggtttcaccatgttggccaggatggtctctgtctcctgacctcatgatccgcccgccttggcctcccaaagtgctgggattacaggcgtgagccaccacgcccagccggcatcacatgtttaaccatctatttttgtatatattactttccagaccatggtctttccaattttattatatgtgctgccaaagtgagtaccagaccatgatcttattattttacaaaataatgacatgtcatctatgacttttccttttttcaccattaaagacattaaatacagttcaatttcagaaccatcttttttgtaaaaaagggtaagttaaaaaaatgaatatatcttgtattagcaacatttgcatgaagttaaaataaaaacagcttcctggtctgggagaggctgttggtgaggcaactggggtgatggggcagaggattttttgctggtttttgtgggctttttttttttttttttttttgagacggagtcttgctcttgttgcccagactaaagtgcaatggcacgatcttagctcactgcaacctctgcctcccaggttcaagcgattctcctgcctcagcctcctgtgtagctgggactacaggagcctgccaccatctccagctaatttttgtatatttagtagacacagggtttcgccatactggccaggctggtctcgaacttctgacctcaggtaatccacctgcgtcggcctcccaaagtgttgggattacaggcgtgagccaccacgtcccgcctgtttgtgtgctttttgagtcatgcaaatgtagcgcctatttaaaaaccagaatttctaaaactcagaacctctgctgctcagtagctccctggcctttatttgacagtttttatcacttctcttggcaatgattttgttgttaagccaacaacattctcaaattcatgacacactatcaaatgccaccctcagtccaaatgacatttattccattttctctgtgggacatccagctaaagaggaaaaagaacgtattttcaaattattctgtctcttagccatagttacctagggaaggagtgaaagccattgagagtccacagacagaactcgcagccctggctcccctgcccctgtaggaggcggggaaggagtgagcttcaggccaggagggtccacggccccctgcagccatcctgcagcttccagtcctcctcctggaccatccctgcactcagaccttctccccggcccaccttccttcctcctctgggatcagacttcggtactgtgtcctcagggaccttcctctgtggccggcacccagtgatccctggctcccagcacacccagctcagaggtcggcagcccctgcccacgagctccagccggccctgcatggccttatgctggaacgtctctggaatcttttccctttctttctgtgttggctgtgtcggggtggtctttgggaagcactatcatccaagggtccctcactccgtggctctctctctgcccttccaggctgagcagcgtgttatgtcccgggtacactctctggagcggcgtctggaagctcttgctgctgaattttcctccaactggcagaaggaggccatgcggctggaacgtctggagctgcggcaaggggctcctggccagggaggtggtggtggcctgagccacgaggacaccctggcgctgctggaggggctagtgagccgccgtgaagctgc

SEQ ID NO: 28494 - DNA, 2300 bp, Homo sapien
actcccccccgaccccagcaaggccagacccccctgtctgccaggacccccggagagggggaagcaggctgtgcaatggaggaggtaggatgtggcaactccatagaagtggttaggacagaattctggagttgcgcatcccagagatgaggagtcagagaggcccttcccctacctggatgctgcccctacgtctgatttgaattctcctttcattgctccatccagcagacactcagaccagagccaggctcggtaccaggctctggagagcttgtccatgtcctcaaagagcttgcagtctaaacctaggagtgataatggccagcaccgtggtctccaggagggtggaagagcaggagactcttctctttccagagcaggcaatggaggcccaggaaaggggactgttcttgtctggagttgggctgaagccgctttagcatgagggttttgcctttcctcaatcctccgaccccacagccttcctgttcctgcctcggtgattttgtcattcttgtctcgtttcctcttggtactttaaaagtaaaataacgactgttcatctgcccttagaagggctggcacagaaagagattcatcccaagctgtgcacctgctctatctgtacagttggcggatggggagccaaggaacaggacccccggagtcaggcagcattttactcaaacgctgagcactcgttccaagtctgagtaaggtagaagaatgagtggccagccctgccttcccacagctcaagtgcagcaagcaccgtccttaaaacagaagagctggccgggcgcggtggctcatacctgtaatcctagtactttgggaagccgaggcgggagaatcactggagctcaggagttcgtgaccagcctaggcaaacatagtgagatctcgtctctatttaaataaaatagaaaatctgtttaaaacaaacaaaaaatagaagagctgtcgtgaaacttgggtgctctgggtaaagcttgggaagaggcagggcctcccagcatgtctggaatccccaaattagcaacctgtttccttgtctgaaaaatgggtgtagaaatggccggctaagaggacaacggcactggtgccgggtgttgagcaagccctcgacagcctcaccgagagtgcaccaagggccacccgcgcgctgccgctcccagggctcccaccctcccctcggacgccggcctggtgaaccaggctgcaggcgcgcgtgggagcgctcagagctgtctcaggtgttctgagccgccagatcgggagtccagtgccctgctgagcccgagccccagcacaggctcccgtcgcgtcctcccgcagcccggggtccccgcccgcccagcgcctcccacgcgcggactcctaggctgagcgcgcagggcagcggggcccacgcgagggcggggcgagccggggctttgtgttcaaaccggccaatgggtggcggcggtgggcggtgacggccggcggggcctgaccaatgggctgcggcctgtcagcgttgactgacaggcgcacacatacagagtcggccacacgcgcgccgcccggccccactcgcgcagcgcgggcctccgccggccgcattgtccgcccgcccgccttgtcccgcgtcgccgctcttcgcgtgcccgcgcgccccgggcccggccgctgtgtcgccctgagcggagcgccgcccgcgggatccccacgcggaaagggggcgcgccccggcggcggcctggcctcggacgcccccggccgggctagaagccgccgcggcagcaggtgagtgcgggcgagctcaggagagggttggggggccgcggcccggcctgaccccgggtcaccgtcgggccactcgggcggggccgcgccgccaggcctgcttcctcctctccgggacgtgctgggccggatccagcctccacccgggtccgcggcccgcgccctgactcacctcctggcccccgccccgcctgccgcgccactggtcagccgggagggcggtgtctgcgggcgggacttcccgggcagcctcccgggaggaggagggcaaaggccgactgccccaacccggccccgggcagcgcctacgggttttgtgccagacaggccgtttccagggacaggcagttcccagcctctgcctgtcagaactcagggcctcagaggaaggcccgttttgttcagttctaaaacaaaacaaaacaaagcaatggggggcgcggtgtgacttagagagccaggaggcgcgcctttggtgacaatttctgcaggtttggcctgtgggaatg

SEQ ID NO: 28495 - DNA, 2300 bp, Homo sapien
gccttgacttcccaggctcaagctatcctcccacctcagcctcctgagtagctgggattacaggtacacaccaccatgcccagctaattattttctttttttgtttttcttttttagagatgggtggtggggggggggggtctcactaatttggccaggctggtctcaaactcctgagctcaagcaatccacctgcctcagcctctcaaagtgctgggattacaggcgtgtgccacagtgcccagcccctatctttctcttaaagggttacttgtgttacacttagggcccaccctgataatctaggataatctcatttcaaaatctttagtcacatctgcaaagtctttgcatgtagataacagtcacagattccaagcattagtaccgaattcctgtagcgaccattattctgcctgctcccagcccccagaggatgcagagtttaagaggggcctgccttcagtcagcctgtgggcatgagcctcacatatccactcagcacatcctgggaggggacctggactcccccccgaccccagcaaggccagacccccctgtctgccaggacccccggagagggggaagcaggctgtgcaatggaggaggtaggatgtggcaactccatagaagtggttaggacagaattctggagttgcgcatcccagagatgaggagtcagagaggcccttcccctacctggatgctgcccctacgtctgatttgaattctcctttcattgctccatccagcagacactcagaccagagccaggctcggtaccaggctctggagagcttgtccatgtcctcaaagagcttgcagtctaaacctaggagtgataatggccagcaccgtggtctccaggagggtggaagagcaggagactcttctctttccagagcaggcaatggaggcccaggaaaggggactgttcttgtctggagttgggctgaagccgctttagcatgagggttttgcctttcctcaatcctccgaccccacagccttcctgttcctgcctcggtgattttgtcattcttgtctcgtttcctcttggtactttaaaagtaaaataacgactgttcatctgcccttagaagggctggcacagaaagagattcatcccaagctgtgcacctgctctatctgtacagttggcggatggggagccaaggaacaggacccccggagtcaggcagcattttactcaaacgctgagcactcgttccaagtctgagtaaggtagaagaatgagtggccagccctgccttcccacagctcaagtgcagcaagcaccgtccttaaaacagaagagctggccgggcgcggtggctcatacctgtaatcctagtactttgggaagccgaggcgggagaatcactggagctcaggagttcgtgaccagcctaggcaaacatagtgagatctcgtctctatttaaataaaatagaaaatctgtttaaaacaaacaaaaaatagaagagctgtcgtgaaacttgggtgctctgggtaaagcttgggaagaggcagggcctcccagcatgtctggaatccccaaattagcaacctgtttccttgtctgaaaaatgggtgtagaaatggccggctaagaggacaacggcactggtgccgggtgttgagcaagccctcgacagcctcaccgagagtgcaccaagggccacccgcgcgctgccgctcccagggctcccaccctcccctcggacgccggcctggtgaaccaggctgcaggcgcgcgtgggagcgctcagagctgtctcaggtgttctgagccgccagatcgggagtccagtgccctgctgagcccgagccccagcacaggctcccgtcgcgtcctcccgcagcccggggtccccgcccgcccagcgcctcccacgcgcggactcctaggctgagcgcgcagggcagcggggcccacgcgagggcggggcgagccggggctttgtgttcaaaccggccaatgggtggcggcggtgggcggtgacggccggcggggcctgaccaatgggctgcggcctgtcagcgttgactgacaggcgcacacatacagagtcggccacacgcgcgccgcccggccccactcgcgcagcgcgggcctccgccggccgcattgtccgcccgcccgccttgtcccgcgtcgccgctcttcgcgtgcccgcgcgccccgggcccggccgctgtgtcgccctgagcggagcgccgcccgcgggatccccacgcggaaagggggcgcgccccggcggcggcctggcctcggacgcccccggccgggctagaag

SEQ ID NO: 28496 - DNA, 2300 bp, Homo sapien
atcttgcccacacctctaccatagcattggtagaatgaattattctatatctatttgttcacatggctgtctgttcactggactgtgccttccatgggatcaaggtcctcatcttactcctctctgaatcactagcacctgacgagggctgagctcccagtagatgctgtaactgcccaatgggttcaccttgcccactgcctagacagagccgatgtatcaagacagggggattgcaatggagaaaggtaattcaaacagagccagctgtgcgggagaggggagttttattattactcaaattactcaaacagaggaatgcagcggtgagatttgggttttggcagggtcatgttgactatggtacagaggataaattagagaggtgcaagactgcagccagggagtcccaccaggagattgcactcaggtagatgggattgtggtgttgtgcacatggagggtgccatgaacgtggccagaaaggctgtatcaggaaatagtgaggagtcgaaattggcatgcttgtgactggaagtgggctgttgtagtgggaagggtgaaggactcccccctgttttctgatggaggcaactgggtcgggggtggtgccatttactggaatggggaatgcaggaagagcagattggagggagatgatcaattcagtttgggacacactgagtttgaagggcttgtggaacattctggtgcacatggctaggaggcagttgaatatgctacccaagcattcagggatcagaggttttaaagataattttgtgggtaggggcttggcaagcgaggagtgttgattgattaagtcgaagatggaatactgagggggtcgaagtgaggttttcttgctgtcttctgttcctgggtgggatcacagaactgtttgagccacattactggtctgggtggtgtcagctgatccatcgagcgcagggtctgcaaaatatctcaagcgctgatcttaggttttacaatagtgatgttatccccaggagcaatttgggaaggttcagactcttgcagccagaggctgctgtgtgacccctaaaccataatttctaatgttgtagctaatttgttagtcctacaaaggcagactggtcccaaggcaggaagggagcctttttgggaaagggctattgtcaattttgtttcagagtaaaactataaactaaattccttcccaaggttcgttcagcctatgcctaggaatgaacaaagacagcttaaaggctagaaaggcaagatggagtgggttaggtctgatctctttcactgtcataatttcctcagttataattttggcaaagacagcttcaatgctagtaaatgtggcagtggggtttcaccccaagtactcatcacaataataaaggtttaaactacgaagtacccaactgaccctttgatctaccaatcaaataatagaatccgccagttcttcccctttccccttttccttctccgtactttcggattaattttccctcccaaggggaagaaaaggcaggctctgggcaactgtgtctgaaattaggtggtacaaatgtctcctagtgactagagctaggtgaccatacaagggtgtggcacagaggaaggagcccctgggttccttctccagggagattacctccatcctttaccaagttacttaacctctctgaactttagttcagatgggatgacgaatattatcacctaaaagtactgtaatgagaatcaagtgagatattaattgtacagccctacaaaaatgctagttattatcaggcttttcagatcccaataaagtagtggctaagtgtcacgacaccaacaagttgcatttgttatttcaagtgactaaaagaacctcccaaggcagtactgcttttcgaagtttgtttccctagaaaaagaacttcaatgtgtcccctgctcctcgggcacgcttaagacaactataagtgaagtcccgcctccctggcctctaaaccacgcccctgtccttgcaaacgcctgacttataagggcctttcactctgattgatacttttatccaccaataataagtgaaattctcgtcaacgtccggtgagggggcaggacttccttgctggttgctaagacactcttgtttcgctccttgacaaccctggcgggggttcgctggctgcggccccggctccggcccccgcaggagcaggtgaggccccggggcgcggcgggcagccaggcggggagggccggcccggagggagggcgggaggcaacgcagggcggaagaggcctcgcccgcc

SEQ ID NO: 28497 - DNA, 2300 bp, Homo sapien
ttgaaactccatctctactaaaaatacaaaaattagctgggcgtggtggcgtgcacctgtagtcccagctacttgggagactgaggcaggagaattgcttgaacccgcaaggcagaggttccagtgagccgagatcacgccaccgcactgcagcctgggtgacagagcaagactctgtctcaaaaataaaataaaataaaaaataaagtcattctaggagatcaacagaccagtttaaacacaatttgactccagcctctggacccatttatccaaactgtccccaaagtctcagggggcagctcaggtaaaggtggcaccatttggtgcccaagtcacagtggctctgctgctcttggcagcagccctctctcttggcatctcctgtccttccctggacttcctatgacagtttctcctggggatgctatctccgtgtttctgtcttcacggcacacgtgtagatgtaccaggagtcccgatgtctcatgcatccccaggactttagcagggcctaccgctggcctttgccttccaagagcccagcccatctctctgtccatgagatgcttcctccaagcccagctgcctgccctgggttttgaggttacgacttcagtgagcaccagcacacatccacgcacacacagcactcaggttcctggcatacagcgcttgtgtttgcttctctcctctttcacaactcaggtatggatgaaaatccctggctcctagagatgggtgaacagggtggacatcatcctaacatgtgtggagagagggaggtggagcacgtgtgcctgggaacactggacaaaatccccgtggctggagagcgtcccccagggttgtggcttcctgggaaacattccggtctctccccaccaccagcgctatgtgaagtacactcgaaaccacagtggtagccgtggtggtccagagatcctggtttgcgctttcccttcaagtcaaaaatgcaggcttggaagggagacagagctgggaataaccacagccctcccaaggcccttccagccctgggaatccgtattggtcaggaaagacctcatggaaaattggagctggggataaagtgtggaggatagtaggattgtttttaagtttttaattgcaaagttaattttcaacaaaatatatatagacatttttgacagaagaaagtaaaacgctcctctgccacccccacagcacagcccactcccattcctgctgttccttctgggcctggtccacatgcccaccaggcacgtggcaccgcttgccaacgaaggcagactgcagtgggggtggggggtttctctggacctgtgaggctctaagcccccaaggattcagaggagagaatttccatcatcctctgagatcacaggaagattctgtaatgagggtggcggggagtgaactctgctccttcagaaggttggaggtgggggtgacgggcaggtggccacagtataaacagaagttaggtcaaaatccgagcctccccccaacccccaacactggcctcttctccacctctaaccgctcccactccagccccatccacagtctggtccggtgaaacgtgcctaagctcgcaggcggctccaacgcagccacccggtgaccttggacagaggcctgacctcaggtgtctcagtttcctcatttctattgtgagcctgtccacggcaaggctcaattgcgaccgagcttgtggcgcgcccagtgcacagccccacccggaagaaagctccctcccgggtggatgtgaacataaccggcttggggagggggcccgagcacgggagggctgggatgggggtcacccaggagccccgccgcgcggccctcgggtcgccggcccctgcgctgtgaccgcggcgagataaggtcccaggcgctgccctcgctcctcgccgcatccccggcggcgcccccagccgggcgcccggcactgaacgggtgcggggctgggccggggccagggccggcccggggaagcgagtggggcggggccgccgcgcccgctccccctccccgccgcctgccgtcttctcctcctcccgccgcccgggctcagagcggcggcagcagcggccgcggcgacagctccagctccggctccggctccggctccggctccggctcccgcgcctgccccgctcggcccagcgcgcccgggctccgcgccccgaccccgccgccgcgcctgccgggggcctcgggcgcccccgccgcccgcctcacgctgaagttcctggccgtgctgctggccgcgggcatgctggcgttcc

SEQ ID NO: 28498 - DNA, 2300 bp, Homo sapien
cggaacagatactctccttgaccctccaaaaagggaccagccctgaggataccttcacttgggcccagtaacactgatttgggacttcccgcctccagagtcatcagataacaaatgtgagtcattttaagccactgagcttgtgttaatttgtgagagcagcaacacgaaactcctacacctttattctagcattagtcacactgtgtgacaggtgccgttctcactccactgacagctcctcagcctggggcacctttgtttcctgatggtttcacacaaagcctggtgcttcacaagggctcacaaacactgctgaatgaatcaacaagtggactcacctgcttcatcccccgcctgtctccgtcagcctgaacacacacacactgtcatacccactcctctcacctgctcacccaccaccacccacatctcccaggaggacatttctatttttaccacagcagctcaccttgggctggccagcaaatagctgtttccctggaacatactgattttaagtgaggagagggatttctctcaaggtaataattggacaaatctgctgggagaaaaagactaacattttgctatggtggatttgaaacccaagaattggcattgtagcacagaaacgcaaaaatctttcctaatgagccattgatgttcgcaagacacaaccctgactcttcacaatccccattcctccccaccccatctcagccccaaggtggtcactggaaggatggtgaaatctgtatttaatgacactgaaagatgtccactttatagcattaagggagaaaagcagattccagaacagtgtgaatagcgtgatcccattttgttaaaaaattaaatctacagacaatgtgtatgtgtatgtatatacatacatacataggtgtacgtgagtttatgtacgcatagagcagaggctggaagattggtgaagatgttaacaatggttttatgggggttatggacagttgttttatctgtatttttaaaattgttttacaaagaacaagactactaacataatgggaaataaagttcaagtaatttcaacatttaaaaagtggagcgttttgcgcggcagggctattttttgtgtgtccgttcctggacagccccagctcgatcccccgcccctcctcaagtgggaagctgggatctgggctccccagagcaatggcggaagcttcgcgcagctgcgggcggggagagggacgcggccaggtcggggggccgggaggggtgctgggaatcggaaaacacagatatgaccgcgaaggcggtttctgccgaatgaccagatgatgacccgctgtgggcccaaggcggagtgcggggagcccgttcctgcccgcggtccctctccctcccccactgccacaccggccccgccgaatcctccccggtctcctgggcgaggacaggtgccgcccgagaccccggccgcagacagatgcccacggtcactccggccttcctcggccccattcgccgcacacccccttcctgcggtggcgtttttgttttaactcttctgaactggttacaaaaccaccctcccacgaatacataaataatgggtggggggcgatgttttaaagaaattcccgcaaggcctggcaaggcaacagcaactgcatttctgctgcatcatatttaactgtttgcaggctgctgcgggagatgcgcggtggcggcgagactcgggctccacagcccttctccgcccggggcctggcgagactcgcgtggggattaagaggcaaggagagggtgtcagcgatcgggcgccggcaagatgtgagggggggtgataagcgtaaggccgcagcgtgcccacaagccgggcacccatcgggtcggccggcaattgctccctccgcccgcgcggcccctttaagagccagcgcgcgcccccgccccgcgagcgccgactttccctagcaaccgccccgggggagggggaggtcctggcaaccgcgcgccagccgcgaggatcacgtgacggcccgcagctggaacgcgagcgcgcgccccgccgcgctcccgcccgccggggcctgggcgctgcggcgcgtgcgcgagcggtgccgcaccggccgcgggcgcagggagtattatgggctgtgggtgccgctgagcaagatggagctgtctgcagtgggcgagcgggtcttcgcggccgaatccatcatcaaacggcggatccgaaaggtgagccgccgcccggggcgggccgccgctgtccgcagccggggccggggccgggggccctcggggcg

SEQ ID NO: 28499 - DNA, 2300 bp, Homo sapien
ggcagggggtagggcacataagtccctggggagctcactcagaggttccaggttgtggcccttatggaagttcctgggtccaggggctagagtgagactgttccccgctcatgtctgggctgcagacgcccaaccagtggctccccctgtccacccttggcaagggagggtcctggcctccctctctgctagtggggaccccccaacaccctgtcttctctcctctctggagctctgcctgggtgcatggcttgtacagtgagttactgagaattgaactctggacagtagctgggccccactttgctttaaacattttagtctgaggccttctttgtcatcagatgagaaggttcacagatgtgcagatgtgctgatagtctaacctgactggtttgtaaaactagaaagagaaacagacaatgtgcctgtttctgtgatgggccataaagtggatcttacagatttggagacattctggaagatctggacctgtctggatcagagaggggaggcaggcatgggccagtcatgaatccagtggggcttgggccagctggggcagcagggaggaggacgtgcccagggtgggtgagctggggagaccctggaacccaaggctgaggacccagagccaggagatgcaggagacgccccagggatgctgaacaaagcgctgtcccctgttgcagctctcctgggtctccccatagaaagctcatgtgggggctgtcctgaccatgggtccaggggtgtatttgctccaggggcatttgatgcattattgagccaggggaaaggccatcacactctgggcagcaggagccaccgggaagggttggggaagggttggatcctcccaaagttggtacaagtgtggtctctggcccaggtgggctgtgggtactgcggggcgtccagctgtgcatgcctctggtgtgaactgggaagggtggcctctggtcagactcacacaacacaccaagatgagctcacaccagaaccacctgagactcaaatggcagttgactgcccccaggggacatcttcttgactagaagagtccaacatctggagacagaatgggaggggtcctcacggcagagaacagggcctcttctagtctgtggcgcccaccaaaatggcagggacactgtgctgaggtgggaggattgctggccaaagacaggggggtctagtaagagccagaacaggggagcaggcaggacaggggacagcccctgggcccacagggccagcaccttccaggggcagctgtgctgggtgtagcaggtggacctgggaaaggacggcgccagacctgccgccaggactcaggggctcacttggggcaggagcacagtgtccctcacatttctgcagggcccagaggtgggagaaagggcacagggtggcccttctgacaggggggtgggggtgtgtccctgctggggactctgtttcctgggagggcctggatctctaggtacctttcagagcctttagcatctcctctgggtaatggggatgaaaacactcctccctctagtttacaattattagatacactgatgcataggaggatgcaggacctgctggtctcccatcttcacagccagggaagaagatgcaggaccctaacagagagcacaggatgcagcaggtgccagggagcctggaccaggcacatcctgcactggccacaggggaggacacaggggtggctgtcctggagcctgctctctggaccgctgagtgttattcagggtctttctccagggtgtggacacctgtcttctcacctgccccctggtctcctgccttccagattcctgtggcccacagggagcaaagtgtggccagctctacatccccattgtcactccacagtgtctggtggttcagtggtcagagtgggcacatcaaaaccaaagcttgcccagaggcatggcagagaacttccttgttctgacgctaatgagggtggcacactcggcctgagctggagaaggggtggggcagggtatcgctgactcagcagcttccaggttgctctgatgatatattaaggctcctgaatcctaagagaatgttggtgaagatcttaacaccacgccttgagcaagtcgcaagagcgggaggacacagaccaggaaccgagaagggacaagcacatggaagccagcccagcatccgggcccaggtatgggaagcccctccgagcacctctgcgcctcagcctcctctttgagcttttctgatgagcactcacctctcaccctcaaacccctggggcctct

SEQ ID NO: 28500 - DNA, 2300 bp, Homo sapien
atgcctggctaatttttgtaatttttttttttttttagtcgtgacagggtttctccatgttggtcaggctggtctcaatctcctgacctcaggtgatccacccgcctcagcctcccaaagtgctggtattacaggtataagccactgcactcagccatatataaccttcttcaaataaaattacacaggtggaaaatttttttctttctttttttttttttgagacagggtctcactctgtcgcccaggctagtgtgcggtgatgatgtaatcatggcttaagtgatcctccccgcctcaacctccctagtagctggaattacaggtgcacaccaccacatctgactaatttttttgtttttgtttttgtagacacggggtttcagcaagttgcccaggctggtttcgaactcctgacctcaagtcatccgtccacctcggcctcccacagtgctgggattactggtatgagctaccacaccttgcccgaaaacgttttcaaaataataaaatgggctgggcaagtggctcacgcctgcaattagaggcctggagacattaagtaaaccacccaaggtcacacagtaaggaaggggcagatctcagagtcgcctggctgcaaagctggtgtcccttccccactgtgccttaactgccgccttacagctgggttggaggatgcctccctggtctagggtcattattacattttcttttacaaagtatgtttctgataaacggaactgtttattttccaccgatggtcttatcctttgtccatctctttctgacggcaacagaaaacttcaccttccagaggagcgcctctgcctggctgtcccaccgtctgggaagtaaggagcgcctctgcccagcccccgcaccgtctgggaagtgaggagcgcctctggacggcccccgcaccgtctgggaagtgaggagcgcttctggacggctcccagcaaccccccaggtgtgaagtgacagccctgtgtgtgatctttctgccctccccaagtttgcattttcgacaataaaatttacttttaaattaaaagatttatactggggaagatttaaaaaaaaaaaaagaaagaaaagaaaactcaccttccaaaaacaaccactgggagtccgctttgtgcagaggttggacaagcttctgtgcaggtaggggcgctgctgctccccctaccacccacgcatcctcctccctgtctgcattcccgtcgtcgtagccagaggagttcagagcctctacagagagcacaacttctccagctggaacaaactccccttaaaggaatctatttaggaagattatttcaatgtacattcattcctccaaaatatgcttagatggacttaaataatcagaaagctgtgtgtgtatgtgtttcccgttttcttggcccacaaagaaccccttgagaggtccctgggcagtgagcctgtttatagacacccttctcccttccttggtgtcgcagacatcgcagtccctctgaggggctgacctgccccccaccttctggaagctgggaggttggaagaggggacgcatgccatggacccagcacacagctgggaactcgaggcacacctaagccttcccttgtgctgtgcggagtccacacttccttccccactggagtctcaaaacctcccctcactcaacagggtggtgctgctcaaagctctgggcacacattagggctggggagggggtggtggagagggggctccagcctgcccaaccaccaggcaacggggcacctgcccctctctcagctgggtctggacccgcctcccaggctcaggctgcaatgcctttctctttctctttgcaattccgttgggtcctgcccaggacagataaagacagagcagcctgtctttattggaggttcctctgccagcgggaagggtccggggaaaaccagagccagagccagagccagagaaacatgaagcaccccggggcctcccacaccaatgcctgagcaggaatggggaggggccatgactcataaggccctgggaggtcactttaaggagggctgtccaactgcaaggacgctgtaagcaggaagtgaaaccacagagcttcaaaaaaagagcgggacagggacaagcgtatctaagaggctgaacatgaatccacagatcaggtaccgctgcccactctgcctgctgggcccctcctgccccttcctgcctggtggtcctgctgggcctcaaccctggcctccccccgcccctgccccagccctgggctccctcccctctggctcccctgc

SEQ ID NO: 28501 - DNA, 2300 bp, Homo sapien
gagagacagactggggcaggagaggctgatcaggggttttgtcctgcccagggtggagcccacagcaaggccagaacaggtcccatgtcaggatgcaaagatggccagcagttggggaagaactgggccaggaaaggctgagggggccaggctaggctggccaggagccctgagcccaagggactttcttccctggcccctacccagcacagcctctgtctggagaggccaagttctgcttggctctgttgctggaaactgggggcttctctgggctctatgagctcaatgtgggcctcgctggatccacacacactgcttggaacatcctttcaagggtgccagtctccatcaccgcctaagcagtgggactcccccaggaatgacccacagccccttctcagcacaaaccatgtcatccacttcaccctgcatcccctctgatggaatccctccctgtctttgtccccatcacaatcacagtccttgctgccctgctgtccccaacttgaccgattcctagtcttagtggaaaatccttttctctgaagtttggagtaaataccatatttctataagtcaaaataatgacaattataccatgtcacagggaccttcccacattggagtgagtcctgctggtcttctcttccccactacttttggtggaattcattttggcctaagtctatatcacatttgggctcagcacaggttgtggcacagaatagaagtttctagaattatgggccacagatgggatgggagtaggggagttgatgagtagagcaggtcaatctccccttgaaggaagcacactcactcaggggcatcaggccaatgaccttggggctccgccggcccctcctccctgcccccatctctgtagcccctccctgcagggctgggtctggggtgagggtcctgaaggctctgaccttgggtacaaaattgatgggggctccaaatgctcagtaattagagaaaacacattttaatttaataattaatgcaatattttaaaacgcaaatttaatacaaatagatcatgatgaataaaagcaaagattttaataaagcctggcaggagagtgctgtcctgtgtatattggagctggggcaaaataaaacctcattgctcctgatctgtttgtatttaaatgggcaacattttgcttatcttgggatttttgcataacatctgatatttttaatattgcatagaaaatcatgcatcctaataaccggggttttggcgacccctctaatttcgtgctggaggcccccgcctccccagccccacctggtccaggcgctccctccctgttcaccacacatcacctcacactctgtttccttttctaggctaagaatcttctctgtggcttttacggccgccatgcggagctgcgcttcttggacctggttccttctttgcagttggacccggcccagatctacagggtcacttggttcatctcctggagcccctgcttctcctggggctgtgccggggaagtgcgtgcgttccttcaggagaacacacacgtgagactgcgcatcttcgctgcccgcatctatgattacgaccccctatataaggaggcgctgcaaatgctgcgggatgctggggcccaagtctccatcatgacctacgatggtaagaatggaaggttcaggtggggtggggtgggtgggggcaggagaggttcctgggaagaaaaggagaaaggccttggtctgctgcctgcagaaacgatggctggactctgggacctgactttggggtcgatgggaagagagaggccaggccaggagatatgggcccggggagggtggctggaagtggaagcagaacttggggatttccgaaagaaagagaactgggctggcccagattccaatgggaaggaagtacctgatgaaggagctaagtccctaggggagggagagggaaaggagggactgaaaccaggatgtgggaagtctgtcctgagagtcatgggcccttggtgctgccccctccccacaacaggagcgtgacttatctcccctgtcccttttcagagtttgagtactgctgggacacctttgtgtaccgccagggatgtcccttccagccctgggatggactagaggagcacagccaagccctgagtgggaggctgcgggccattctccaggtgagggcttcctccctctgcctggtgccccatcggcctccccctcctccccgctcccctgtgccttgccttcccctctgctcagagcctcctctgggttccctgctccccacaggg

SEQ ID NO: 28502 - DNA, 2300 bp, Homo sapien
ggggaaacctggacaatacccaggctttcttgggcagaggtccctgcggccttccgcagtgcactgtgtctctgggtactcgagactggagaatggcgatgacttttaccaagcttattgcctgcaaacacatttttaccaaggcacatcctgcacagccctaaatccattaaaccttgagtcaatatagcacatgtttctgcgagcacagggttggggctagggttacagattcacagcatctcaaggcagaagagtttttcttagtacagatcacaatggagtttcttatgtcttcctctttctacatagacacaataacagtctcatctctctttctttcccccacaagaacaaactccccttaaaggaatctatttaggaagattatttcaaggatacaatgtacattcattcctccaaaatatgcttagatgaacttaaataatcagaaagttgtgtgtgtatgtgtttcacattttcttggtccacacggaaccccttgagaggtccctgtgggccgtgagcctgtttgtagacacttgcttccaccgcttgatgtcgcagacatcgcagtccctgatgtagggtctggccctatggggcttagtgggtgttctccccgtgtgtggagatgagaaatcgtaaaaagtaaagacacaagacaaagagataaagcgaaaacagctgggcccgggggaccactaccatcaagacacggagatgggtagtggccccaaatggttgcgtgcactgttatttattgcatacaagacaaggggggcagggtaaggagggtgagtcgtccaagtgattgataaggtcgagcaagtcacgtgatcataggacagggggcccttcccttataggtagccgaagcagagagggaaggcagtatacgtcagcgttttcttctatgcacctatcagaaagatcaaagactttaagactttcactatttcttctaccgctatcttctgagaacttcaaagagggaccaggagtacaggaggaaagtggacaaggagcgtgaccattgaagcacagcatcacagggaggggtttaggcctccggatggctgcaggcaggcctggatactatccagcctcccacaagaagctggtggagctgagcgttccctgactcctccaagaaaagggagactccctttcgtggtccgctaagtaacgatgccttcctaggcactggcgttaccgcctgaccaaggagccctccagtagcccttatgcgggtgtgacagagggctcacctcttgcattctcggtcacttctcacaacagcccttcagcacctgaccctatacccaccggttatttcttggttatattagtaatacaataaagagtaatattaaaagctaatgattaataatatctacactaatgattgataatgtccatgatcatctctgtatctaatttgtattataactattcttattgtaagtatattctttattatactgaaacagtttgtgccttcagtctcttgcctcagcacctaggtaatcctccgcccacatctctgaggggctgaactgccccccaccttctggaagctgggaggttggaagaggggatgcgtgcgatggactcagcacacagctgggaactcgaggcacacctaagccttcgcttgtgctgtgcggagtccacacttccttccccactggggtctcaaaacctcccctcactcaacagggtggtgctgctcaaagctctgggcacacattagggctggggagggggtggtggagagggggctccagcctgcccaaccaccaggcaacggggcacctgcccctctctcagctgggtctggacccgcgtcccaggctcaggctgcaatgcctttctctttctctttctcttctttttgcagttccgttgggtcctgcccaggacagataaagacagagcagcctgtctttatcggaggttcctctgccagtaggaggggcccggagaaaaccagaaagagggccagagccagagaaacatgaagcaccccggggcctcccacaccagtgcctgagcaggaatggggaggggccatgattcacaaggccctgggaggtcactttaaagagggctgctcaactgcaaggacgctgtaagcaggaagagaagccacagcgcttcagaaaagagtgggacagggacaagcatatctaagaggctgaacatgaatccacagatcaggtacctctgcacgctttgtccgccaggcccctcctgccacttcctgccaggcggtcctgctgggcctcagccctggc

SEQ ID NO: 28503 - DNA, 2300 bp, Homo sapien
cagtgactgcgggctggtggggccgcccccgccactgccctgattcctcagcagaaggcaggcagggaacaaagctgaccccagagagccaggccatagcaggggctgaggatgcctggtgaatggatgcctgggagaaaagatggcagaattcacacatgagtctatgagacagggaaagaatcaataaaataaagaaggaaggggccgggcacggcgcggtggctcatgcctgtaatcccagcactttgggaggctgaggcaggcggatcatgaggttgggagttcgagaccagcctggctaacatgatgaaacccagtctctactaaaaatacaaagattagccaggtgtgggggtgcatgcctgtagtcccagctactcaggaggctgaggcaggagaattgcttgaacctgggaggcagaggttgcagtgagccgagattgtgccactgcactccagccttggcgacagagcaagactccatctttgaaaaaaataaaaataaaagaataaagagagaaggagaaggatagaagaagggaaactcaatgaataaaacaccctggggcctactatgtagccagaaaaatgaaaagtaaagaaataaaataaggctgtgcatgtggtttatgctcatagtcccagagctttgggagggtgaggcaggaggatcgcttgagcccaagagttcaagatcagcctgggcaacatggtgaaaccccgtctctaaaaaaattatttaaaaaattaggcaggtgtggcggcatgcacctgcatcccagcttatcaggaggctgaggtgggaagattccttgagcctgggaggtcaaggctgcagtcagcccagatcccaccactgcaccccctaacctgtgcaccagagagagaccctgtctcaaaaatgagtaaataaggaaacggcccggggctccaggcccgccctctgctcccatcgccccacccctgcactcctcctgctcctggtctgagctcccctgtcctcctcctcctccttcgccaggtggattctgagacccattgtcatgcagaaaggtgcttcctctcttggttctgcgacgacatactgtctcctaacacaaagtaccaggtcacctggtacacatcttggagcccttgcccagactgtgcaggggaggtggccgagttcctggccaggcacagcaacgtgaatctcaccatcttcaccgcccgcctctactacttccagtatccatgttaccaggaggggctccgcagcctgagtcaggaaggggtcgctgtggagatcatggactatgaaggtgagacgtggggggctgaggagagtgggtgcaggagggacagcatgaggggcagatggttctccaatgctgtggggcgggtcagtgtcccctgggtgtctgtggggaccgggccagcgcccactgcaactggcagcctggatacctgggctgggaggggagggcccagggccaggagagaggcctgctgggccctcactgttttctccttgttttttctcagattttaaatattgttgggaaaactttgtgtacaatgataatgagccattcaagccttggaagggattaaaaaccaactttcgacttctgaaaagaaggctacgggagagtctccagtgaggggtctccctgggcctcatggtctgtctcctctagcctcctgctcatgctgcacgggcctcccctccaccctggacccgctctgtttctgcctggtcatcctgagcccctcctggcctcagggccattccacagtgctcccctgcctcaccgcttcctcctcgctcttccagactcttcctgcagaggctcctttctgcctccatggctatccatccacccccacagaccccgttcctccagcctgcgtgcccctaacctggcttttcccatctccccagcataaccaaatcttactaaactcatcctaggctgggcatggtgactcacgcctgtaatcccccagcaatttgggaggcaaaggtgggagaatcgcgtgagcccaggagttccagaccaggctgggtcacatgacaaagccccatctctacaaaaaaaaaaaaaaaaaaaaaaaaaaagccagatgtggtggcatgcatctgtagtccaagctacttgggaggctgaagtgggaggattacttgagcccgagaggtggaggctggagtgaacagagatcgcgccactgaactcgggtctgggcaacagatagagaccctgcctgaaaataaatcgataaataaactcaacctaaacaggtgtgaatatatgtaa

SEQ ID NO: 28504 - DNA, 2300 bp, Homo sapien
aacagaggccaggagccagggaggaaaagcagtcaggccacacaacattgtttccgaaatggacttctctgcaagcctgactcctgagactgtgcattgtaccctgaaaccagctttatccatagcttctgcgataaatggctgtaagtcttggactccttgctccaaacgcagcgactcagcaatagaacctcccagctcccagcccttcctagtgcccatgggctttacatagggcaagagaacatttctccttctataattgccatctctttgctctctcaacatggtgaacaccatccggactccgtgtatgtctcaaattacaattctttctttgcaaatgaaatatgaaatttagaggctcttctaaacactttaaatttgatttgacattttcaaagcagatgtaagttttagagaatgagattctccataaaaatgaccctttcatgctgtggcctccatagaagatgtcccaggccaggtgcccacatggcaggcatttattttctcacagatctggaagctgcaggtccaacttcgaggggtgggtggggttgtttcctctgaggccgctccttctggctggcagggagtctcttccagccgtgtcctctgtggcctttcctctatgcacacgcacctctgggatctctctgcctccaaatatcatcttttttttttttttttttttttttgagacagagtgttgctcctcttgtccaggctggaatgcaatggcacaatctggactcactgcaacctccgcctcccgagtttaagcgattcttctgcttcagcctcccgagtaaaaggcatgcatcaccacacctggttaattttgtagttttagtagagatggggtctcaccatgttggccagactggtctcgaactcctgacctcaggtgatccgcctgtctcagcctctccaagtgctgggattacaggcatcagccactatgcccggctgggatcatatgttccacacatgtttgttcaataagcatggactgcaaccacctacatgaatattcatagctcctcctgtagcctgttgaatatgtatgtttagccaacctcttcagcataaagctcctgcccaaacccctcctgctcctaaatgtctgtctctggtgttaaccagaggctgctcttcccaggctgctggatggctaccttgcaggctgtcacccttaacaagaaataaagtgtcctttgcaaatgcatcccttgtgtaatttgtaggtcaccgcgccatgggaacacgctaccatgggaagggagctgtgagacgcgcagggaggctccagacaggctggcctgggacaccagccgctgcccttccataacatggggacaagagagggcaaaagttcagcccaacacggaggatcttcgggcaggagatggggaagaaggagaagcaggaaggaaagagctcagtgtgggggcgcgcatggcatcccggtgggacatctgaggcccacacccacctgctgtccctccctcccacggtggccaccgagggtgaaggcctggggggaggcagacgcctggccctttactctccctccctgtccccatggccgctgggtgggggccgtctctgggatgatccccgagggcaggatccgggagtccctgcagaggcatcagcctgtctgtcttgatggtggagtggcggctccagctgggcgggaccaccaggggaggggcttgtgctctgctggctcagcctggtgtggacccacctcccgggcgctggctgcaatgactttctctttccctttgcaattgccttgggtcctgccgcacagagcggcctgtctttatcagaggtccctctgccagggggagggccccagagaaaaccagaaagagggtgagagactgaggaagataaagcgtcccagggcctcctacaccagcgcctgagcaggaagggggaggggccatgactacgaggccctgggaggtcactttttttttttttttttttgagaggaagcctcgctctctcacccaggctggagtgcagtggcaggaacttggctcactgcaacctccgcttcccaggttcaagtgattctcctgcctcagcctccagagtagctgggattacaggcgcacgtcaccacacctggctaatttttgtatttttagtagagacggggtttctccatgttggtcaggctggtctcgaactcctgacctcgtgatccgcccgcctcggcctcccaaagtgctgggattacaggcgtgagccaccgtgcccggccgggaggtcactttaag

SEQ ID NO: 28505 - DNA, 2300 bp, Homo sapien
gcttaattgtggtacatttaaatgttgtctccaccgcaatgtgaggacggattatacggttgctttttttttttttagatttttgtttgtttgttttttgttttgagatggagtctcactctgtctcccaggctggagggcagtggcgcgatctcggcccactgcaacctctgccttctgggttcaactgattctcctgcctcagcctcccgagtagctgggatttcaggcacgtgccaccacacccggctaatttttgtagttttagtagagaccaggtctcaccatgttggccaggttggtctcgaactcctcactgtcatgcgtgtctgtatagaaaaccacctaaacaggctttgtgtaagcaataacgccatttattcacttgggtgcaagtgggctgagtctgaaaagagagtcagcgaagggagataagagaggggcagctttataggacttgggtaggtggtggaaagttacagtcgaaggtggtcatctgttgtcagcaggggagggggtcaccaggtgcatggtgggagaccatgagacccattgtccagaagaagaatgtcataaggtcgattgatcagttagggtagggcaggaacaagtcctaatggtggaatgtcttaaggttggttaatcagttaagggagaaactggctgtttcacttcttttgtgtttttttggctgctccagacttcttggctgctgcaggccatctggatgtatatgtgcagttcacaggggtcacaatggcttagctccggctcagaggcctgacactgacctcagatgatccacctgcctcggcctcccaaaatgctgggattacaggcgtgagccactgtgcctgcctgggatcatatgttacacgcatgtttgttcaataagcatggagtgcagccacccacatgaatattcatagctcctcctatagcctgttgaatatgtatgtttagccaaccccttcagcataaagctcctgccccaacccctcctgcttctaaatgtctgtctctggtgtttcccagaggctgctcttcccaggctgcgggatggctaccttgctgcctgtcacccttaacaagaaataaaatctcctttccaaatttatacattgtggccaggcgcggtggctcacacctgtaatcccggcactttggtacgccaaggcgggcggatctcctcagatcgggagttcgagatcagctgaccaacatggagaaaccctgtctctactaaaaatacaaaaattagccaggcatagtggtgggcggctgtaagcctgaccaacatggagaaacactgtctctactaagaatacaaaaattagcctaggcgtaggggtgggtgcctgtaatcgcagttacatgggaggctgaggcaggagaatcttttgaacctgggaggcaaaggttgcggtgagctgagattacgccactgtactccagcctgggtaacagagcaagtctccgtctcaaaacaaacaaacaaacaaaaaaacacaaaaaaacaaaagcaaacaaaaaaaccaaatgcatcccttgtgtaatttttaggtcaccgcgccatgggaacacgctaccaggggaagggagctgtgagacgcgcagggaggctccagacaggctggcctgggacaccagccactgctcttccatgacatggggacaagaggaggcgagagctcagcccaccagggaggaactccgggcaggagatggggaagaaggagaagcaggaaggaaagagctcagtgtgggggcgcgcatggcatcccggtgggacatctgaggcccacacccacctgctgtccctccctcccacggtggcctccgagggtgaaggcctggggagaggcagacacctggccctttactctccctccctgtccccatggccgctgggtgggggccgtctctgggatgatccccgagggcaggatccgggagtccctgcggaggcatcagcctgtctgtcttgatggtggagaggaggctccagctgggcgggaccaccaggggaggggcttgtgctctgctggctcagcctggtgtggacccacctcgcgggcgctggctgcaatgactttctctttccctttgcaattgccttgggtcctgccgcacagagcggcctgtctttatcagaggtccctctgccagggggagggccccagagaaaaccagaaagagggtgagagactgaggaagataaagcgtcccagggcctcctacaccagcgcctgagcaggaagggggaggggccatgactacgaggccctgggaggtcactt

SEQ ID NO: 28506 - DNA, 2300 bp, Homo sapien
aggggaggtcaggcacgcctcattatcaccccacccttttgcagtttagacacaactgaccagcagtaatgttaaaacagaatcataagacgggcagaaccagaacagactcttcatggcaatcagataccaaatcacaaccaggacctcaggccgtgccaggcaagggtgagatcacacaccccacacttaaacagtcaactctgttctgcctgccacaagatttttcttttgctctagcagctaaacaagcactgcctccagataaagatgaaaacaatcccacctcacccagcgcccggacacggagtaacagagcccctgctccacagccctaattcctactttccctgagcaagagactgatttctgtaactttctccagatcagaagaccacagaccatggactagttctgaatggtttacagacctggcaaattttggtgccttcatgtcctgaaaggaccttttgacatacaggcttaattgtggtacatttaaatgttgtctccaccgcaatgtgaggacggataatacagctgcttttttttttttttttttttaatagattgttgtttgtttgttttttgttttgagatggagtctcactctgtctcccaggctggagggcagtggtgcgatctcggcccagtgcaacctctgcctcccgggttcaactgattctcctgcctcagcctcccaagtagctgggatttcaggcacatggcaccacgtccggccaactttggtagttttagtagagacgaggtctcaccatgttggccaggttggtctcgaactcctgactgtcatacatgtccatatagaagaccacctaaacaggctttgtgtaagcaataatgccatttattcacttgggtgcaactgggctgagtctgaaaagagagtcagcgaagggagataggagaggggcagctttataggacttgggtaggcggtggaaagttacagtcaaaggcggtcatctgttgtcagcaggggagggggtcacaaggtgcatggtgggagaccatgagacccattgtccagaagaagaatgtcataaggtcgattgatcagttagggtagggcaggaacaagtcctaatggtggaatgtcttaaggttggttaatcagttaagggagaaactggctgtttcacttcttttgtgtttttttggctgttccagacttcttggctgctgcaggccatctggatgtatatgtgcagttcacaggggtcacaatggcttagctctggctcagcggcctgacactgacctcagatgatccacctgcctcggcctcccaaaatgctgggattacaggtgtgagccactgtgcccgcctgggatcatatgttacacgcatgtttgttcaataagcatggagtgcagccacccacatgaatattcatagctcctcctgtagcctgttcaatatgtatgtttagctaaccccttcagcataaagctcctgccccaacccctcctgcttctaaatgtctgtctctggtgttaaccagaggctgctcttcccaggctgctggatggctaccttgcaggctgtcacccttaacaagaaataaagtgtcatttgcaaatgcatcccttgtgtaatttgtaggtcaccacgccatgggaacacgctaccaggggaagggagctgtgagacgcgcagggaggctccagacaggctggcctgggacaccagccgctgcccttccataacatggggacaagagagggcaaaagttcagcccaccacggaggatctccgggcaggagatggggaagaaggagaagcaggaaggaaagagctcagtgtgggggcgcgcatggcatcccggtgggacatctgaggcccacacccacctgctgtccctccctcccacggtggcctccgagggtgacggcctggggggaggcagacgcctggccatttactctccctccctgtccccatggccgctgggtgggggccgtctctgggatgatccccgagggcaggatccgggagtccctgcggaggcatcagcctgtctgtcttgatggtggagaggaggctccagctgggcgggaccaccaggggaggggcttgtgctctgctggctcagcctggtgtggacccacctcccgggcgctggctgcaatgactttctctttccctttgcaattgccttgggtcctgccgcacagagcggcctgtctttatcagaggtccctctgccagggggagggccccagagaaaaccagaaagagggtgagagactgaggaagataaagcgtcccagggcct

SEQ ID NO: 28507 - DNA, 2300 bp, Homo sapien
tgcttctgaatgggccgcctcccccatctgtcccagcccaggtcccctgctgagactctcccctgaaagtcatggctggggtggtgctcccggccctgggagggtgctccctctgtgtgcttcccgccattcctgaactctggaactgggagaattgaaccaaaggatgagtagagcaaggtggaattttgttcacagggctttgatggattttctgtaagatttactttgcttaaataccaagtcttaggagagggtgtggggagggaatggtctctgaagcacaggataaatcatgtcttccaaggatgtctccactgtgggcagaggaggatgcagatgaccccaaacacacgctcctcctccactatcagcattcactgtttataaatgacaccagtaacatggaatatagtggccgggtgcggtggctcacacctgtcatcccagcactttgggaggctgaggtgggcggatcgcctgcggtcaggagttcaagaccagcctgaccagcatggataaaccctgtctctactaaaaatgcaaaattagctgggtgtggtggcgggcgcctgtaatcgcagctacttgggagtctgagacaggagaatccattgaacccaggaggcggagtttgcagtgagctgaggtcgccccattgcactccagcctgggcaacaagagcaaaacttcgtcttgaaagaaaaaaaaacaaaaacaaaagaaaaaacatggaatatatgggaaaaaaactcaatgatcaggaggaatgttgttattttaaaatttagtaagaagagagcccggtccccaatggctgcctcctgcagggccagtgatacagagactggacagggctggcctggaaaggggcccccactccatttgtccccagctctgtggcctgggcaggttaccccgcctctctgcgcgtctggcccctcctctgtaagacgggaatggcccctgccagcctagggcagcctcacatgagctcacccccgcgcagcacttagaagactggcctgggcctcagaattcggttctaccatgatttaacaataataatatacagaggtgaaatgtcaggaaggaactgagctgaaaggttaaaagctgttattttggggtgaagagttttattctgtctctctctctctttttttttgagacggaatttcgctcttgtcgcccaggctggagtgtagtggcgcgatcttggctcactacagtctccgccgaaattctcaggggaggggagggatgggggaggcctagagccgtccagggggctgtgtttagtggacatcagcccggagggcccccaggagtgctctctacattggctggtttctctcttgtgtcttcagaaacacagtggagcgaatgtatcgagacacattctcctacaacttttataatagacccatcctttctcgtcggaataccgtctggctgtgctacgaagtgaaaacaaagggtccctcaaggccccctttggacgcaaagatctttcgaggccaggtaccacccggactccaatcactttgcaggcaggagctaagccagctgggaaagcaaaccacgcactgataagtgaagtgcccggcggcgggctatccagtgtgtccttctctcccacactttccaagtccgtggccctgaccttcctgctggaccgtcctgggatcggatcgtggagggggtttgcctctgcacaaaaggccttgtgtttccgtttttcttttcttttcttttttcttttttttttttgagacagagtttcactcttgttgctcaggctggagtgcaatgacgcgatctcggctcacagcaacctctgcctcctgggttcaagcgatgctgtcgcctcagactcgcaagtagctgcgattacaggtgcccaccaccacgcccagctgattttttttttgtatttttagtacagatggggtttcaccatattcaccaggctggtctcgaacttctgacctcaggtgatccacctgcctcggcctcccaaagtgttgggattacaggtgtgagccacagcgccggcctaattttaatatttaattaatccaatgtggctaacatattacttcaacattaattaacataaaattcttgacaagataatgaagtttctttttcttgtcacaccgagtctttgaaatgagctgcgtgggtcacgtacagtgggtggctcgcacctctaatcccagcactttgggaggccaaggcgggcagatcacctgaagttagatattcaaaaccggcctgggcaacatggtgaaatc

SEQ ID NO: 28508 - DNA, 2300 bp, Homo sapien
cctagggcagcctcacatgagctcacccccgcgcagcacttagaagactggcctgggcctcagaattcggttctaccatgatttaacaataataatatacagaggtgaaatgtcaggaaggaactgagctgaaaggttaaaagctgttattttggggtgaagagttttattctgtctctctctctctttttttttgagacggaatttcgctcttgtcgcccaggctggagtgtagtggcgcgatcttggctcactacagtctccgccgaaattctcaggggaggggagggatgggggaggcctagagccgtccagggggctgtgtttagtggacatcagcccggagggcccccaggagtgctctctacattggctggtttctctcttgtgtcttcagaaacacagtggagcgaatgtatcgagacacattctcctacaacttttataatagacccatcctttctcgtcggaataccgtctggctgtgctacgaagtgaaaacaaagggtccctcaaggccccctttggacgcaaagatctttcgaggccaggtaccacccggactccaatcactttgcaggcaggagctaagccagctgggaaagcaaaccacgcactgataagtgaagtgcccggcggcgggctatccagtgtgtccttctctcccacactttccaagtccgtggccctgaccttcctgctggaccgtcctgggatcggatcgtggagggggtttgcctctgcacaaaaggccttgtgtttccgtttttcttttcttttcttttttcttttttttttttgagacagagtttcactcttgttgctcaggctggagtgcaatgacgcgatctcggctcacagcaacctctgcctcctgggttcaagcgatgctgtcgcctcagactcgcaagtagctgcgattacaggtgcccaccaccacgcccagctgattttttttttgtatttttagtacagatggggtttcaccatattcaccaggctggtctcgaacttctgacctcaggtgatccacctgcctcggcctcccaaagtgttgggattacaggtgtgagccacagcgccggcctaattttaatatttaattaatccaatgtggctaacatattacttcaacattaattaacataaaattcttgacaagataatgaagtttctttttcttgtcacaccgagtctttgaaatgagctgcgtgggtcacgtacagtgggtggctcgcacctctaatcccagcactttgggaggccaaggcgggcagatcacctgaagttagatattcaaaaccggcctgggcaacatggtgaaatcccatctctactaaaaatacaaaaaaaaaaaaaattagccaggcatggtggcagtcacctgtaatcccagctactcgggaggctgaggcaggagaaccgcttgatcccatgaggcagaggttgtagtgagccaagattgcatccttgcattccagcctgggcaacaagagcgaaactccatctcaaaaaaaaaaaaagaaatgagtggtgtatttttcaggtgcccaggtctctaatcagagccccatttcaagtactcagtagtcccttggccatgtcaccccccccgacatggacagtgcaggtccagtgggctccccactgactgcaggcagggaacaaggcagaccctagagggccaggccacagtaggggctgaggatgtctggtgaatggatgcctgggagaatggatgctagaattcacacacgaggccatgaacagggctgggaaaacttccaaactcagggaagcacgtgtcttggtgcaccttgtgatgcttcaacagcaggactgagatggggacatttacaatgaacagaaatgtatgggctcgagttctggactctgggaagtcccctgtcaatgcaccagcaactttccagggcctgcgagctgcacagtcacgtgggggtgaaggttgttgccagaagctcaggggatgctccagacagagtggcctgggatgtcgagtcactgctgctccgtgacatgggggcaagaggaagcagtttagtctgacatactgcccccccagctagagggcaagagacagaaagaggggctgaagtcgcccttgaataaccacagcagtggcacccacaaaggtgcagttcccacagcctcatagctgcttgtaggtgccacctcttaaggccattaccatagcaattaatactgaacatgagctttggagcagacaaacactcaaaccgaacagggggatggaggaaaggagcttcaatggcaagatc

SEQ ID NO: 28509 - DNA, 2300 bp, Homo sapien
cacaggcccgtcctagacaccacagggtctctgctgcaggaattcactggaggagtagtgggaatgctgcctgtgggaaggaccaggaaagggttccgccttcctttccatcctccctgcttctcagcctgggagactcagctctgtgattaaccagcactacagtgtgcagatctgatgtctctcctggcaggaccccgctcattctggaatcttccatggactgtagccccaacatttaggacagatagggtggaggggatgccattcccaggaaccttctaaattctcacccaagctcctgtgaccccaggggccatgcagggtctagagggctgtcagggtgtgcagggcgggaggatatggagggacaagctgggcaaggttcaatgggactccttggtgtggaacctagactccgcagtgactgcccctagtcctcgcccttgggattcaactttcctaggggttctttggtttttctttttcttttcttttagacagagtcccgttcttgtcgaccaggctagagtgcagtggcacaatctcggctcgctgcaacctctgcctcccaggttcgaatgattcccctgcttcagactcctgagtagctgggattacagatgcccgccaccacgcctggctaatttttgtatttttagtagagacgaggtttcaccgtgttgcccaggctggtctcgaactcctgacctcaggtcatcagcctgcctgagcctcccgaagtgctgggattacaggcgtgagccacagcacctggcctggctctttggtgtttatgatctgaagggtgttggttgatatgcatgaagacgaggacatgggttccagaatgcaaatgtgaagtccaggtccttcatctctgacctgggaggccctttaggagcagtaagtcccctccctcgtgtctcctctcctgctcctttccatggagcaatgaagaacctcaaagtagctagctgtgggggagaagggacacaggaagtcctggccagcactccagctctgctgttgatttgctgtgtgacgtggggacagtatcttagcctctctgtgcttgggacctcctctgactgtcaggatcactgccctcccctcccagtgctatctggggactgggctagataatgggcactggatccgctggagatgcagtcctgagcctgaccccagtgctcatttcacatcaggctcagggtcctgccaggaggctgaatgccaaaggtcagtggggtggtggggagggggctgcagcctgccctgtccaccaggggagtggcatctggtctatggtgtcagccctggtctggatccctgctcctttctgtggcttctattcctttcatttattttagtttagtttagtttttgagacggagttttgttcttattgcccaggctggagtgcggttggccaggttgattttgaactcctgacttcaggcaatccacctgcctcagcctcccaaagtgctgggataacaggcaccgtgaccagccatcaattcctttcttttttctttcttttttatttttatttatttatttattttttgagacagggtctcgttctgttgccagggtggagtgcagtggtgcgacgtcggctcactgcaacctctgcctccaaggttcaagcaatttccctgcctcagcctcccaagcagctggaactacaggcgcaggccaccaaacctggctaattttttgtattttagcagagacggggtttcaccatgttggccaggatggtcttcatctccttaccttgtaatttgcccacctcagcctcccaaagtgttcggattacaggtgtgagccaccgcatctggcctttgttcttttgtaaactatacctggggagggagttgagtctggctgtacctggagagggaattgggggtgggaggatgggaggtgagccacctccatcagacttcccctgccaagcccgaggaaatagagaaagaaaggagcctgagggatctgaagcaccccagggccctcccactccagtcccacaaaaggaagagggtggagccaccctcatcaagcagtgactttttgtgacttttgggagagctgaccttttgtgacttttgggagagctgccaaaagtgaaacttagtgcctcagacaagcaggggcaagtctgctaaggaagctgtggccagaagcacagatcaggtactgccgcccactctgtccactgggccctctgctgccacttcctgcctggcagcccttctgtgcctcagccctggcctcccgctgccccagcc

SEQ ID NO: 28510 - DNA, 2300 bp, Homo sapien
taaaatttatatttttattttcattgtttttgagctggagtcttgctctgccatccaggatggagtgcagtggtacgatctcggctcactgcaacctctgcctcccaggttcaagcgattctcccacctcagcctcccgagtagctgggattacaggcgcccgccagcatgtctggctaatttttgtatttttagtagagatggggtttctccacgttggccaggcttgtctcaaactcctgacctcaagtgatctggccacccaaagtgctggaattacaggcgtgagccactgtgcccagccttaaagctttgtttttaaaacctaagacactggccttaaagctttgtttttgaaacctaagacacaaacacacacattggcctaggcctacacagggtcaggatcatcaagacgtcactagatgacaggaatttttcagttccgttgtaattttatgggtccaccattacatgcgcaggccgtcacggacagaaatgttattcggcacttgactgtacatatattgtttttaatggaaaagtttttatgtttgcgtcgatggtgagtgatactggtttttccatttatggaagtcatagtttgcttttaaaataatttaaaccaaaaaagctcctctaaaggcagatacgaagtaaacaggagtgctagtggaacgagggtgtggtgggtgtcaccacggtggttccacagataggtgagctctggagccgctgcgctgacatcacagggtctgccccagcaggagggtgctccctggctgggtggcgagggtagaagatcccctgtagcattacccgggggcctgcgctaggcctgctgaaccattcagccactagacatttaccaaatacctgctgtgtaccaggcccagagacaagggaacttcagacctggctgtggcctgggtggggtgcactgaagagggagactatgctggggatggggatggggtttggagggcggggaggaacagcaacagcagcaaacacagtgcgctgacgacacatcaggcacgctgttactcttgtaacaccctctaaacacttggaatacacatctcatcagcacaagagtcctttacagagggggacattgaggcacagagctgttcaggaagttgctcaaggtcgcacagctagctaggggcagagatggacttgaacccaggccgtgagcctgtccccagagccctggctccttttcatcctctcttgcctggtgtggggcttacaggcgccctctctcctcctggcacccgagggtctctagtgattgtggagtctaacaaggagttggacccagtcacattgtagagtgatatgaaccaggacaactctggtgttgctggagccctcaggaggcccaggctgggtctgtccttgaagtaggtgacaatgacaccttaccaggacagggtgaaggcacacttgcagtgggcactgggtcagcagcagtggcctctgctggtgcacctgcccagtagaagcgatggctctgaccttttttttttttttttagagtcttactctgtcacccaggctggagtgcaatggtgtcatcttggctcactgcaacgtctgcctcttgggttcaagcaattctcctgtctcagcctcctgagtagctgggattacaggcatgcaccaccacgcccggctaatttttgtatttttagtagagatggggttttgccatgttggccaggctggtcttgaactcctgacctcaggtgatttgcccgcctcggcctcccaaagtgctgggattacaggcatgagccaccgcgcccagccccaactctgacctttcattcctctccccaggtacagcacgtgggagccagaagagcacatcttggacccccgcctcgtcatggcctacgaggagaagtacggtgtcctcggcaccgccgggtggggcttagggccggctcagaggcttcccaggagcctgctgctggcttggcaggggttgttggggcagggcaggggtgtccgatggggcaggccagcccagcctgcagctgggtgaaaatggtgggcactgagtcccagggcagctgaggaccctggggccctttcctgttgttgggtgatctcggtcacttcctttacccacccgggcctcagtctctctgctgtcaaatgggccaccctgaagagtacacccatttcccagggtgaaacctcagaggggccgtaagaggtttctgttccagtgaagaatgttaaaatgcttcacaaagatgccctgtgtgctaggaggcggcactgcc

SEQ ID NO: 28511 - DNA, 2300 bp, Homo sapien
tttaagatgatttgcatacaaatgtgaaattgttctatttttctggtgaattggacacttttcattatgaaatgaccttatttatctctagtgatgtttttccctcgatattaaaataactgcaccagccttcttttcgttagcatttgcgtggtattttccccccatgtgtttacttttgaccatcactagctttatgttttggaagtgtctcttgtgggtttctcttgtaaactgcatctagctatttatgcattctgataatctttgtattttaactgcaatatttagttgcatttattgaatcacaaaatattcgaatttatagctatcgtctatttgtcccctccctgccccgtcttgtatttatttttctctccattcttgcctgctttacagttgtttgggttggtttaatcattctttttcctcctccaataatttggataactatacacagtatttccagtcctacagtgtttatcccagtaatgacaatctggattcttaaattcgtcaaagtgtatttggtatctatcttcaccttcctcctgaagaatataaggatcttagaacactttaactccattcacccaagtaaatgccatcactgttgtgtattttaaatctgtttttatccagaagtcattgttattgtttcacactatcgctgttcttcatttttctttattcccagttgcatcagacctccgtctgggatcatctttttcctgcctgaagttccagctttggaatctccctccggagggtctaccagtggcaaactcttaagtttttgtatttgtaagtgctatgatttcacctacgttctggatacatgtgcctcatactgggtacataattcttgaaatacattttcactgaatatataattctaagatgatggttattttctctctggctttgttgctcttgatgaaaagtcaggtgtgaatctattattctctttttctatgtgccagaaagaggtgttggattttattgtgagggaaatagggaggaaaatttttaagcacagggtgaccccgtcagatctgcattttagaagcacactctggcactgtgtggctgagatcggagggagggcagctccgcgaggtctctgctgtggtccagagaaaagacggggcgaacctgggaggtgggtgcggtgagggcaggcagacccgagtccccgaggggatgccggagcgacagaagttggggtcagtacaggaaggagcagggacgacgccgggctcccagtgaggaatggaggcgcgttagcgaaaaaggaaggggggtggggaatcaagagttcgtctcgtgccacaaatggttgagcccccactaagcacctagcgcccagtacacgcgggtttggggaaggctggggcagcgcggcggcaaaatccgtccccgggggacctcagctccaccgcggccgctcctgccgcgaacgagggcccggcccgggagccctcgaggcagcgcccgcgtctgacccgtgcgtctgggcaccgaccaccgagggtcgggtggatggacaaatggaagggcggatggaggggtgggtggacggacgtggagacactggccaaactgcgccgcggagaaggccggattagggagacctcggccctgcgacgtccggacacggtgggaagccttttgggtcccggctctcctgcaactcgaggggctgcgcctcgggcccagtctcctccgctgcgggaggtgagcaaatggcctccccgctctgagccttgactttgtcgtcggctccactgggccctgccacttcggcccctggcagtcaccgggaggctatgaggcgcccgcctgggtattaaggatcacgtcccgccccggcgtcacagcaagacggggcgcgcgagcctccgccccgccccagccggtgaccgagccaaataagtcccacggcagcgctcgcggctcgcggcccgcggcccaatcgcaacccgcgggggcgggccccgggggcggggttccgatgggggcggggctcgggggcggagctgaccctcagggcgcgagccgagcccgcggccgttccgcgcgctcccgccccgccccctccttgcgcgcgctcgctcgctggcgccgaggaaaacgttgcgcaggttcaaaaatggaacgtcggcggcgtgagggagcgcgagggggtgtgcgcgcgtgcgcgtgcgcgtgcgcgcccggacgagggtgacggggaccccgccagccccagcatcgcgcgccgcagccgcggccccgcagctccgcccccggcccggccc

SEQ ID NO: 28512 - DNA, 2300 bp, Homo sapien
aaacatctgagggagcgctggggtcggagccgtccccacccctcccagcctcacgtagccgtgagttggcaagtctacccggaatccaggtgggaaagggggcggggcaggacgacgcgcgcggtggaggggaggagagggcagccgggagcgcggcgtgactgggtaccgtcccacctccgcccggctgcggccgggagtccgcacctcgcccgcacctcgccggctcccggggagggtcggcccctgcggcctccagccaggcgcaggaaggaggcagcggcggcgaaggggttaaggcggagggctcggaggccgcggcccggccttgggctgccgccagcgcaggttgttttgaccacggaggagccgtcgccgtctccttttgttctcggggctcctcgagggccgcaggccgcccgcccgggggccccgcccttccgcggccgccccccgcggcccgcacccgggagggaggacgcggggctcggccgggccgccttcaggcccctcccgacgccccctctccgcctctcccgcagccccccgggccgcggccagctgttggggagggggtggccggccggccccagctgccgcctcgcctcgccgtgggacctgggggctgggcccggtgccagggcgtcctgggaacggcggcgccccgtggctgctctccgcagcccaccccgcccgggcccccgactcgctcactcaccccacgcatgcacactcctggccggaggcgatgctgcgctccggcgggcgggcgcgcagagcgacgggcacgcactaccgcggccaggtcgcgcgcccgcctctgccacgcccgtgcacacgcgggacacacgcgcgcgcaccgcacacaaacgcacgcacggcccctgcacgcgcggcctgagcacacgtgcgcgcacacccacgcacgtacacaggcacgcacgggcccccgtgcacccagcgcctggtgctcgcccccgcgcaacaggtgggccctccgtgggccctggcacctcaccacctctgtagcggccccatttccttcctggcgtcctgtgagggagggagaacctcccatcagcaccacagcacctacttttttttttgcctcgtcagcccgacgcccctcaaaccttacccatctgtgactcctttttttcaaccacctccgcgtggtggaaaatggtggtgatgtgactctgaggggcactgagctgtccagagcgattcccccttcacataagccttcatttgaacctgcaagactggagggacctggcgtgtgcaaccgcggagggggctcccacccctggctgttgcattctcttggctgatcccagcgtgccccggggaggccgctgacagctggatgtttccccagcctccccttaccatttccagcttcgtccagcacctcctccttctttcccacagctccacgggctcgtgtatctggggtggaggctgtggcacagaaactgcctttctcctcactttagtcacagcattcttgaacacatggccacaggcgcgatgtatgtggcactttgcagtttatgaagcactttgctgctaagcctgagtgagcctcaggctggccctgggggaggggacctgcatggggatggaaccacgcaggggtcagtccaggaaggagctgtaatggccagtgctgggagagtcagggcaggcctgctggtggaggtggccttggagctgtccacgtcctggtcgtgctcggactaatctttcagcagacggcaggcagccgtgaggcagggctgggtggagggcctgccgaggcctctgaggtgccatctccaccagctgagctggcttccaggagggcgagtcccactgtcacgtgacgcgtctggcctcagcacacttcttccgggaaagagtgaagggccccactgccctttgccatccagcttcctctggctttgctaatggccctagggggcaggagaccaactgctggaatcccagagccctggaggtgtgcaagggcaggtcaaacagaatttggaggatctggtgcaagagccaggaagagagagagagagagagtgtgtgtgtgtgtgtgtgtgcgcatctgagagagagagagagagagactgactgagcaggaatggtgagatgtttatcatgggcctcgtaagtacctctccacgtcttgtcttcccctccccacattgaggagcctcttctgtgacaactcttcctatgttctggtttatttcattgtttattacctgctttctctactggagtgtcaaccccattagagagctttc

SEQ ID NO: 28513 - DNA, 2300 bp, Homo sapien
aacgatccacagtctcctgagtagctgggactacaggagcttgttaccacacccagctccagtttataaattcatctccagtttataaaggaggaaaccgaggtactgagaggttaaaaaaccttcctgcagacacttgtccagcaagtggccactccaggatttggaccaaggtgatgtgtcttcaggctgtgtctctgccactgtgccacgctgctgggtggtaggcagcagtgggtgggtgcctgcagtggtctgtaaagaccacctgagatgtccttcctcctctgttccaccctgtccaggtccaagaagacagtctatgaagagagagcaggtgtgactctctcagtgtgctcctctgtgagaagcaggctgacatcccaaagggaagggcggataacagagacagtgcaagcggaggagatgagggtgcctcaaagccgggaggctgggtgatgcaggagcctgcgtgtcccgaggggggtgctgggcccagtgtgagtacgtgtgactgtgactgagacagtgtgactgctgaaggcagggacacagcagctccctgactgggggcagaaggcgttaactgtgtgaaggctggttgtgggtgggtgggctctgggcctcgaacccgggggctgagggagatagtaaacagcagggtgactgacgggaagatcatgttggtagccctgcgaagatgctgcagggctgtgggggtttgtgtgactttgcagttcaacaaattcaaattcagccaacgctggcagggcctgttgtgccaggcaaccagctaggaggaggagactcggacccagcttgcagctgaagggcgctggctgccgggttctgtgggttcaccttgcggtgtcttcccttgctaacactgagtccttacaatagccccatctccaggttgaggctagatggaggggacagagggaagtgacttgcccaaggtgacccaagctcccgagtgccagggcaggatctgaattcaggctctcagactgcagagcctgagtccctccctgccatgcctgtgccagggtggaaatgtctggtcctggaggggagcgtggactcctggccttggctctggagacatccccctagaccacgtgggctcctaacctgtccatggtcactgtgctgaggggcgggacggtgggtcacccctagttcttttttccccagggccagattcatggactgaagggttgctcggctctcagagaccccctaagcgccccgccctggccccaagccctcccccagctcccgcgtcccccccctcctggcgctgactccgggccagaagaggaaaggctgtctccacccacctctcgcactctcccttctcctttataaaggccggaacagctgaaagggtggcaacttctcctcctgcagccgggagcggcctgcctgcctccctgcgcacccgcagcctcccccgctgcctccctagggctcccctccggccgccagcgcccatttttcattccctagatagagatactttgcgcgcacacacatacatacgcgcgcaaaaaggaaaaaaaaaaaaaaaagcccaccctccagcctcgctgcaaagagaaaaccggagcagccgcagctcgcagctcgcagctcgcagcccgcagcccgcagaggacgcccagagcggcgagcgggcgggcagacggaccgacggactcgcgccgcgtccacctgtcggccgggcccagccgagcgcgcagcgggcacgccgcgcgcgcggagcagccgtgcccgccgcccgggccccgcgccagggcgcacacgctcccgcccccctacccggcccgggcgggagtttgcacctctccctgcccgggtgctcgagctgccgttgcaaagccaactttggaaaaagttttttgggggagacttgggccttgaggtgcccagctccgcgctttccgattttgggggcctttccagaaaatgttgcaaaaaagctaagccggcgggcagaggaaaacgcctgtagccggcgagtgaagacgaaccatcgactgccgtgttccttttcctcttggaggttggagtcccctgggcgcccccacacggctagacgcctcggctggttcgcgacgcagccccccggccgtggatgctcactcgggctcgggatccgcccaggtagcggcctcggacccaggtcctgcgcccaggtcctcccctgccccccagcgacggagccggggccgggggcggcggcgcccgggggccatgcgggtgagccgcggctgcagaggcctgagcgcctgatc

SEQ ID NO: 28514 - DNA, 2300 bp, Homo sapien
cttccatttccccatctgtaagataggaataacacatctcacaggagcatggagaggctacaggtagagtaagaaaaacactagctaccacatagtcagctcactaatcatggtagttgttaccattctatttatagaagacacagaaggtcaaggtcaaatgacccagctgtccggtggaagagggtttttatctctgagtcgttagacttcaaatctagtgtttgggggttatctcctcgtcccgctgccccatctcccttgtcaccctgtctcctaatttatctgtttatacatctggttgtccttctcaatggggctcttcaaaggcaggggcctgcattaggctggttcacacctgtctccccagtgcctggagcagtgcggggccaccagtgaacttgaaggctgcatggaaggttccaggcgcttgcttcctgctaaggtgttttgctgagcgcctccacatggaggacctcatgggagcctccagaccactccaggagcagggtaaaaattctctacaactgcactgaggtacaacaaactgcacacattttgttgtgatgtacgtatacacccataagcccatcaccacaatcaaaaatgacaaacatttccatcaccactaaaattttgccatgcctctctgttctctctcactccttcccattatagatttatttttatttctttagagatagggtcttgctctgttgcccaggctggagtgcagtggcacagtcacaactcactgcagcctcaaactcctgggctcaaaacgatccacagtctcctgagtagctgggactacaggagcttgttaccacacccagctccagtttataaattcatctccagtttataaaggaggaaaccgaggtactgagaggttaaaaaaccttcctgcagacacttgtccagcaagtggccactccaggatttggaccaaggtgatgtgtcttcaggctgtgtctctgccactgtgccacgctgctgggtggtaggcagcagtgggtgggtgcctgcagtggtctgtaaagaccacctgagatgtccttcctcctctgttccaccctgtccaggtccaagaagacagtctatgaagagagagcaggtgtgactctctcagtgtgctcctctgtgagaagcaggctgacatcccaaagggaagggcggataacagagacagtgcaagcggaggagatgagggtgcctcaaagccgggaggctgggtgatgcaggagcctgcgtgtcccgaggggggtgctgggcccagtgtgagtacgtgtgactgtgactgagacagtgtgactgctgaaggcagggacacagcagctccctgactgggggcagaaggcgttaactgtgtgaaggctggttgtgggtgggtgggctctgggcctcgaacccgggggctgagggagatagtaaacagcagggtgactgacgggaagatcatgttggtagccctgcgaagatgctgcagggctgtgggggtttgtgtgactttgcagttcaacaaattcaaattcagccaacgctggcagggcctgttgtgccaggcaaccagctaggaggaggagactcggacccagcttgcagctgaagggcgctggctgccgggttctgtgggttcaccttgcggtgtcttcccttgctaacactgagtccttacaatagccccatctccaggttgaggctagatggaggggacagagggaagtgacttgcccaaggtgacccaagctcccgagtgccagggcaggatctgaattcaggctctcagactgcagagcctgagtccctccctgccatgcctgtgccagggtggaaatgtctggtcctggaggggagcgtggactcctggccttggctctggagacatccccctagaccacgtgggctcctaacctgtccatggtcactgtgctgaggggcgggacggtgggtcacccctagttcttttttccccagggccagattcatggactgaagggttgctcggctctcagagaccccctaagcgccccgccctggccccaagccctcccccagctcccgcgtcccccccctcctggcgctgactccgggccagaagaggaaaggctgtctccacccacctctcgcactctcccttctcctttataaaggccggaacagctgaaagggtggcaacttctcctcctgcagccgggagcggcctgcctgcctccctgcgcacccgcagcctcccccgctgcctccctagggctcccctccggccgccagcgcccatttttcattccctagatagagat

SEQ ID NO: 28515 - DNA, 2300 bp, Homo sapien
ctggcctctggtctcaccggcctgggagttccccagctgtctgctcccctggctgcaggacagaggcagccgccggtgtggatggagcatgacctcagaggctcccagcccttggctcaatgccgtcggccccaactgcaggcctcagaggagcaggccccaggcccgcccagcgccttcctcgtggccccaccacggagaagagtgaaggagacacctcgaacacagtgttggcgcagggcccagggcttggctggagagggagtcagggaacactgtgatcatttgtatgatctgcggggcacccacctgagcagccaaagcttcatcactgtgctcatcagaaaggcgacaaatggtgttgcccaggacccaaggccccagacactggaggaacagggacacaggctcaaatctgaccttccccagccttgaggcttggaccccttcacgccccctctctggaccccttcacgccccctctctgggcctcagttttctcatctgtcaaaggagctggtgacagctgcctggcctggtggctgggaggacaaaatcagtgtcccagcaggaaacagacaaggggtatgcaaggaaaagatcttagagacctggctgaggggactagatccaagctgtgctaatggcaggagctatttccaacccggagccgagggctctgacagccagtgagagctggaggcagaaagagggctgagagacaggagctacagctgtaggggccggctgggatgaggagggagcaggggtcaccccacttctccccatggcccccctgtctgcagcgcctccccctggccaaccccactgcccagagagcccagttcagggcacagcccgcggggaggggcctgatgaaaatggcttcacagccacctcttactgagcacagccacggccaagcttcgtcctgggccctggggacacagtggtgcgcaagacagcccaagaccccattccacgaggagagaaagagggagagtgaaggaggtgaattgggcagcaagagatgttttaatccaaggaaaaccctacagggcgatcagagaccccttacacagacgaggccccgacggttggtggcacagggaaccgacgcctgcccccatcactcttccaaggccccacagaggttgctcaggcttgcagggggtggggacccaggaaggctcggtcagccagcgcctccctgggccattccaggctctgagctgccgtgtggcggggtgggcaggctgccagccgagggagcccaccacaggggagccgtgtgcattcccagacgggcacattcccgggcacattcctgccggggagccactctgccacccgcaccgccccgcccgctccccgcacacagtgcccattgtctgcccagacactttgagctgccgccgcccccggcctctgccacatccccacgcctccctttcccgggtggggctccacaagcccaagcacccctctcctggtccccagccctgaagggcacctgccatttttcttggaaccaaggaaggattagaggagggaagtgacttgccccaagtcacacaggccaaatccaaatccaaatccctggacccccagtgaattactcttccctaagaacccttcctcctcccaaccctacacccctgggctgcggggcaccctggctcaacagcttagaccctgcctcctgagcacctgctgtgggccaggccctgtgccggcccctacaaccctgcctccctcacggggcccagcagccctgctgggtgtgaatttccccaatatcacacaggaccaggaagctgactcagggcggggaggagtttgccaaggccacccagcgaggaagccagtgagccgagatccagcccggcccacgcgctttccacctcctgcagggaacagtacagggcagagcctgctggggtgggagggactgtgggagtgtccaggggagaaagtggtgtccaaacaaagccttgaggggaagggccctgctccacaaaggcgggctggtttgctgaagccgggtaggcctttgtttgctcattcacccagcatgtggatccaagccctagacgaggcaccgggctaggatacaggtgagatacagggtgaggagtcaggacagcctgacttcaggcagatgggtcagataatatgcactccccaggtgataaaaccagggggtcggcgggctcggtggctcacgcatttaatcccaacactttgggaggctgaggcgggtggatcacgaggtcaggagttcaagaccagcctggcca

SEQ ID NO: 28516 - DNA, 2300 bp, Homo sapien
atgtgttgtaatggcggccgtttcattgtcaccggcgtcggcacggctgaatccgcgacgcatcgccgccatcccgtcttggccggcgccgggggtttgctttaggggcacgggcgacccagcggggacttcagtctggcctattttctggaaagtcgagaggcttgtgaagagcgcttggaggactggctttgggcctgcaggtcggccagagagaggccgtaagggtgggagcaggcttggaggcccggcgtttttaaagccatgagtcatttctaagtttcgacctcaccaattctatcattagttgggattagggcccataacctgcttgtctgggtagaaggaccttgggtggaggttctcggcgccgttctcattgggaggtaaagaagcttgggggaggggagtgttgtggagtcctcctgaatatctggggccgctggtgcactccgaaggcctctggagctcgcagaaaccacagatgatgaacttattgacgggcggacagaaactgtgtgctgattgtcacgttctgatttggctctgcggagttctttggcctgtgtgtatcagtgtaattagtgtccgggcaccggaggcagcctatagcttaacattgctagctgctacccagcgtttgtcccgggagtccctttctttagcggtcaaaaccttgctaattggcatataaagctgcctgttaagcagtttttagtgccactacttagtgtatttttgtgtggttagataaaaaaaatgggtcgttttcttacaggttgagaggatttgaaataagattcagcttaaattttgtcgaatacaaaagcattcttgacacgtgcgagcctggaagagataatgacctttttattcggcttgctgggtgtctggtcaggattcttcagtattgctgagatttggaacttaagcagctgggaactagagaagggggcactgctttggtttgggtgctgacggtgatttttttcccacctagtctcacagaaagttctccgctcccagacatgggtccctcggcttcctgcctcggaagcgcagcagcaggcatcgtgggaaggtgaagagcttccctaaggatgacccgtccaagccggtccacctcacagccttcctgggatacaaggctggcatgactcacatcgtgcgggaagtcgacaggccgggatccagtatgtacagacatcctaaaagttgggggaataggagtggagggggagggaaattgtagagatggagtcaagctgttagcagagggcagacttttttttttaagcaggagttacacgttgtcagaactgctgcgacagcagaatgggaatgcttaacttgaaaactaatattccaaggctacagatggtcagcactgtttgctttaggtgcggtgtggggtattgatttcagagcatagtaaatttgccaggaaccttagcaaagagaagttaacactagtgtggggggttggagctgctgaggctggcataagaactgcctcattcatgtttttttcacctgaaagcttgaataatggccacttacctgtgtgtgttctacttagagatgtctaacagcactggttgctgagccatggagacattaatgttaggcagttgatactgactaatctctgagctcagagctattgttagggcactgaattttccagataaatagcaatcttgtctgcctccagaggtttctgtagaagagaattgaagctggacaggtatttggctgtctagggtcctgatattttttgtttgaataacataaatgtgctttgaatgagagataggcagtaaggacagccctgtgagtccgtactgcaggtgtggggcccagttgcccttccggcctaaatgggcactttgcattttcctagaaaacattacaccccttgcttgggctcctgccaagtctgactactgctttttttttgcagaggtgaacaagaaggaggtggtggaggctgtgaccattgtagagacaccacccatggtggttgtgggcattgtgggctacgtggaaacccctcgaggcctccggaccttcaagactgtctttgctgagcacatcagtgatgaatgcaagaggcgtttctataagaattggtaagggaggaggccatgcagtccctagcttgggagcttgggagctggagagcagggagcagcgtgtgcatggtttctcagctctgtagcaggcagggagctgctgtcttgggtttagtttgcctctcgaacagaaaaatacctgggatcagacttggccagccatct

SEQ ID NO: 28517 - DNA, 2300 bp, Homo sapien
taattccgaggaaacaacgaggcggccatggaaagtaacgagatacttgattcttagaaagatttgtagggggccaggcgcggtggctcacacctgtaatcccagcactttgggaggccgaggcgggcggatcacgagatcaggagttcaagaccagcctggccaacatggtgaaacaccgtctccactaaaaatacaaaaaaaaaaaaaaaaaaaattagccaggcatggtggcgcattcctgtaatcccagctactcgggaggctgaggcaggagaactgcttgaactgggaaccggtaggcggagcttgcagtgagctgagatcgcgccactgcgacagagcgagactccgtctcaaaaaagagatttgtaagggaccagcctggaagcagggaatcggtcaggatccgagtcaccctggagcctaggcagagatcagcgaaagccctcgctgatgcataggtctggaaggcgtggggctccgggaggctgagcagctggactcggcatgaccagaggtcgtgaggccgttccgcaggcttgggacgctcctgaccctcagaatcaagcgcgggccactgcattagcatgggagaaatggcagagatagggcttgagggagggatgcccgagattaaaggtattaaaggtaaattggtgtcgccgcaaaaccagcgtgggagccaggaaacgagagtttcagtctttcttcgctaattccagagatagctgcatatcacaggaggagaagcgacgcagccatttttcttcgttattatcaaatttggctgctgccggacgccgtagatttgtggctcacccacccttagcccacctctccgcggcttttcactaagtttgaacccgacccctcgccgtagagtgtgtaatttctgtctccgaagctgacgtcaacttctgaacgaaagctaggagcggaagagcgtgcgtggaaatggcgctcggtacgtgcccccgacctgtcgtctgccgcgggggcgcgctcgcacgccggaaggggcggggccagatttggctttatatagcggacccgtaaggccgaccggcctctaccggcgggatttgatggcgtgatggtatgtgttgtaatggcggccgtttcattgtcaccggcgtcggcacggctgaatccgcgacgcatcgccgccatcccgtcttggccggcgccgggggtttgctttaggggcacgggcgacccagcggggacttcagtctggcctattttctggaaagtcgagaggcttgtgaagagcgcttggaggactggctttgggcctgcaggtcggccagagagaggccgtaagggtgggagcaggcttggaggcccggcgtttttaaagccatgagtcatttctaagtttcgacctcaccaattctatcattagttgggattagggcccataacctgcttgtctgggtagaaggaccttgggtggaggttctcggcgccgttctcattgggaggtaaagaagcttgggggaggggagtgttgtggagtcctcctgaatatctggggccgctggtgcactccgaaggcctctggagctcgcagaaaccacagatgatgaacttattgacgggcggacagaaactgtgtgctgattgtcacgttctgatttggctctgcggagttctttggcctgtgtgtatcagtgtaattagtgtccgggcaccggaggcagcctatagcttaacattgctagctgctacccagcgtttgtcccgggagtccctttctttagcggtcaaaaccttgctaattggcatataaagctgcctgttaagcagtttttagtgccactacttagtgtatttttgtgtggttagataaaaaaaatgggtcgttttcttacaggttgagaggatttgaaataagattcagcttaaattttgtcgaatacaaaagcattcttgacacgtgcgagcctggaagagataatgacctttttattcggcttgctgggtgtctggtcaggattcttcagtattgctgagatttggaacttaagcagctgggaactagagaagggggcactgctttggtttgggtgctgacggtgatttttttcccacctagtctcacagaaagttctccgctcccagacatgggtccctcggcttcctgcctcggaagcgcagcagcaggcatcgtgggaaggtgaagagcttccctaaggatgacccgtccaagccggtccacctcacagccttcctgggatacaaggctggcatgactcacatcgtgcgggaagtcgacaggccgggatccagtatgt

SEQ ID NO: 28518 - DNA, 2300 bp, Homo sapien
tggtcacccaggctggagcacaatggcacgatctcggctcactgcaacctctgcctcccggattcaagcaattctcctccctcggcctccggggtagctgggactacaggcgtgcacaacaactgctaatttttgtatttttaggagaaacggggtttcactgtgttggccaggctggtctcaagttcctgacctccagtgatccaccctcctcagcctcccataagtgatgggattacaggtgtgagccaccgtgcctggcctgtatcctgaaattttaaaaaccttcttaaattatttggcagcaaaaagtaaactgatgcattttttgagcagcaaagtcagccttgaactgatgtgagtctatttatatttgtcccactccatgtgaatattcatgtttccttacggaatattgtttttctttaaaaagtgctgtattacataatatacagtatgtgcaccatattacctttctaaaaatcaaaaaatgctcaattttgaaacatatgtggcccccaggatttctaataatggattgaagatctatcacttatgtccttcgggaatggtgtgaggattgagataatttttttttttttgagctggattgcactggcgcaatctcagctcactgcaaactccgtctcccgggttcaaacgattctcccgcctcagcctcccaagtagctgggattacagacgcacaccatcgtgccccgctaatttttgtatttttaatagagacggggtttcgccatgttgcccaggctggtttcgaactcctgacctcaggtgatccgcccgcctcggtctcccaaagtgttgggattacaggcgtgagccaccgcgcctggccgagagaatgcttttcaaacgacggtgggagcaaaggccaggcccagaattaaagaagatgacagggtgggacagaggaagcaggtgatatgagagcgtgtgctctggcgcagccatgaggctgaagtagacggttaggggagcgtctttggtggccgctgaagttgatgcttaattccgaggaaacaacgaggcggccatggaaagtaacgagatacttgattcttagaaagatttgtagggggccaggcgcggtggctcacacctgtaatcccagcactttgggaggccgaggcgggcggatcacgagatcaggagttcaagaccagcctggccaacatggtgaaacaccgtctccactaaaaatacaaaaaaaaaaaaaaaaaaaattagccaggcatggtggcgcattcctgtaatcccagctactcgggaggctgaggcaggagaactgcttgaactgggaaccggtaggcggagcttgcagtgagctgagatcgcgccactgcgacagagcgagactccgtctcaaaaaagagatttgtaagggaccagcctggaagcagggaatcggtcaggatccgagtcaccctggagcctaggcagagatcagcgaaagccctcgctgatgcataggtctggaaggcgtggggctccgggaggctgagcagctggactcggcatgaccagaggtcgtgaggccgttccgcaggcttgggacgctcctgaccctcagaatcaagcgcgggccactgcattagcatgggagaaatggcagagatagggcttgagggagggatgcccgagattaaaggtattaaaggtaaattggtgtcgccgcaaaaccagcgtgggagccaggaaacgagagtttcagtctttcttcgctaattccagagatagctgcatatcacaggaggagaagcgacgcagccatttttcttcgttattatcaaatttggctgctgccggacgccgtagatttgtggctcacccacccttagcccacctctccgcggcttttcactaagtttgaacccgacccctcgccgtagagtgtgtaatttctgtctccgaagctgacgtcaacttctgaacgaaagctaggagcggaagagcgtgcgtggaaatggcgctcggtacgtgcccccgacctgtcgtctgccgcgggggcgcgctcgcacgccggaaggggcggggccagatttggctttatatagcggacccgtaaggccgaccggcctctaccggcgggatttgatggcgtgatggtatgtgttgtaatggcggccgtttcattgtcaccggcgtcggcacggctgaatccgcgacgcatcgccgccatcccgtcttggccggcgccgggggtttgctttaggggcacgggcgacccagcggggacttcagtctggcctattttctggaaagtcgagaggcttgtg

SEQ ID NO: 28519 - DNA, 2300 bp, Homo sapien
tgactttgtcaagttattaacctcttggctggaagtttagttttctatgtaaaaacggggcaataggctgggcgcggtggctcacacctgtaatcccagcactttgggaggctgagacgggtggatcacgaggtcaggagatcaagaccatcctgaataacacagtgaaaccctgtctctactaaaaataccaaaaattagccgggcctggtggcgggtgcctgtagtcccagatagttgggaggctgaggcaggagaatggcatgaacccgggaggcagagcttgcagtgagccgagatagtgccactgtgcgccactgcactccagcctgggcgatagagccagactccgtatcggaaaaaaaaaagggcggggggcaatatgggtaggttataatcctttgtctgcatcctgaaatttttttttttttttttttttgagatggagttttgcttttctcacccaggctggagtgcaatggtgcaatcttggcttactgcaacctccatctcccaggttcaagcaattctcttgcctcagcctcccaagtagctgcgattacaggcgcccaccaccacccctggctaatttttgtatttttagtagagacggggtttcaccatgttggccaggctggtctcgaactcctgatctcaggtgaaccacccaccttggcctcccaaagtgctgggattacaggcatgagccaccacgcctggtcttgttttttttttttttttttttttgagacagaatcctgattggtcacccaggctggagcacaatggcacgatctcggctcactgcaacctctgcctcccggattcaagcaattctcctccctcggcctccggggtagctgggactacaggcgtgcacaacaactgctaatttttgtatttttaggagaaacggggtttcactgtgttggccaggctggtctcaagttcctgacctccagtgatccaccctcctcagcctcccataagtgatgggattacaggtgtgagccaccgtgcctggcctgtatcctgaaattttaaaaaccttcttaaattatttggcagcaaaaagtaaactgatgcattttttgagcagcaaagtcagccttgaactgatgtgagtctatttatatttgtcccactccatgtgaatattcatgtttccttacggaatattgtttttctttaaaaagtgctgtattacataatatacagtatgtgcaccatattacctttctaaaaatcaaaaaatgctcaattttgaaacatatgtggcccccaggatttctaataatggattgaagatctatcacttatgtccttcgggaatggtgtgaggattgagataatttttttttttttgagctggattgcactggcgcaatctcagctcactgcaaactccgtctcccgggttcaaacgattctcccgcctcagcctcccaagtagctgggattacagacgcacaccatcgtgccccgctaatttttgtatttttaatagagacggggtttcgccatgttgcccaggctggtttcgaactcctgacctcaggtgatccgcccgcctcggtctcccaaagtgttgggattacaggcgtgagccaccgcgcctggccgagagaatgcttttcaaacgacggtgggagcaaaggccaggcccagaattaaagaagatgacagggtgggacagaggaagcaggtgatatgagagcgtgtgctctggcgcagccatgaggctgaagtagacggttaggggagcgtctttggtggccgctgaagttgatgcttaattccgaggaaacaacgaggcggccatggaaagtaacgagatacttgattcttagaaagatttgtagggggccaggcgcggtggctcacacctgtaatcccagcactttgggaggccgaggcgggcggatcacgagatcaggagttcaagaccagcctggccaacatggtgaaacaccgtctccactaaaaatacaaaaaaaaaaaaaaaaaaaattagccaggcatggtggcgcattcctgtaatcccagctactcgggaggctgaggcaggagaactgcttgaactgggaaccggtaggcggagcttgcagtgagctgagatcgcgccactgcgacagagcgagactccgtctcaaaaaagagatttgtaagggaccagcctggaagcagggaatcggtcaggatccgagtcaccctggagcctaggcagagatcagcgaaagccctcgctgatgcataggtctggaaggcgtggggctccgggaggctgagcagctggactc

SEQ ID NO: 28520 - DNA, 2300 bp, Homo sapien
agtggcgcgatctcggctcactgcaagctccgcctcccgggttcacgccattctcctgcttcagcctcccgagtagctgggactacagccactacacccggctaatttttttttttttttttttgtatttttactagagatgaggtttcaccgtgttagccaggatggtctcaatctcctgacctcatgatctgcccgtctcggcctcccaaagtgctgggattataggcgtgagccaccgcggatgctgggcatctttttatgtgctgagttgccgtgtgtatatcttctttggtgaggtgtataactattcaaatcttttgcccattttttaaaaagtgggtcctcttattattattgagttcgaacgttctttatttgggatgcaagttctttagatctatgctttgcaaatattttctcccagactatcgtttgtcttttcatacattcttttaacaatgtcttttaaagaacagaagttcttaattttgataaagtccagtttatcaattgtttcttttatgaatcatgttcttcatgattttttttttttttttttttttttgagacggagtctcgctctgttgccaggctggagtgctgtggcgcgatctcggctcactgcaacctccacctcctgggttcaagtgattctcctgcctcagcctcccaagtagctgggactacaggagctcgccaccacgcccggctaatttttgtatttttagtagagaccgggttcaccatgttggccaggatggtctcaatcacttgaccttgtgatccatccaccttggcctcccaaggtgctgggattacaggcgtgaaccactgcgcccggccttctcttgtgctttcttctaaaagttttatatagtcatagtagacaccttataagtgtgctggattaaatgtgaaaatgtatgtaaagcccttagcacaaggcctggtagagactaaacaatcagctgagcctaagatggacattgactatgtaatttttataaggagcaccctcaggcccagcacacatttcctccacacagatgttgtgtcctgtcatcacagaatggcaggataccagagaagcaaaagcctccacccatatcctcatccaacctgctcctggaaccagtgaaggtgactgcagacatagagaggccatagagctacagggcagcaggagagccagccctggaaggtggcccttcccctgcagggagcactcctccatctagcctccgtttccatgaaacctggaggtctagcccaagctgtgatggggtgatggggactaggctctgtttactgagcacctactgtatgctaggcccttgggtaaggcattgaataagttagacaacacctgggcctcgggagctcacagactagcagcagaagaggccatgaacaaatgattgcgtaattaattgctagattcaggaaaggggcaacgttctggggtaggaggggatggggaagaggaagtctcagccgccgcctctgtgccaggcccctccaggctgggggtgggagggtgcgcgggcacagggacacacatgacgtcatcgtaagaggcaggggaagggtggtcctgggaggtgggggctgctctggagggctgtaagagagggtcattcactcgtggttcattcattcgagaaatattcatgcggcgcctactgcgtaccaagcaccctctaagaaggacgaacacagctcctgccctctcattatatttggggccgacaaagtggcaggaaacagccaaacaaatcaagcgtgaagatggtttcagcagagccgacggctcagaggggctgcgaccggggcaggggaccggggatgcggggcagggacacggcccacacttgctgtgcacgcaccgccctcccccaaacactttgcaaagaggtcaccgcactggctgcgagcgcgccctgagccccgggccgcagcacgcgcgcccccgcgcccgaggtcgcgcgctgcccagccccccgcccgcgccccgcgagctgcgcccgccgcgcacgacgccccctcgcgggagccctgggccgccggccgcgcgcgcaggggagggggcgggggcgccgcgcacgcgcacgggccggcggcgcgcgccgagcggggggcaccgcgcgggtgcagccacgatggaagggggtgcgtacggagcgggcaaagccgggggcgccttcgacccctacaccctggtccggcagccgcacaccatcctgcgcgtcgtgtcttgggtaaggacggactggccgacggctctgccaggccggggt

SEQ ID NO: 28521 - DNA, 2300 bp, Homo sapien
actcctgggttcaagtgatcctcctgcctcggcctcctacatagctgggattacacccatgagccaccgtgcccggccaatttccccctttttcttgaggctccaaggcccccttgaggttactcagccagaggagaggaagatggggcattctggaaagagggaggggcctgcagatcacccaggcccagcctcagcaccttggggaggcaggggtctgctcgcccaggccctgcccagcggagtccactccacccccaccaccgagcactcggggcgacagcttgcggagattacgcctaatccccagtgggtcacttccaaggctgcacaacccggtgtgaggcggggtgggggaggggcctggagcctcacctgccccacccccaccttttccccagagtgagactcttcaggaagacaaggggctgcccaacacccatcatgtgtccatgcggcttcagccattttcctcacttgaccctgggggaagacaaggccctgttcctgtgaaggggggcccttggcagcctgactcatttctcaaagtgtgaccgctcccttcttccctcagcctttccccaggaggcaggatggatgcctgcaccaggacaagggcaggaaggctgggttcagcttgtggggagagggctcggcagcccccttttcagggagtgagctccctgtgcacaggggtgtgcaagcggaggtgccagccaaggacgctcaggaggggatgattctcctttctaccccccgtgctgcctggccctctctgactatcagacttgctgtctactcccctcaaagcctttcctgaccctctccctgggtctgggggagagacgtgcacccaacaactgaaccaacaaataggaaagaagttatattgtgatgttaccaagaaaattaattgaggcactggagaataccttagatctggagtctggtctggagggcttctctggggaggtgtcttttgtgttgagatgtgcgtgttgaggagccagctgaaggaagatctggagaaatacaggcatcccaggcagaggaaagagccgagtgtgaatgccctgaggcagggatgaactcaggagggcttgggaggagagtgttggggagcttcagaggaaggcaggagccctggcgtttggtgggggaaggtctttacctgggcagggggcggtgggtgagcatcaatccaagagtctagacctggggggtgacatgacctgacttgggtttaaggggattgtctggctgctatgaggggacagagtgtgggggtgcaagtggacatatgggctgctgtcattgcctggagaggggtgacagtggcctgccccagggtggagggacttgacagttttgggaggaggttgaagcagctggcccgaatgtcagactggttggaggggtcgagtatgaacccaggactggggcccagcagctggtgctggggaggctgagagagatcactggggaggctgagagagcctggggcactggaggaaggactcatggcccaagcagggggacctcagggccattctagggtgatggactttatcttcagccagcggagggattgttgaggtttggagtgggtgatatccccctggctgctgcctggggactgcctggaggaggctggagaggaggctgtggtggtgtcaggcacctggacatgggcaggggccagctgcctggctgcctgcaccgcagggcagggaccagggctcccccgagccacccagctcagggatgttcctgcgcagggcgaggtagacggttccatttggagctgggaggacagagtgccgtgggctccagatgtcatctctctgcagcttatctggggaaagccagcattgtctaaaaacgtttaaaacgaggcctctaggaggttcctggcagcgttacagtgatctcagccacccccatgctggctgggcacagctcgccctgagccttcgttagccgacgccctgcagtgggtcctaggcacaccctgggtggtctgtctgcagaggggagataccatctcccctcaagtaaagtgggcctgtgcccttttgcactgcgggacacggctcaggaccagcaggcatgcctccttggtctcatgttgaccttagagtttgggattctggaattcgatccttcatggataggcagctggacacagaggtcgtgggtgagctggaggagcaggcccggatgtgaggcaggttccccatctgctgtgggtcagcgagaggcagggcctctctgagccttagcctccctgactgtgaaat

SEQ ID NO: 28522 - DNA, 2300 bp, Homo sapien
tgttggccaagatggtcttgatctcctgacctcgtgatccacccacctcggcctcccaaagtgctgggattacaggcatgagccaccgcgcccagctcgggaggatcttttgagctcaggcgtttgacaccagcctgggcaacatggtgatagcctgtctctacaagaatacaaaaattagccgggcgcagtggcacatgctgtagtcccagctacccgggagactgaggtgggagaatcacttgagcccagaagcttgaggctgcaatgagccatgattgtgccaccgcactccagcctggacaacacagtgagaacctgttttttttttttttttaaatggtgggggtcagggagagatggcttgcaaatgaatgtttgtttaattttataaaaagcaggcaggtgccaggtgcaatggctcacgcctgtaatctcggcactttgggaggcgaaggcaggtggatcacctgaggtcgggagttcaagaccagcctgaccaacatggagaaaccccatcgctactaaaaatacaaaattagccagacgtggtggcgcatgcctgtaatcccagctacttgggaggttgaggcaggagaatcgcttgaacctgggagtcaaacatctctctaccaatgggaccctgtcaatggcttgcttagaaggcaacaacttccctctgtcctccagatgaataaactcctgcctggggcccacttggtcagagcctgtccctacaaccccttcatctctctcctccaactctgtgcaagccacagtgggctcccgtgacaagtgtgctttttttttttttttttttaagacagagtctcactctgttgcccaggttggagtgcagtggagtgatctcagctcactcactgcaacctccacctcccaggttcgtgattctcctgcttcagcctcccaagtagctgggattacaggcgtgcaccaccatgcctggctaattttttgtagttttagtagagatggggtttcaccatgttggctggactgatctcgaactcctgacctcaggtgatccaccggcctcggcctcccaaagtgctgggattacaggcatgagccaccgcgcctgcccccggcagaatgtcttatatacataaatgttgtcctctccaattaaaatgttaacattttaggttgggcggggtggctcacacttgtaatcccagcactttgggaggcccaggcagaagaatcgttttaggccaggagtttgagaccagcctggccaacatagcggtactccgtctctacaaaaaatgtaaaagattagctgggcgtggtggcgggcgcctgtaaccccagctactcgggaggctgaggcaggagaatcgcttcaacccgggaggcagaggttgcagtgagtccagatcacgccactgcattccagcctgggcgacagagcaagcctccgtctcaaaaataacataacataacataacataaaataataataaaatgaaatgaaataaaataaaataaaatgttagctttttgaaggcctgtcctgctcgctgcagaacccactatagagccaagcagggtcacctaggtagcatttgctgagtgaatgaattgtcctccccttaccaactgtgttcacaaagaaccctcaggagttcaagaccagcctggccaacatggcgaaaccccgtttctactaaaaatacaaaaattagccgggcgtggtggctcatgcctgtagtcccggctactccggaggctggggcaggagaggcgggcacctgtaatcccagctactcgggaagctgaggaaggagaatcgcttgaggccggaaggcagaggttgcagggagctgtgatcgcgccactgcactccagcctgggtgacagagtgagaccctatctcaaaaaataataaagatgggcgaggagcaatcggccccgaggaaaagacaaaacaaaacaacaacaacaacaacaacaacaaaacgtgcaagagcgcgcctgcgcacacggtccgctacgacccccatccctcttcgggcgtggggtggcgctgggcgcatgctccccggcagcgcggtcatcctcgcctccttcgggccgctctagccgccccactcgctgctctgcggggaggcgggcgctcccgcaggggttcctccaagatggcggcgcagaggaggagcttgctgcagagtgtgaggaacaggcccgctctctgggcttggggttgggagcctgggcgggggtgctgtcgggtgcaggaacggctccttctccgagtttggacagccaccctctcc

SEQ ID NO: 28523 - DNA, 2300 bp, Homo sapien
gggcagaatagactggattttgggggagtgacaattaccttaagcacatgtcatggagatgatttattttttttttgagatggagtcttgctctgttgcccaggctggagtgtagtggcatgatctcggctcactgcaacctccgcctcctgggttcaagcaattctcctgcctcagcctcccgagtagctgggattacaggcgtgtgccaccacacccggctaatttttgtatttttagtagagatggggtttcatcatgttgtcaggctggtcttgaactcctgaccttctgatccacctgcctcaacctcccaaagtgctgggattacaggcatgagccaccatgcccggcccatggagatgttataatggaatgtgcttagagtgataggaactaggaatggatcttacactttcaaatggttgggaaaacatcaaaaaatgtttctggacacgtgaaaatgacacgaaattcaaatttttgtgtccataaagttttattggaacaccgccaggctcattcttttacgtattgtctatggttgattttatgctacgatggcagagttgagtagttgggacagagaccatatggctggcaaagcctaaaagatttacaatcaatctcttaaagcaaatggtttgcccacccttgcttagagagagcctccaggaagaaaagagcagtgagggtgacgttgaagaagggggcaagactaggtcaccaggggctccctgtgccccgcccaggcactgaacttaagctgagggcaagtgggagccattgaaggtgcaggcaggagagtgacctgctcaagtgaatgttggagtaggatcactctgcctcctcagcaaggatggatgaagctgggcacggaggcacctggagcaggtagaccagccctaggcagcccggatggttcagcaaaggcctctgggactattctggagcacattcgctgggatatagaataggtagcgcatccctgcaccttcgacgatggcggcgcagagatgtctgctgcgtacccacaatgccttgtgcctcgcaccgcgggaggaagtggctgctctgtaggccccagaacggaaccacttgaaaggcgggaaacacgtgggggacgcctctgagccctgagaggaatggcctagagcaaggccacgaggagccagggcacgacacggtgggccctcggagaaccgctggtgggcaagtggcaggagagtaggctcaagagggttggcagggccgaccgggcctagggtggccgggtgaggggggcgggggaggggaggcccccccagttaccccaggagtgcgcaggtggcttcgggcatgtgagggacggagggggtcggacggaaggacacaggccggtgtacagcggtcacccacgccccaagcagacacacagactctgcagacaccgtaacaggcccggcaccgtgcacacatcacaggcccaggcctctgcacatggtcacagatgcctatgcgaaatcccggcccaggttcacgcgggcacaggcgcatccacgcacacaccgcaacacggatctgcacgtccatgcacacacaggcacagactcgggcacacggagtcacaccgacccgggcacgctgcggaacgcacccgtccacgcatacacagaacgggacttgctgccccgcacgcacaccaggcccgcactccgaactacccgcattccccgcacacgcccccgcgcaggccgccccgggccgtgggccggcgcacgcacggtcacaggaggggcgcgcgcacactcgcactcacacacactcgctcgcacacgcacacactcgatccagcacgcgcgggcggcgcggggcggcggcggccggagtctgcggtgcgaggcgcccccggcccggcgcggcggcggagcccggctggcgggggaggggagggggttgcggagggggcggggtgggggccggagccgcttgagccggcgggagcgggcacccctgcgcgccgcgctcggcctcgcctccgcgccccccgcgcgcccgccgcggtccctcccccgcgcccgtccgctcgccgggcccccgccgccgccccggggtgcagccgagcggccgcgccgggtccccgggacggggtggaagtgggggtggggggaggggatcggggccgggccggggccgcgctgcctgcgatgccgggcgcccgccgcagccgctgccgccggagcccgggatggggcgagaggctgcggcggacgccagcatctccccgccggggaccccgggggccgcggagccgccgccgc

SEQ ID NO: 28524 - DNA, 2300 bp, Homo sapien
gtgaatgtttgggattagccagaggaatgagtactgctggtggcatttcaggcacagggctctttatctctcagggagaggaaaagggtcccctctgcagggccacacatgaccacagacctgctgtgtgcagagccaggaggcagtgggagcccgtgagggctgggccagtgtgcagggaaggtgcttggggctgtgagagggttgggggtgatgtgaagactgtagcactactggcctcgcttcattccacccccacaggcacacagggcctcaaactcgcagctggcaagtgacagcagcagagtccacacccacctgcggccttggggcttctcagagtttcaggggcaaagtccaggctgctgccttcagccttgcccaaggcaagggtccctctcacccccactgccatcaggaccccatgggcctgccattttcaggtcacagggctctccagctctggtagatgatcggattcgctgcccaggaaagctgcatctgcccatcctgccaacctcctaagcccctcaccagcctgaaaccatgtgagcaccccggtggcacactgcaaggccaggctgaaattatgtttcccagagcccagagttccctgcaaggccaagggtacccagggcagcccttcccaccactacccaactccaacaggaacgggtcaccctggacagtgcgccgtgtctgggtctcctgcagcttaaaggaggctcaaggtccaaaaagtcaggaaaactccaaggtgaggcccagactccaggaggctccggaggccctggatcctgacccacactgcagaaccttgccctgatctaccctggagctggcactccacatccatctgccccctgcccacacacctccatccaggctgccctcctcatccatcccccctcctccccttaacttccatccccccacccccattattttcccctagccccgatcacccggaacttggagacaagcaagcgaggggtcccatgccacctgcaccacctccttggggagtttgtttgctgctgtctgcctgatcctggcctccagctagcctggcctggccacaggcccagggatccccaagcccctgtgtccacagcttccccttgccagcctgtaatcatgtagggggtgctatagtctgaaaaatgtgtcccccaacgttcacatgtaggaaatttaatccccagtgcagtggtgttgaggtgtggactttaagaggtgattaggccgtgagggctccaccctcatggaggaatttatgctgctattgtaggagtgggttagttattgttcctgataacagcatgggctcaaagtgggttagttatcgtgttcctgataactgcatgcggtcagccctgcccgtctccatgtgtggatacttctgcccttctgccatgggatgacgcagcatgagggccctcgccatatgctagctcctcgaccctggacttcccagcctccagatccgtgagaaagttctgctgtttacagaccacccagtctcaggtattctgtggtagcagcacacacaggactaaggaggggaatgagaggacagcacatctgaggcctccccgagagccgccctctgacggggctgtgctcagtatcttagctgttctctaatctcgtgtggacatccgcctcccactgctatttcacagaggagaaaaccgaagttcagtgagtcaaactgacaagccctggccctccctgtgagtgacatgcatccaacccttccctgtggcccacactccccaagactccagcccgcattgcagctgcccgacccctgcctgggcccctcccagccattgccgcctccttccctcaccggcccatacctgccttgaggcacagtgtctagtcccctctgcctggctttcaaggctctatggcagcagtttcctccctagaggctgagcccaggtgtcagttagatgactgcaggaggaactaaccttgtcccgccagatgctggccctgccctccatctgggctggtttcctggctccacctctttccagctaggtcacctcacctctccagcctcagtctcctcctttgtgaaacaggtaaccaggcagcagtgaggggcagccccaccctcccagagccactcctaggtgccaggtgcttgaggaggtagggacactgtggttttacaggtggagagcctgtcagggccaagcgctcagtaaaaagcaggtccatctcttgtgagcctcgccttgctccctctctgtgtgggagggttcccgagaactgcaccccgactc

SEQ ID NO: 28525 - DNA, 2300 bp, Homo sapien
gggattacaggcatgcacccccacgcccagctaatttttgtatttttagtagagacggggtttcaccatgttggccacactggtctcgaactcctgtcctcaagtgatctgcctgccttagcctcccaaagtgctggggttacaggcatgagccactgcgcccagccactacaccccaactttaaaatagtctatggctccccatcacagcagtgccaagtcaaaattctgctatagtttcagggagcccctgttatcctatcctactactttgtcccatccccttggactgcagtagacatctaattcaaaggcagccaatccacctgcaagagggcgttcggtgagcaagcttacattccctttgtccctttcaacaccacctggcacaatgtgggcagtggagattttacaggtgaatgggggaccggcccttctgcctggggatatcaggttcttgtctggtgaatacaggaataatgacatctgatgacagcaaaccccattaagagggaggaggctctctctttgacagtaatttccaagtcgctggctggctgacttcccagagctttcctgatctggctacaggaaccaggaactcctgattcctctgttcctccatcagcctggagtaacccctgggagggggtggggaggagggggtgggctggactgagctttctgccttatcatccagtagcaatttccctctaattccctctaagcatttacacagggtctcaattttataaggcatcctactgggcaaagcaaagggaacgagactggtaagacacaggctcctctgcccttttgctgggaagcctgggctgtccctccctgctccccctgcagctaaggggcacctggcctctctcactgtcccctgtctcctctgtgacatcacgccattgagggctccctctctctgcgtttttcaacttctctccctcttctggctgccccctccctgcatcaaggctagaataaataccagccaacccctaaacaaacccagatgcaacacatacaattggcttttgtcccctgtagctgtcctttcatcttctctttccctttccagcaaaatcactgtctccattttttcttttctttctttcttttttttttgagacagagtctcactctgttgcccaggctggagtgcagtggcatgatctcggctcactgcaacctccgcctcctgagttcaagtgattctcctgcctcagcctcccaagtagctgggactacaggcgcctgccatcatgcctggctaatttttctatttttagtagagatggggtttcatcatgttggccaggctggtctcaaactcctgaccccaggtgatccgcccacctcagcctcccaaagtgctgggattacaggcgtgagccaccacacccagcctccaatgacattttataattagccacccctcacctcatgcatcaggcctcacatgccctctctgattaatcttcaacagcctgataagctagtcctttctcaccatctccaatacacaggtggagggactaaggctcacgaagcccaacgcacttgccctgcactcaccaccaacccacctttcaaatgagacaggcttgatcaccctgacccaggtgaaatggtccatccctcctgtctttccacaaaacgttcattcattcaacaattacacccattcactactatatgtgagtcactgttctgggtaagcgagtgctcccctctctccctccagccatgatcaccattaagaggctgatgccatcatctggatgtgaaatcaggggggttactgttaaacctgcaatatctggccgggcgtggtggctcacacctgtaatcccagcactttgggaggccaaggcgggtggatcacgaggtcaagagaccgagaccaccctgatcaatatggtgaagccccgtctctactaaaaatacaaaaattagccgggcatggtggtgtgcgcctgtagtcccagctactcgggaggctgaggcaggagaatcacttgaacccgggaggcagaggctgcagtgagccaagatcgcgccactgcactccagcctaaagacagagcgagactccatctcaaaacaaacaaacaaacaaacaaacaaacaccctgcaatatcaatccaagagatcctggaatgcctcttgccctgtgaaacctggcagagccctgaggtttgggtcagtgccccctgccgtgggtctctggcctacaaaggcaccatgggtacgtacatgtaagtgctagataccacctcactgcccacac

SEQ ID NO: 28526 - DNA, 2300 bp, Homo sapien
ccctgtgaaacctggcagagccctgaggtttgggtcagtgccccctgccgtgggtctctggcctacaaaggcaccatgggtacgtacatgtaagtgctagataccacctcactgcccacactccattgccacggaagcatcgggggcagggagaggccttgtcagtctaagtaaagataagaccctgaagagcaagtggatctagaggggctgatccgaaggggagacccctccaaatgacctccctctgtccctccctccgaaaaataacattccatagaacaagaaagtcaggagagatatgaagaggtcatctggtatgccgatggaaatgccaccaattatatttatttgggtcacaaaattctttaaaaagcaaattagggcagcctgaaagagtggaaagaacacacatttcagagtaagacagacttggcttccactgaaagcttctttccttcttagctcagtgtcttagaaactactatgcctctctccatcttggttttcttttcttttctttttcttttttttgagaccgagtcttgttctgtcgcccaggctggagtacagtagcgtgatcttggctcactgcaacctctgcctcccaggctcaagcaattctcctgcctcagcctcccaagtaactgggattacaggtacaatgccaccactcccggctaatttttgtatttttagtagagatggggtttcaccatgttggtcaggctggtctcgaactcctgacctcaagtagatccgcccacctcagcctcccaaagtgctgggattacagacgtgagccaccgtgcccagccctgcaacagactcttgattggtctccctgcctcagccctggttccattccgttattctcaagccagacagatcccattgaaagggaagtcagatcccagcacttcttggctctgaaccctgctgtggttcctttgcacccgccatctccctcccagttctggtaagggcctcccctctggcctctttcccagctcctgctcactcagctgcgaaagcactggctttctccctgtggctcctagaccacgctgagcttaaaggcttacctggggggaggcctgaaatgctcttccctgcaatgttcttctcctggttctcgtccttttatcagatagcctgactattctgcaattgcccacccctctactggtagatattaccttttaatcctcaccacagccccaaggctgggtgaggttaggaaacttggcagagggcagctgtccctaagtggtggaactggaactaggagccagcggtggccccggtggccccggactccaaagccccaggccctgggcttggcagagccaggcatggagggaggcagttgggggagggagcttccatagagacacggcctccgtcctcaaatctagtgagagacagagaagcaaatggataaattacagtgcctggcatatggtaggcgccaagaaatacgttttgttgttgaacagattatgaggcgtaagatgtgcagacatttccgtggggcccaaagaaggcacgtgagtgtgttagagggaggcgaggaaggggctgggagagatttcccagtgaaggggggcatttgaggtagactttgaaggaagggtaggagtttgccagaagccatggggcctggggagtaggaacagcatggagggatgaaaagaaggcgatctgagaaaatgggttttgaggagctctgaatattagtgttagaattccctcaggtaccccagggccccagccagagatcagcatatacagtacaggaggctggccaggtaccccgacaggctaaggggttgccagcaggtgaggggcctacccggtgcggcagccttgttggacagcgaggctacctcctgccctctgaacttctgccagcatcgggaccaccccggtacccacagccggacccggacaccggagtcctctgggggcggggcgcgagtggcctctgcaggccagtcccttggtgaggtcacacacggaggcggggctcaggattggggggcggaatcatgcgcagggggcggggcccgagagagagcttggagaagaccggaagtccctccgcctccactcgccctcgtgctcccttcagccccttcgcagctccgtgcgcaaggtcgtgtcccggaagtgaaggggccatgttgatgggtgacccggggagaggtacccggccagaggcgagtcctgcggagtggtagcgcgcacggcctgcgggtgagtgagagaaggaatgagggccgccggcggctgggcgg

SEQ ID NO: 28527 - DNA, 2300 bp, Homo sapien
gcaggccagtcccttggtgaggtcacacacggaggcggggctcaggattggggggcggaatcatgcgcagggggcggggcccgagagagagcttggagaagaccggaagtccctccgcctccactcgccctcgtgctcccttcagccccttcgcagctccgtgcgcaaggtcgtgtcccggaagtgaaggggccatgttgatgggtgacccggggagaggtacccggccagaggcgagtcctgcggagtggtagcgcgcacggcctgcgggtgagtgagagaaggaatgagggccgccggcggctgggcggcggggaggttgcagcgcctcctctcaggctgctgccggcgcctcgcatgcggcccggagtcaggataccagcatgcagccgggggtctcgccccatcccgccctggactttcccctgggagacccctcggctgccccgccccgccccaacctcggagacctccagtgccccgaagcaggcctgccctggcctctgggcctccgcaccccggcccggcccccacggttggtgaagtgcagactggctggggctcagccgcccagtcgcccagcgaccttgtagttacagccctcgccgtgacagtcgccttttacagcatcaaacacttctgttgattttctgcatcgggaggtccttagggccgagggatctcttaaacagttgaggaaaaatgggcagggatggtggcttgctcaagcttgcgcaggaagttagcaaggccggaggctaagggctcgcggactttgggcccaaagtccaatctttttttccagccaaatacttcccccacttggtgtcatttctttatttctgaaacggaggtgatcatttcttccacatagggacgttgtgaaattctctccgttacgcataattttgagccccttgtatgtgccaagcgctgtgctgggaaagttcgtggagcacccagaagtgctgtacacacggtccggctccagcaaagggtaactcattccagaggcaggcagagttggggtcaggagtgcagccctccccttgacagctgtgggcccgcgggcaagttacttccctctgggagattgtttcctccacttaaaatggggtaatgttgacccctagggtagctgacagaatgagttgttatgtgagacatgcttcgaacattgcacgttgtatatagtgcaatataatgcaataagcatttactgttactaagaaccctgaccaccttctagattcttaatttaaatgtggtcatgggcaacaaagcactttacagatatgcttgtgtaagggtttattgttactgaaggaaggcagtggcagtttatacttaaatgtaattatttattgagcatttacaaacctggctaggtgctactaataatatctgctgttgatagagtgcttcgtgtgtgccaagtgctgttctaaacatattcacatacattaaactcatttagtgcttatgccaaccgtatgggcaaaatatgatttttatcctcacttcacagatgaggaactgagacagtcacagagaggttaggagacttgcccacggtcatgcagctcgtaagtgctggtgccaggattcaagtatggctgagtgcttgtcttcaaccctcctagatcaccccctgtggtgaagttctattaccgttcattacgtgcacagttctcaaaataatcctatgtggtaggtactattgccataatatcctaatctccattttataagtgaggaagctggtgctcagcgggggttcagtcctttgcccaaagtcatatggcaagtaagtggcagggccaggatttgagccctggtgaaccacaacctgtatgtttccagaatgggcatccagaggctggggtctctagttctagtcttgccattaagtcatacggtgacctggagcggggggtctctggaacttggattaaaaagccctcacatagtctctacaggtccttttgttattaattctgatactaggcttgtatgtctttccttctgtttatagtgtgacacccagcccctgccagtcccccatggccccgtggagccgagaggcggtgctgagtctctatcgggctctgttgcgccagggccgacagcttcgctacactgatcgagacttctactttgcctccatccgccgtgaattccgaaaaaatcagaagctagaggacgctgaggcccgggagaggcagctggagaagggcctggtctttctcaacggcaaattggggaggatcatttaggatcctccaagggaaagaggacaa

SEQ ID NO: 28528 - DNA, 2300 bp, Homo sapien
tccgtgtgcaggatgtttggtacatgttgttttgtgttttgtttgcagaaagtagatagaataagggccgatttgatttgggtaagggtgagcatggtacagtagaaaaagcgtcatacaaggagtggggagtcctgagttctggagatgactgtgtcgttttgttttcgtttttgagacggagtttagctcttgttacccaggctagagtgcaatcgtgtgatctcggctcactgcaacctccgccttccgggttcaagggattctcctgtctcagcctcctgagaagctgggattacaggcatgcgctgtcacatctggctaattttatatttttagtagtgacggggtttctccatgttggccaggcttgtcttgaactcctgatctcaggtgatccgcctgcctcggcctcccaaagtgctgggattacaggcgtgagtcaccgtgcccggcccattttgtttttttatttttatttttaagagatggggtctcactctgtcactgaggctagagtgcagtggcgtgatcatagctcactgtagcctcaaactcctgggctcaagcattcctcctgcctcagcctcctaagtagataggactacaggcatgtgccaccatgctcaatttatttttatcttttacttttggagatgggggtcttgccatgttgctcaggttggtcttgaacttctggccacaagcgatcttcccacctcagcctcccgggtagctaggattataggcatgagccactgcgcctgtaccatttcttttctctgagacctgacacatcacctccctatgttgagaacctctgtgtgaggtgatgtgatggcattagatgagctccaaggtcccgctcagatctaaccttccacaaagtagtggccaaaggacgaagaaatgacctgcattataacccctgtgatggggtagagagacctgctttataacctctgtgaaggggtagagagacctgcattataacccctgtgaaggggtagagacctgcattataacccctgtgaaggggtagagacctgctttataacccctgtgaaggggtagagacctgcattataacccctgtgaaggggtagagacctgcattataacattgtgaaggggtagagacctgcattttaacattgtaaaggggcagagagagggctgttttgcatggtggggtacttcattgtaatacaaaaaaggactgacactgagcttaatgctttcttaatctcactagcttggggaaagttttcctacaatacccaagatcagcccctcctccttgcatcctgatctatcatgggacattgtagctccctccagaccctaaagcatgcagtgctggaggcaagaagatttgggttgctggaactcacagagtaccctgtacttgttggggtttggcttgttaggggagggaggttcttggggtcccagtacttatggccgtgttctgtcttcattctcagatgagcaatggcaggcgctggtgagcgcaaaggcaagaaggatgacaatggcattggcacggccattgactttgtgctctccaatgcccggctggtgctgggggtgggtggagcggccatgctgggcatcgccacgctggcagttaagcgggtaagtgcatgcagccagggctgggggtggaatgtagtggtatggtcataagatgtaatgttttatagaaagaaaatgtcgaagcgttctaggaggaaatgatcgcaatgataagtgaaaaaaacaggtttcaaaagtatgtatagagtgatcgtcattacatgcatctagaaagaaacataccagatattacaaacagttttctctgggtcatgacgtggattatctatgtcttatatcatgtagtcttccctgagattttctgcgtggagcaaagtattctataatctaaaataaaaacaaaattactaaaagaacttactaggacagagcttctggggaggaagtaaattggaaggaaatagggaaagagggcaggtttatgtcctgtgtcctctctgctatttcagatgtacgatcgggcgatcagtgcccctaccagccccacccgcctgagccattcggggaaaaggagctgggaagaacccaactggatgggctccccacgactgctgaacagggacatgaagacgggcctgagccggtccttgcagacccttcccacagactcctccaccttcgacacaggtgagaagggctgctgcccctcctgggacctctctggactttcagtaccactcctgcactcagcagatgtttcc

SEQ ID NO: 28529 - DNA, 2300 bp, Homo sapien
aactcctgtattttttttttttttaaagacagggtcttgctctgttgcccaggctgagttgcagtgttgtgatcacagctcactgcagcttggaattcctgggctcaagcaatcctcccacctcggcttgagtaggtggggctacaggctggagccactgctcctggcgccaacttctgtatatctcaacactcacgattccccaaggagaaagaaaaaacatacttttattccagcatccagtatgccttgtgtataccagttttaaagttgttggtttcatctcattaaataataatgaagagtcctctgaggcagcaggaggatgtgatggagagtggcagaagtcagggtcaggagacctgagttctatgaacagtggcagcaacagcaaccattattgggcgcttacatgtaccaggcaggcactgtgctaagtgctttacatgtatgatctcacttcatgaggcaaggatactcatcagtagtctcattttacaaatgaggaaactgaggctcagagagtataagtcatttagccaaaatgtcccagccaggattcttttggatgcgctccccaaaatctgtcttctaactcctaccccatactccctccactgggagccttgtgactttgagcaagaagcttcatcccattgggcctcggtttaccattggaaaggatttgtgggcgaggttgaatgagcgcagcagatggcctgtggttatttagagcagtgcttccctggttgtttgatatcacagcgctcatacttgtgtggcccagtgaaatggaggcggaaactcaaagtttccaccttcacagggcctgactggaaggggctgaaggatgatggggaggtttcttgtattcttaaaacagactaccccttcccaacgcacaacccccagtaagtggccgtgggttcccaagcgcctctcctccctgggccatgggcgtgactgctgaaaagcgggttaggccggggagttcagaatccggagtgaatccgaactaccccagggagacggcagcgaagaaaatcttgttcttaggagaacgcaatcttcggacaccagaagttcctctatgatgctattctgtggcagccttgcacttgagccggatgaaaattgtaaaaacccaggttgggcgacaggacggcgcgtcttcccggctcctttccagagtttaggaggagccatgcagactcagccggcctttgggggtaggtggacaggcccggcgcgccctctcgaggccccttcaacctcccgggggcagcagcgccgtgtcggctatgaatggggcctctggaaaactcaggcttggaacaggtaaccccccggtttccgcaggccacaaatcaccacccgcaaccgaaggacgcgcaggctgggagcggcggcggggccaccagtgcggacctccactgagggcggcgggatccgaccgcaagggctggtccctgaggccactaaggggtgcgctgggctaaggccgcctgggggcaggagccagcgcgatcgtggcgggccagcaggcggggctggctgaggactagcagcgacccgagaccccaacccttcccacgcggaccccgggatccctctcccagcagccgcccatctagggccctgagccaataagagctcgagatatatatgattcaccgggcctgggccaatcaccttgacgcgcgctcttcgccagcacctcgcgcgataacctggcgtcctcggccttcacaataaaaactcttcgccggaaaacgacctttccccgcccactgcgctgacaccggaagcgaggcgtgtctgggagatcactccgcgctccggcggcgaaggaaagaacggactctgatcatagaagcctagtaaagtagtacacctctctcctttcgtgaggccataagaacaaactccttttctcgtcacagctacgccctgggcataaacggttggggcgtcaaagggagggagggaagggagcgggcgggaggagacggtcacgtggtcgcggcggaaggatgcgtctgtgctgcgtccccatagagacgaagtctataaagggccggcgggcggccacggcagccatttctactttgcccgcccacagatgtagttttctctgcgcgtgtgcgttttccctcctccccgccctcagggtccacggccaccatggcgtattaggggcagcagtgcctgcggcagcattggcctttgcagcggcggcagcagcaccaggctctgcagcggcaacccccagcggcttaagccatggcgtgagtaccggg

SEQ ID NO: 28530 - DNA, 2300 bp, Homo sapien
gacaggagcgcccccacaaatcctgcggccaggctgccagtcttaactcccacccctgactccacccgtgtgaccttcgcctctctgtgtttgtttcctcgtctgtaaaatgcaaaagacaattcctacctggaagggtaggggggataaacaagttaacaaatgtaaagcacgtagaacagcacaaatgcttgagtttgtgttggttgttattattactctctagccgatggagcttaaacggtgtggtctatcccggaggacgaactccaggtcccacactctgtggtgtcaagtacacagaaggccctcagaacccggctgagtgaacccagtggtcccttctgattcaccgttcacttattgcgtgtcttctccatgccaggtgctgggctgccagctgcagatggagcagcgaacaagcccagggctcctcccccaggtaagcagtgtcacttctaggccagaggggctcaaatgttttggtctaagaagcttcttacatttaaaacttcagaatcccctcactcctgtaatcccagcactttgggaggctgaggtgggcggatcacttgaggtccggagttcaagaccagcctggccaacatggcaaaaccccgtctctactaaaaattttttaaaaagaaaattagccggccgtggtggcgggcgtctgtaatctcagttactcgggaggctaaggcaaaagaatcgcttgaacccgggaggcggaagttgcagtgagccgagatcgctgcactccagcctgggcgacagagcgagattccgtctcaaaaaaaaaattaatttaattaaataaaataaattttaaaaaattcaggatcccaaagaacttttgtatgtaggcaactgatatttgccatactagaaactaaaacaaaaattttacatattcattaattcacttaaaatgacaataaacccattgcttggtaacataaacaacgtattttatgagaaataattgtagttttcaaaacaaagatatgtctttaatgtctggcttaagggaagacaactggattctcatgctgcactcaacctgtgcgatacctagtgctggttgaagtatatgaaaaacactccgccctgtccccatcctagcccgccacggagccacgagacccgagaggattggccaacccggcggagcaggttgcggacggcttccggggaaggaggggactgagcgccaggagccaggtagattgggattgagtaacacatgtgtctttctgcgccttggacccgcctccagtttccgccccttcttccgctcaagtgtaaacccctaacgcatgcgtcctaagaaagatgggcacttccgcccatccccctccggatccctctgttcgggctcgggtttccgccgagacgacagggactgccaggtcggaagtagtgtgaggctcgtgggcggagccaagcgccgccatgtccgccgccctgctgcggcggggcctggagctgctggcggcgtccgagggtgaggagggctggccaggggacgtccggcgcgggcaggaggatggtagtggctgcgggcgggagccctggatggaaaacaatccaggccgggcttagccccagtggcatgggaacgctgcgcgccctctgacctgggtctcttcctctctcttcccctacagccccccgggaccctccaggtcaggccaagccgagaggggctccggtgaaacggccccggaagacgaaggcaattcaggcccagaaactgcggaactcggccaagggaaaggtgcccaagtcggcactgggtaagttcgggaaggggctgaaagtgctgcctccggtgctgggacctgcgccccagaggaggtggcgcttgaggcagggcttgaagcgttcgcccggtattgctagacctactgtgtgccaggcgcggagcggggccctggacatacgaaggtgacagaacacgccaccgtcctggtcctcgtggactacggccctagtggggagagaagcatcaaagaatatcaaacccagtgtgtcattgctaagtgcattgaagcctatgaattaaaagactacggtactctgatggggacttaggccaagtcagccttctctgaggaagcgacatttcagccgagagctgaaggatgtataagagtgagctaggtgaaaagtaggagaatattctaggaagaatagtatgtgcaaaggtcctgagtcagaaaggaggttgttgcctttgagaatttgaaaaaataaaggctggtaaaggtgacctagtgaatgaggatcaaagatgg

SEQ ID NO: 28531 - DNA, 2300 bp, Homo sapien
ttggcagaaatgcgcccggccccgcggatgtgctgataactccgcgggaggctggggcagcgcctggcctgccgtcccgcccgtgcccggctgggctgcggacgctgcaggggtccacctggcacgttggcagaaaactcctccacccgggggaccgtgggctgattcagcctagatcgggaggaggacagagcttggtcctttgccctcctgagaggctgactcgctgcacatcccacgacctcctgggcctcaacccagcggctcactggcgtcccaaactcagctctcatccactcatttcgtgcgtttctgaactcttaccgtatgccaagcactgttccaggcgctagggatataacaatgaacaaaacaaagatccctgccttgcggagcttacagtggggtatgggcggggaaacagacaatacgcaatacacataataagtaagacaacaatccggctatgttagaagcaggaaggaggcatatgtctgaacagtcactgggttccaggccccacactccccttaggacaaaatcatggagtctgaggcctttgcgaccctccagcccagcatggcatcctgaagggccactcgtgtgtcacaggggataggtcctcgctacagcggtctccgcctagaacaatccccgctgcccatacatggtcagctcctcctcaccctccaggggcctacctgaccccatggcttgacaggccccacccagcaccacagcactgctctccctggtggctgggacaggagcgcccccacaaatcctgcggccaggctgccagtcttaactcccacccctgactccacccgtgtgaccttcgcctctctgtgtttgtttcctcgtctgtaaaatgcaaaagacaattcctacctggaagggtaggggggataaacaagttaacaaatgtaaagcacgtagaacagcacaaatgcttgagtttgtgttggttgttattattactctctagccgatggagcttaaacggtgtggtctatcccggaggacgaactccaggtcccacactctgtggtgtcaagtacacagaaggccctcagaacccggctgagtgaacccagtggtcccttctgattcaccgttcacttattgcgtgtcttctccatgccaggtgctgggctgccagctgcagatggagcagcgaacaagcccagggctcctcccccaggtaagcagtgtcacttctaggccagaggggctcaaatgttttggtctaagaagcttcttacatttaaaacttcagaatcccctcactcctgtaatcccagcactttgggaggctgaggtgggcggatcacttgaggtccggagttcaagaccagcctggccaacatggcaaaaccccgtctctactaaaaattttttaaaaagaaaattagccggccgtggtggcgggcgtctgtaatctcagttactcgggaggctaaggcaaaagaatcgcttgaacccgggaggcggaagttgcagtgagccgagatcgctgcactccagcctgggcgacagagcgagattccgtctcaaaaaaaaaattaatttaattaaataaaataaattttaaaaaattcaggatcccaaagaacttttgtatgtaggcaactgatatttgccatactagaaactaaaacaaaaattttacatattcattaattcacttaaaatgacaataaacccattgcttggtaacataaacaacgtattttatgagaaataattgtagttttcaaaacaaagatatgtctttaatgtctggcttaagggaagacaactggattctcatgctgcactcaacctgtgcgatacctagtgctggttgaagtatatgaaaaacactccgccctgtccccatcctagcccgccacggagccacgagacccgagaggattggccaacccggcggagcaggttgcggacggcttccggggaaggaggggactgagcgccaggagccaggtagattgggattgagtaacacatgtgtctttctgcgccttggacccgcctccagtttccgccccttcttccgctcaagtgtaaacccctaacgcatgcgtcctaagaaagatgggcacttccgcccatccccctccggatccctctgttcgggctcgggtttccgccgagacgacagggactgccaggtcggaagtagtgtgaggctcgtgggcggagccaagcgccgccatgtccgccgccctgctgcggcggggcctggagctgctggcggcgtccgagggtgaggagggctggccaggggacgtccggcg

SEQ ID NO: 28532 - DNA, 2300 bp, Homo sapien
cgaggctggcacggtggtgggcagagctggaaccaccctagggagggtgcgtttcagcccaggaggttgacacgtggcaggccaaggtgcctgggagcttatgtaaggcccgtggctgtttttctggaatcaagagcaaagccctgagctcaggagaaaactccgcctccctgaccagccaggggaagtggcaggaggtgccaacccctgcccgttgcccccgggagccagagaaatgtccaaatgcatcagctccgggtggcttggtcgacagcccagcagcagctgggtgggcaccagggacgtggaccccatctctcaatcccacggctcagactggccctgtaggggttctaggatcccagggaccccagtggacaaagttttagggactagtaccctttggggtgaggtggtgaggggcaggccctgggagtggctgtccgtcccatcttgccattgactggttgcggaggctctcggccagcgagggcaccatcagttgtcatgaagcccgcctgggggtctggtgctgggattctggcctctcaacaccacctagtgcttcacttggctgggtgcatagccttgacaacccgctttgttctcttggcctcagtttcttcacctgccaaatgggcataatagtcctcctgaggttgttgtgagcatcagacaaggccagggagtagaagtgctttgagttggagtcggagccagcaagatgatttgcatcacctagaacaaaatgaaaatgtgggacctcttgataagcaattaagaatttcatgttggtgacagaagaattctaaagcaagttcagggcccttctgagcacggggccctgtgcagctgcctgagccacagacccaggaagcgggctctgaccggaattcttttttttttttttttttggtgacagagtcttgctctgttgcccaggctggaatgcagtggtgtgatcttggctcactgcaacctccacctcccgggttcaagtgattctcatgcctcagcttcccgagtagctgagattacagcgtgtgccaccacacccagctaatttttgtatttttagtacagatgaggtctcactatgttggccaggttggcctcaaactcctgacctcaggtgatccacccaccttggcctcccaaagtgctgggattacaggtgtgagtcacgtgcctggcctttgactggaattctatttctgctgttactctgctacatgtctgtcctgtcccttctctgggcctcggtttcttcatctgtaaggcaaggaggttagactctaagattcctgggttctcagccttgtaaggcagtggctgggaggtccctgggtcaagggctcagctgtaggtctcagctcaggggttacttcctcagggaagccaactgtgattccctcctggcttgccagcgttcccccagtctctgattctgcagcaccccaacattgcctttgtaacctgcattgtcctggcaataatgtctgtctttacaatcacctcttttttcttgcaagttttctttacctttgatggtgcaataaatacatagctctagtcttgtaaaaaagttaagatcccttccttccttccttccttccttccttccttccttcctttcttccctccctccctccctctctccctctctccctcccttccgtctttcttttctgtctataattacttaaacattttttctcttaaataatgaaagatttcaaatacagaaaattgccaatagacaaaaaaaaaagagttaatatcacaattatattctaagaaggctttattctccccactatcttcgtttgccaaaactgaggctcagccagggtgagcagacttgccccatgatcacccagcttggaagcagattccaagttgggtgcagctgggccctcagctgtttcgtaatcctcatgcaagagtgagggtgaggggcctgtggggctcaggtggggctgtcagagctgcatccgtccacttattggtggagaggcaggttggggagcatgtaccaggcctgtccccaccacgtgccaccctctctgtcttccccagggctcccagctcagtgtggacatggctgagagcgcctccccgccctcctcatctgcagcagccccagccgctgagccaggagtcaccacggagcagcccggaccccggagccccccatcctccccgccaggcctggaggagcctctggatggagctgatcctcatgtcccacacccagacctggcgcctattgccttcttctgcctgcgacagaccaccag

SEQ ID NO: 28533 - DNA, 2300 bp, Homo sapien
ttgttttgtttttcatagaaatggggtctcacaatgttgcccaggctggtctcaaactcctgggctcaagtgattttcccacctcagcctcccagtagctgggactacaggcactgcgcctggcttatatttggtatttttaacagactttcaatcatctaaatataattcagtcatatgcaaattaggaatattttaggagaggttcttttcatctacctatttcctttaatcattattaagcagttaaactatattcagtttagaaaaatgaaggcgttactttttctttcatctttgtgcttcagtttcccttgcacccaatgagcattcattgaacctgtcctctgggaatggcactgttaggtgctgagacacgaagatgactccttgcaaggtctcctcaaggagacttttgtcaggtaggggacaagataaatgagatatgaagtgttataattactcacagagcttcaaacaggacatgtgaagatagacaataataggatagggtgaggaaagaaaagggtcagggcaagctttaaagagaaagtgatacttgaattgagttttaaaagatgagaggatggaagaaaaatggaatttctggtgaagatagcaatgtaagtttcttgaactgtcttaattctgtggtacataccagcagtatttttgctaaggctaacctccaactgcagatgaaaatgaaaaggaagctttatagagacaaagaaaagtttcttttctttaataactcagagcccaaaagtgatgaggatagcatgtaaatgtgcattctgaagtattttatgacatacattgtgatgtataatcactcaatagtgaatcacacaatttctgcgtcctcttttgggagcttcgaaagatagcctcttcctttggccctcttctacctcatcatgcttctcgtttcatgaacacaacctcataaaaataacggtctttcttttcgtatcccggttcagatggagctgttacagagcaagccctggcgctgagggtgttcctaagaatttgcatctagaaactcggaccaggtctataatgcgtagattcaatagacattcctggatcaggcccaccttcagtttcagtttcttacaattccttcagtgttttctatttgtaataaatattgtttgttatattctagggactattttatgtactttggtgatattaaccactagaatggacaaagatctccagcccagtggaacttatattttactaattgtcagaacagctctgaaagattgtttcctttcttccgtatagacaaagcatttattaaaattaagcttctacctaaagtactgagtttctttaatgtgccttgcatatagaaactgtgtggaagaagacattctttatttttggggagaaagcttttctttttctttcttttttttttttttttttttttttttttttgtagctgagggttctgtaaggatagaccagtatgatgtggcatattttccctagtttatcttgtaaaaaagatgaaagttggaaagtactaaaaatatggtggtttcagcgacagataagtgggtgaagggagaaatatttaaagacaagttatttgaagctttccttgctttgtgcttcagtgaggagagagggagaaggcagctaccaaaatgactaaggcgtcaattatagcttgggtgtactttaaataggcagaatatagaagcatagtaagaaagcagagggctaaataggaaagaattctgttatgacattaaaaaatcctatttattaaaattataacagatttgaaatagagtattttcagttttattttttgattatagctcttatttgttcttttatagatgctgtgcctactctctcagaaaatagtccttctgggcagagagatgtgagtttggacaagagatcagatggtatctttacaaatactgtcacagaaaacctcttggaaacacctttagaaaagcaatcagctgcagaaggtcttaaaacattgacaattttaccagcatgttggtcaagtaaagaggagtttatcagccccgacttaagggtatcaaagtcagattctactttccataaccaggcctctgtagaaacactctgtctctctccctcattcaaaatatttgaccgagtgaaggagattgtaatcaacaaggcctaccagaaaccagcacaatccagcattcagatggatgataaaatcctcaagacaaccacacggggtgagtctgccaaacacacacacacacacacacacacacacacacaac

SEQ ID NO: 28534 - DNA, 2300 bp, Homo sapien
agtgagattagataaaataatcttggaaaagatggcaacttgagcaaaggttgctgacactgtccacaccagtccttaatgaagtgacccgcagtgagagaacatcgttggccactgtcatctaaatataccccaaatttgaccatttctcatcacttccactgctagtaaattatagttagaaaacattaatactttaattcatcacacctagagcccaaaatgaacatacaagtggatcattagggacttttcagtttatttttgaaaggtggcttgggaagccatgtttgtgagttcatcccaagatggagaaaggtaagtgatttcctttatcgtttttctaggaagaaggttgaaaaaatagtaataccttatattcgagtgagttataggttacagtgtacctttgtatctgggaattcaaccatacagatactgcttgtgctgcttttcagatagaagactcaggcccagatagaccacctgactgactgaaagtcacacagatggttaaggacagagctatcactctcactagaattcttgtctttgactgtgctctgtcactctgttaaaaagcagcaaattgttttgataggatgttacgtcagagaaaagccaattgctctcccttttcttgtcccaccccaactgtacccctgtaaggtaacagatgttaacaatattctgagtatgccatctgtttgcctgcctgcctgccttcctatattcttgcctgtctgtctatctgtcttagtctgcttgtgctgctataacagagtatcacagactgggtaatttagaaagaagagaaatttattttctcatggttctggaggctggagagtccaggttcagggcactggcaggttcagttgtctagtgagggctgctgtctgcttccaagatggcgccttgatgctgcatcctctggaagggaggaatgctgtgtcctcatgtgacagaaggtccgaaaggcgatggtggaaggcaagcaagagacaaatgctgtgggaagcctcttttataaggacctttagtctgttcacaaaggaggtgacctcatggcataatcacctcttaaaggctccacctcttaatgctatcacattggcagtacttgaattttggaggggatacattcaaaccacagttgtatgtatttctttatctgcttctctcttccgtgtacatatatggtgatttcttttcctctatatgttacagcttcaaatcctattgtgtatgttactctaaatctttaaccatgtgtcctggtcatacatctaggtcagtatatctagatctaattcataccccttctttgtatgcctatattgtttgattattgcaaagtattattgctttttctttctttttttttttttttttgagacagagtctcgctctcttgccaagctggagtgcagtggtgcaatctcagctcactgcaacctctacctcttgagttcaagtgattcccctgtctcagcttcctgagtagctgggactacaggcacatgccaccatgcccagctagttttttgtattttagtagagacaaggtttcaccatattggccaggatggtcttgatttcctgacctcgtgatctgcccacttcagcctcccaaagtgctgagattacagccatgagccaccgcacccagccatatattgcttttaaaaggaaaatccaataatgtatttaaagtgaaaaatgtaatgccagtatataattttatcatatattaatgacttatttaccttttaaagtataagaaaaggaatatacttatcagtagttctttatttgctgcaggttttttcactgctgagatttttatttttaaaaaaatttctgtagaaaaaaaattaattatagccttaactagtatttccttttctaagcagagtcaatgtatttttcaggttattatatccgggaaaaatctaagcaagtcatcacattgctgatggatgaaccattgctgtgtaaagagagggaagtggcatgtcggactagacagcgtacctcccactctatattgttttctaaaagacaacttggttcaagtaactcactgacagcgtgcacttctgcccccacaccggatatttctgcttcagagaagaagtataagcttcctaagtttggaaggttacataataaaagtacgtataatgaacattggcctaaaatgcaacaggtatcattaaaaatgatttaaaaatataaaatattatgttttagtactaaattattaatattatttagtattactattaccatattag

SEQ ID NO: 28535 - DNA, 2300 bp, Homo sapien
gctcacctcctccaggaagccttccctgactatgcaaatatagacaagtccccctttcactcccgtaacattgtttgcctttattatagcaactacttacaattgctgatttattcctgtttcctctattagagtattaaactacaacttccttctagtctcatagctcagcatagtgcttggcaaatagcaggtgctcaataatgtagaatgtatgcatattccacaaactcagctttctcacctgtacaatgggataataacgcctacttctcagcattcctttgagatttacataagctatacatataaaaaaacttcataaactatacctcaatgtataaaatacttgtagtttgtcccccactattttataaagtcaaaatacctcaacatagcattcaaggccctgaacaatgttttccaggtcaccttttcgatttccctctggctcccaccccattactctatattatagccagtcaaataatattccaaactcaccaacttctttcatacctcctatcattttatattggattcacctatctacatgtcagtatcaataatgtgggctattattattataattatgactgaagtagtaggagatagaaacaaatgttgcttttgtctactaagtgttttgttatcctctgtcttttcccctcatcctagtcaatattccattaaaacacaggttcgattacatttttcaatgcctactggataaaatcaccttgtagtatggataaggttcttcatgatccaacttccctctgttatttaaccttcctctgctgctccactaatagcctttgtgacagttgtagtaactacagtacatgtagtttttccaagataataggctggctcagctttcatgcctttacacatgatgtgtcctttgcctcttacgtcctcctctactttgtctatccagtgaactccctgtcatcctttaagattcaattcagatgtaaactcttctgtgaaacctgcccttaaatactcagtggcagaattagatgatctcttctctcttactatgccatacatatcttgttacaatcttctctgacggtgcctgtcacctccactagcctgtaaacgtatccagcagagggctgctttttatctccgagtccttactgtctggcacaaagtgggtgctcacggaaaatcagttgaatacatcaacaattacccgtcagtggcacctgaagccatcagtcactggagctaccccatcattgtccatcacacacactgctcttcatagactactattacattctcagtcctttgaggtggcaatcacgtgctggtggtatttctagtcagttgaaatgacagtagtaacacacttttaaaaatgtattcatgtgccatgctggtgcgctgcacccactaactcgtcatctagcattaggtatatctcccaatgctatccctcccccctccccccaccccacaacagtccccagagtgtgatgttccccttcctgtgtccatgtgttctcattgttcaattcccacctatgagtgagaatatgcggtgtttggttttttgttcttgcgatagtttactgagaatgatgatttccaatttcatccatgtccttaaaacttaaataataataaataaaaaaaaagagatattatgctagaagtctgagtattttactgattttccattttaagaataaattatcatggcaaattttaagttacatacattattttattgtctactttttaaaaacattatcagcttaccttggcattttttttctttttttaatgtccgtttttacgttgtgaacatttagtaaattaatttatactcatttttatttaattaagaaagcagctaagaataaatgctagtgtctgattaaactatttcccagatctcaaaaaaaaaaaaaaatttattctttgaaaggaggattagggcagtgtcacagcccggcagcctgtgaaacgaagacacttaccttcattccccttggtaccctccagctcaggtatctgcaaccatcttgcttgacgccctgacaggaactgcaccaggccagaaagtgaggaagcggaagtggggaccggcctgggcccttgagcctggctggagtaggtggaatatcctggggagaggaagtttggtcgttgggcagcggccgactttcctctcaggtaacagcctctgcttgggagtggtggtggggctcaaggcgggtctggaaacatcggttgccttccctcctcccgtttcttgccggcaccgtcggagtccaggt

SEQ ID NO: 28536 - DNA, 2300 bp, Homo sapien
ttgctgctatttttctgagtatctcatgatagtgagtactgaaatgctggcattctcacattagggtctttattcttaggatctgcctttgcactcgttcagttacagagctgttatgaaataaaccactcaagtggccttgcttccctcccactatgctctacataacatgtctgtcaatcagtacttactaccaaaataacttgcctttgagatttttctgttctgcaatctgtcccatgcttgtaaggggaaggattatattctgctccctggggagtagtgcctggtgcaaaattagcttcctcattagggtacaagctgaaaacaccatgatactttccatgtaacaccattcaacattttcccttcgctcccactccccaaccatagaattttagggactcctttaaccatttcaaaaccatcgacttgggagctatcaaagaataaggactgtagccagaggatttcagcatttaaaaacttggcaatagagctgttcagtgtaatgatccaagaaggtccttagaaggctgaataattctgaggtcaaggttgagacgttattatttttaaagtagcaagatgttgttatttttaaattttatctttataatgtggaaatagcagagatccttttcagatataaccaggatttaagaaaatttgacaaagttgcattaataaaaagaaagcctgttattaaggagctacagggccgggtgcggtggctcatgcctgtaatcccagcactttgggaggttgaggcgggcggatcatctgagttcaggagttcaagaccagcctggccgacatggtgaaaccccatctctactaaaaatacaaaaaaaattagccaggcatggtggcaggtacctgtaatcccagctacttgggaggctgaagcaagagaatcacttgtactcgggagacggaggttgcagtgagccaagatcatgccattgcactccagcctgggcaagaagagtgaaactccgtctcaaaaaaaaaaaggagttatggatagaaaattacttcctttaactcattcgacaaatatttactgagcattttctgtcaccttgacactttgctgattcttcttttctatttcaataaaaatgttgggcaattataaccaaggaaaaggttttaagaaagtaaattttaagcaaggtttagatataaagaagcaaagagatggaaaaggatgccgtttcacattgcagaaaaagtttaaattttagaaccccaaattgaatctctccttgacactctcctcttggtattccagggattaatgctaggaacatcccagtgagccaacatttccctcctcatcttggatccagtccccaaactctgaatggtgccacttagcaagtagcaatgtctctaattttctgtaaaagatgcaacgttggcaatccattttctagcaagagcaaagagaaaggaagaggccttcacaagttgcagttgatatagggggaagggtgagtggtacatttaaaggtaagaactaaggaagttgaaggtaacaaaactcaaggtcaatggaaagtcttaaatcccagaaagccttcagtctaagactcaacagaaattgaagtcccagaaattgaaggaactggttccacctcatgctggactgtggcaaacctggggtgagaatgcatcccagctcagaatgtttcttctttttttgtcaagagtaatattagaggctgagtgtatgaacaaagcatctttcctgggattttaacattgtgagtgatcgagggtgctcttaaataagttcccccaagaagccctaatgttcctctggatgcatgattatactaagagaataagagttttccttaagatcagcttgctgatggaccatatcaagaactataaattttcttatgtgaacacaagtgttcaggggggatattgttaaaactgaaaccaagcataaagaagcaaaagtgtttcagtgaacctcctgcattttagttcaactctggcagcaagaaaacaaaaccacataatctaaggctcacgcccaactctccgaagccccatatgtgctagttcctgtgtggtttgcctacagactgcagggctgactagggttagtttggaggagggagtaagaggtggggaggaggaggcacagttaatggatctgtaaacttgcaccctctttcagagtggtacatggaagacagcacaaagtggatccatactctgaaatgcagtaactctgatgcttgaatttgtctcccttcttgccagaaaggattctaata

SEQ ID NO: 28537 - DNA, 2300 bp, Homo sapien
aagattagccggacgtggtggtgggcgcctgcaatcctagctactcgggaggctgaggcaggataatcacttcaacccgggcggcggaggttgcagtgagccaagattataccactacactctagcctgggtgacaaaacgagactccgtctcaaaaaaaaaaagaagtgacaatgtaggatacccattcatcagcaaatatttaatgtgagcaggacaatgtgctaagtccatagactgcaaagaggagtgaggctgggttcccatcctctggggcttacaaggtagctggagaagtaaaactcaaaccacaaagtgaagttaatagtcaccaatgaacaacatagtaagctctgcactggttcagaagaggacaggagtaacaagacagtaatcctaaaggagatggacttgaatttgagctggacctgaagagtcaggagctagagtgagtaaaggcagagtggtgggaacatttgtgaatcaaagctcaggtgggggttacggcaggcagggtggggatagactgaggatgactttgaatgccatgccactctaaggactttggacttgactctacaagcaaggtggaattattaagagattttgagtagaaatgatgtgagctgaacagtgcttttgagaaactaaatctagcagggatcagtgctccaaattaattggacatgtttcagacttgagatcatgagaccctgacccaggctggggacaatgggatgtctccatcatacattacattcctgtgaatacttcttacagattcatatgaaattctgcctcaatgtgcctactgtctctgcactgtaagacagtgatattgtgatcctgtgtgctgcttggaaccagcctcattcctttagcaccccagtttggacttggagtgggcccaagtgcagcctgtacacaaacctcaaagaatccaggcagcatagatgtaaaagcttggagccctccaagtccacctcctcaacttaccaagaaataagctaactcttgctcatctccctaatgacggattcagcatgtggcctcagatcttcctgtgctccagcagtgcttctgaggccagtccaaattctgctttgaggtgtgcgtgtgccaattgtggtgcaatccagaagcattttggacgaatgaaggagctgtttgtgttttcttgccctaattgagatagttgaagctcctctcccttactctacaccaagccccccagatccggtacctccctgagtccccgacttcatctctgccttgcttcttttccacaacaccctatcagttcttgcatcctgccattggttgtgctgtcctcattatctgaagcctttacctcccctcttaggcctcatcacctccaggagactctccatggcctcagcccctcccttaggtggaccaagcttcctccttggagctccatgctaccctgcatagggctcagtcactttgcctccatgatgtcttgcaattgtctatttatatgtctgcctcctgtccttcaactgtgagctccctgaggaaaggaactgtgggtatgcatcattgaatactcagcatctagcacggtgcctggtacacactaggtattgaaatgtctgataaatgaatgacagttgcatatttgtctttttggtatattcattcatttggtaaatatttattgagtaattacttataattgaattggcgctgtgtagttacacttaaacatcaaaatgagcctatcctctcaagctccaaattatgcatgcataaattatacatgtgaagtgttaacatgcacacgcagcagagagtgtgcgtatctacaaataccagagctagcaaatgaaataaactgtgtgccagatgtccctgaaatttacaaagaaccaagaaccaaaaatgacagttagctccgtaagcccaacaaaagaaaaaaaaaaaaaaaaggaaaagagcaaaaaagcaaaagaacaaaagaaccttgagcataaggaagtggctatggttttttctacatgctctagctgggggtggggaaaagtcataaaagcattctatgctggaccggttcgtgttaagtctgagttcctcaatcgctggctctcaggagctgtttggaaaattcgttgccatgcatgagtcgggggattggttttttttccactggaaattgttaatggggactgcattagcggccccttatcgctttgcctgatagagagacagcaggttcgcccaaacaattctggaaccctgatcactgccaattaggggagtattgtctggctgacata

SEQ ID NO: 28538 - DNA, 2300 bp, Homo sapien
atgtcatgttggaaagatcttccccaaatcaaggtcttatctagagcttgcctgggatattttttcatttctaatttatgtaactttctaatatgtttagcatttgcccttcccttgtctccatcctgcttattaaggtgaatttgcatacaaatgggaccttggtcttcaggaccattcacctgacacttgatcccacgaggcgaccactgtctactgttgataccatgaggatgacccacagaagtcatgtctctctgcaaactagaggcaaggccttaattagaagaagccttgtgtgttaaaatgatggggtgaatcaaatcagcaaaggcatttagcattaacttaggagggcagaatactccttcctgttgagtgggtcgtcctaggtcacaacaattttaatttgccttcgatagatggatcttgaagaaagtgtacaaaaagtatatttgtgatggtgttgtttgggagtacgttttgactcaaagagttaactgtgacattttactttggctcctggtctattttttgcttaacatctacctttgaatgggtaatagtcatctctataaattaccttcgaaagattgaacaattgtggagaatcagagaaatgagccccttgctatcaccctgttgcagtcggctttaatcctctgatctcctggcgtttcaccctctcactggcagccaccttccttatttacccaaatcttgttaacttgggtaggaattcccactgagaggacaaatgtggtcccagttgactggtcgctgaaagtctattaggttggagagtatttattttctaccctaaagggtttgaaacttagggaaattttgatcaacaagaaaataacagctttcaagattgtcctgacagttaagctgtcttagcagagaatcacaggatttgatagtcatggagattagttctcaaatttcaatgagaaaagttcataggagatggagtgaggaaagaaaacttgtgctgattttggtcaggctacctttgctggggaaaaattcattccataaaattattttaaaacgtaaatactatttagctttatctggtgtaatactttgcatctataatttttttgttttgttttgtttttgagacagagtcttgctctgtcacccaggctggagtacagtggcatgatcttggctcactgcaacctctgcctcccaggttcaagcgattatcctgcctcagcctcccaagtagctgggattacaggcacgtgccacggcacccagctaatttttgtatttttagtagagacagggttttgccatgttggccaggatggtcttgaactcctgacctcaggtgatctgcccgcctcgacctcccaaagtgctgggattacaggcatgagccacagcgcccggcctgcatctataatttgatttaaccttgcaactttattaattgaatattatgatcaccattttatagatgaggaaatggagactccaagggtttaattacttgcccaagagtctacagctatctaccaacaaaactgggattggagccagctgtcttaccattacatccccgctgcctcctaaagcacagctctagttcatactaaatgtattacataggccgactcatttatctttacatgggtctcatgcattacaagaagggggccactattttaactcaattcaaaaatgttaaaatcaaaattcccaaaatgtacttggtttataatatatcataaaataagtaatctgaccaattgagcctcccaactcgaagaccaagaacttctttctactcccaaaccatgcagaaggaagctgagttccccactggccaatgctgtctaattctcttaaatgattcagatgtaaaagaggaaatggcatccgtctaattaacactgcctggttaaatatagctgccaagggacagccttgggacagtgtttacagaatagtctttccagcccctcaggcctcaagttacagatgatagcaagccttccctccttatcagctgcaaacagagatgcccccaaaagtggtgtcaggccaggatgatgaaaggagaagggaaaggctgcggatggccttcatttcctgctcctggcatctggggattccgagaatgatcccaggacctagatcctatagattccggcagctcttcctgcaaacacaagcccttgttgtgtgcctgagccttgctctccggcctggagacatccatctgcccactctcctaggaactgctgattaccaggaagcaccatcggctctgctgccctccc

SEQ ID NO: 28539 - DNA, 2300 bp, Homo sapien
tcatcaccataccttacattaatctcccacccacagcgccccatctctcctctcagttttcatgttctccacagcacttaccatcatctggcacgcttcagatcttaattattttgttcttttgtgtgtgtccccctcgactagaatgtaagctccctgagggcaggggtgtgtgtctgttctgcccactactgtgtccccagtgcccaggaggggcccagcacagtactagatgttcagtaaagctgttgaatgaatgaatgaatgaatgaacgaacgaatatgtattattgaaaccatgaccactcatgtctaatatgcaatgtgtggtgatttttacaaatctttaaagaagccccctatcagattgcagtcagaggacaaatgtgtatttcctaaatccccttcacttctgaaatgtttcctttgcgatatggctgctgtggtgcatactccattcctcttcccatccccattacatttcccacacgtggcagtggtgtgtgtggtggcctcttgtttagccctgtagaattgtgtggcaaatactcaggcagaatctccaggccaccagaaactgctgctttcagccctctcagagcacagccaaacttccccctcagtcccagtgggggactcagtctccagtaagtacatccttcctgctacctatgtctcagtttcccaaattctagaaagcacagagaattgctcacaaaggaatccaaagccaaggcctgacgggcttttatcttaaaggaacatgcgtatgagccttctggtgacagcaattagagcagccaccttgaagcaatgtgacacagtcccacctttggccgctgagtgattgcagacactcattttgcttgtctgtggtggagagaggtctctggcctcctgctttgaggctgcagccacagcttgcctggccctgtgtaagtgtttgacctatttcatacatgccacgctgtatgcagctgtacctccaggggctgccaccctgaccattctgctaaaagagtaatttctcctgtttcttcttttccacagtaaagattatttcccagcctggatttttggggcaggcccaggatctggttgtatagacgccgctctctggcggctgccagcctcgctgatttccaagcatgtacactggactccctaggaacactgcagcctctgctaggcacactgagcaaagcccccttgtgctccatgccagcctaggtaacgtgacgccctgggctgtaactttcctttaatacccagggaggaacctctaggccactgagacctcagggcaggcatgagcaccccaggccctgctcagccggctgcacctggttggctccagtgcctgaagccttcccttccctccccagtgcatcctctgtcctcgcagctctggtctatctcttccgcagctgccggcaggcggctgcttcctgcagtgagtcactcccacactgccccattttggtgcagcgacacatttccatgattcgtttcccaggctggagagagacttctcctggagagaaggaacaaagagggtgaatcaaggggaatgctccctcgcctttcctgaaagctgcctggagcactggtttgatttcaaacagcacctggtctctctctgctccctactgtacagagtccccagcctctttccctctgggtcacctcttctccacgtctccctcttgtcactcctgtgtctcatcctgatccttttgtttgatctcgcccccacagatggtttcacgaaggcctctctcgacaccaggcagagaacttactcatgggcaaggaggttggcttcttcatcatccgggccagccagagctccccaggggacttctccatctctgtcaggtactgaccattcctgacactgccttggcccttctcggcctgttaacctcacagaatgctgaagccatgaagggacctctggaatatgacccaatggtcagaagcatggtggcctaggggccaagcatggcagcagcttcacaacctgctgctcccagtgccttcccaaaacatgcacacaccactctttagaacactggtgtgtgtttgaaattatttctacgcccatctgcctccccttctagcccaggtgcttctggaagggcaggattttcctctacttcatctttatgcctttaacagtgtcttgcataaaagagagacactcagtgagtatttgtggaaggaaggagggataggaggaggagaactcccacttgtccagatccatctgggggtttaaatcttaaccttttctttta

SEQ ID NO: 28540 - DNA, 2300 bp, Homo sapien
atattcccataagctccctccacatacctttctcttggctcaaattctttaagaaatgtacactgggtgcaaactgtgtaccaggcacatggtaggcattgagtaaatgtttgttgagcccatttgctcccaaagcatttctgactgtgtttattaaaacactattgggccatgcctgtaatcccagcactttgggaggccaaggtgagtggatcacaaggtcaagagttcaagaccagcctggccaaatggtgaaaccctaactctactaaaaatacaaaaattagccgggcacggtggcaggtgcctgtaaccccagctactcggaggctgaggcaggagaatcgcttgaacccagggggcagaggttgcagtgagccaagattgcaccacggcactgtaacctggtcgacagagtgagactccgtctcaaacaaaacaaagtaaaacaaaacaaaataaacaaaaaaagcccaaagaaaccactctcattactcctatcctcttctgtgtttgtctgtctctcccactgccctgagctcctgtgtgtctccagactattgagtctggcatcttgtagggcgtcaagtcgtaataaactaagtgctctcccatctaaggacacaatctgtctatatgtacttaagagtggagcattaccaggagtgaagctttccagttcccaagaggggtaaaggacaagtgaggtgatggacaccttgctgctcaccactcccaatctttgggctgacacaggatgccagaactgattattgtaaaaaaaaaaataataataacaataatgtgcagacatttgaaaatctaactctcattttttccagagcatgaaaggaaggcctagaaatggtaagtgaccttttcaaatcccctggggtgaaaaccaggtccccaataacctgtcgtttcacaagaaaaggagaaagggtaaaggcggccgtgatgtcagcgaaagacctccaagacagaaaaccttgcagtccccgtgctctgcctctttcacgggagacctgggcaacgcacacgttgctaggcctcaatttcttcaactgtaaaatgagggggttggaggagcttgaaaagctccttccagctctgagatgctgcgctataaagtgagagaaatgtgaacctttagttgttatgatctgaaaatattttgaatgtggagaatcaaattgtagagcagtgcatgaacaacataatatgttaatgactaagacgattgtatttaatccgatgggaaacagcagagctgctgccaccgctgctgtgtgtgtgcgtgtgtgtggtgtgcacgcacgtgcggtttccttccttgagctcaaacatacattttgaatcactaatatagtaatcatgtctctggcagcctatcttgcccaaacacacacggagagacaccacacaccctacttcaaattaaggtgggggcggggggaattccactgctgctctttacatcatttctgtttggatagctattttttaaaagaaagttttacagtgaaggtgttggactcccagcccagaagggctctgatctcagaactgggacgcaagggtggggagctcgagctctcattagcatttcgcttttgcacaccccctgcccgctcctcagccgtcacaatcccgtcctgcagcaggcccccccaccaacaccggaccctcgacggggaaggggtcagctcggcggccccagaggccactgggccagaacacgtgctccggactccacgtgcgcggaaaatgaactcgtacccgcgacgcggccggcgggggcggatggcagcgagggccggacagcgaacctttaccccgcggaggagtcggggccggagcccgcacgtgggtctgcgacggccccgccccctgggggcgtcccctcagggactctagccccggctggtgggccctgcaggcccgggcccgaccgcgtccgccaggccgcccggaggtcccggcgagcccggcggaggcggcggcccctccccgcccgacggccacgcccgcgcggattggccgctccccgacggcggggcggggcgggacgggccggggcagagctcgcggccaggtgaggcgccccgcccctcggcggctccaggtgcggctgtgggacctcggaccgcggcggggccggggccagggccggggccggggccggggcgccatggccgagtcccagctgaactgcctggacgaggcgcacgtgaacgagaaggtgaccgaggcgcaggccgccttctactactgcgagcggcggcgggccgcgctgg

SEQ ID NO: 28541 - DNA, 2300 bp, Homo sapien
ctctcttctcctcctcctctcttctcctctcttcctcctctcctctcctctcctcttctctcctcctcgtttcctctcctctcctcctcatttcctctcctctcctcctcatttcctctcctctcttcctcctgtcctcctcctctcctcctctctccccagggtatgtacatggggaacttaagagaaagtttgttgtttagtggttcccactctactggcataaacattggtgataattcagatggggtctgttgcagtcttggtgacagtctttgcagtgtacccagagtacttaacgacaccctctcctggatgcatcgtctccacagagcacctttctgtgctctggtggcagctgtgccagttagaagttgcactggttccccgcagcctgccttgagatactttactctggcagcggttttcttagccgtgcattgcgacattcagcatatgggtgtagacacccggtatggctgggtgaacggttcatcttgtgggttcttccttaattgggctgcccttcccctctattagttcaagttttgacctttctggaagtgtcgtgttccctgagctttaatcagcaccgttggcagggcctgctgggcacggcattgagcagaggaacgacatccccaccttgatgtctgtgccgcgggaggcgcgggctgcctggctcctcgggagctcagcgggccccccatgggctgtctccttctttctcgccccctctcctgaagtggtggcccctttgttctgggctccatcactgaggagagaagagggcacctgcatttacccatcgctcacagcaggacaagtaccgcgctgttgcagcatctcatttaaagctcagaacagccctgtaaaggcatcacctccccactctaaaatgaggtaactgagacccagtagatgactcactccaagccaaacaaccagtgtgactttctgcttccagaccatatattatcctgcacgcagcagccttcactcaaagtgggacgtccccctcgtgcattcaagtgacctgagtgggggtggaagacggaggctgctgttaaaatgcattttcttgggcctttgctgaattcgagtctttgaggatggggccctagaatctgcatcttcaatacgcatacccacatccctgctcccaggtgattctttacacactgaagtttgacaacctgccccatagaccttgatcctctctttggggagatcagaaaaggagattccacagctggagatgtgtgagtcagaggctgcaggcagacccagctctaccctctgtgggaaagggaagaattgccctctggtcccagatagactaactcccctgggctgccacacagacggccattctgggagacagcagtttgacctgtttgctcagctgctgtcctttccaccctgagagacttagggcttcagatgtggggagttccccccatttgccttataacgatccctcataactgcacagcgtttttgtgggatttcgtgggcatgatctcatccgagccttccaacagcccttgggaggcaggcagggcaggtgtgggaggcgactcggccccaggcgcacatgggtaggtaatcagtgggaaagtgtccctagctgcttcccttccttccccaggataagtgactgtcaccaaaaggcccccccgagatcagcaagcttggcctgtggccttttgctttttcacacccacagaaggggtgaagctggggctctttgcaggcaacagcagccgcacccgcccgagtcctgagctccacgtcagcagggcaaggggacggatggtgttgtctttctctggccatgcatctcagtttgcatcctgctgtgcaggatgaattggagggcagaggtgagtaggagagagcagttaggaagctcatcaaagcatggtaggaaaggaggagagtccgagctggggcggtaccagtggggacagaaaggattaaccctgagaaggtgcccggggtggggcctgctggattcagtgactgatgggatttggtcggtggggaggaggaggaggcctgggcttctggccagagtgactaggaggatgttgatctggggagtgcctgtgtggctgagggacacgtccaagctgcagtcggctctgtggttgtggacacctggcagagccatgccttctctagtctgggtcatccaaacacacgtggggtgcaggggccaggtggagccctcttgtcgtttttgttatctaacggtaattacggagtccagaaagagaattggaaatgccggcagt

SEQ ID NO: 28542 - DNA, 2300 bp, Homo sapien
ttttacgatcagaacaatgtgaaggacacaaagatgaaaaagaaaccatctgcttcaaggtacttacaactgaaatgtatcaaacaattacccagaaagtcaagcaccaacttaagtgctaaaataggggtccaagcaaccaactttgaagattaggaaggttttagattctgaatgtttctcattcattgtgtttttgagttcagaatccccatactggaaggctaatatggggtatgtgcatacaattttaaggactcacgttcttacaacctatattagaatttgacgcacgatctttcttctgtccttcttgcagttgccctaggaatacatgccacttactcttaattgacgtttatgaaataccttggcttcatttgctgaaaggctctaagtgttgagcattgttactatgttacaatggttgttttattattaaagcagtgccaaggaggttacacaacagcttggatcaggaagtgaaacaagggcggtgatcccactgaagctacaggggatggggatttgggacggtaaaatgttaattacccaagatggaatgtgggctagagtccagcgttgtgctcctggagatcatttcggtcgcaaaagctcactggcaatgggtcctaagcgtcctgccctcctctggctgaaatgttggattcacttcgatgaatgctgctatagggaaagaacccagtggccaccagccaggagcacacgtcttgctcagcatcaactatcctggaagatttccaggagctgaagggctgttctctttgcatgcaataaattattcatttctaagacgatttattctgtctctctctttagacttgatttctcctagttttccagctcttgaggactctctccaaagaatgagttgtagatggttggtcaggggttgcgagtggtgcctaggcttcgcataaaaggaggcagaaatgtctaccttaaaggggagaggaatgggtcctggggaggaagatgtggtggaggcaatgacaacctttccatagtaagtccccaacaaagtcacttctagaaactgactgaagactttgagttccaaatgaaacgtttttaagatgctaggttggctgacaagtacatcgtctaaggtggaggcactaaagcataataaaaagagtgaagtctctgcagtttgacccaggaccagatgccaggcccaccaacgactctgtatctggatgaccttgggcaagttttctaagctctcgccagccttaatttcccatctataaaaactggatactgcattactcccaggtttaaccagataatgtttgtgaagaaagcagcccaatacttggcacaaaataggcaagggagtcactattatcgtcaactactggccaaacaaccagagttgaccccaaatccccagtaaacaattaaccgtagcagagcgaatccggatctgacgcacctatttgcccaataaggtgccaggaaataacacagtggagtcaaaccaatggtattagcccttgttgatggacgggctttcttgctgttccaccaatagcttgaagatttgactggggagtgacatcctgacagtccaatgacgcacaaccagcccacactcagcacttcggaggggataaatcaaggagccggcacgtatggattccgttatagggcagtactggttggagagaggagcttagggaaacagcgccgaggcaaggcactaatgagctaaaaataaagaaaaaagacgatggttgcgccaagcgacctcggccgccatcatgctctaatttcccctgagtctctctgggtcctcgaccgaggaagcggcctctgggatgctgagggggtgtgtccccacatgattggctcaggcagctcagccaatcctagctcgttaaacgggaagcacttaaccaatgaggggcgaaggcagcaacgaggaattggaggggcggaacgacagcttgacgggcacaaaagccagccagtgagagccggaagcatcctccctgcggccaatggagtggggctctgggcgggcccccgagtgtttgtgttgtggttttgggggagggatgcggaggggaaagtttgtttattttgtttttagtttttggggtccccgtgctgctgcaaggcgaaacgggagggagtgacccctgcgcccctcagtcccccctacgacgtcgcctccatagtctgcggagaagcggagactgcgcgcctcgcctcacagcgaaacgccgcgcactcggagccggcacggctcggcggtgagtgaggtgcggcgg

SEQ ID NO: 28543 - DNA, 2300 bp, Homo sapien
gaaatgttggattcacttcgatgaatgctgctatagggaaagaacccagtggccaccagccaggagcacacgtcttgctcagcatcaactatcctggaagatttccaggagctgaagggctgttctctttgcatgcaataaattattcatttctaagacgatttattctgtctctctctttagacttgatttctcctagttttccagctcttgaggactctctccaaagaatgagttgtagatggttggtcaggggttgcgagtggtgcctaggcttcgcataaaaggaggcagaaatgtctaccttaaaggggagaggaatgggtcctggggaggaagatgtggtggaggcaatgacaacctttccatagtaagtccccaacaaagtcacttctagaaactgactgaagactttgagttccaaatgaaacgtttttaagatgctaggttggctgacaagtacatcgtctaaggtggaggcactaaagcataataaaaagagtgaagtctctgcagtttgacccaggaccagatgccaggcccaccaacgactctgtatctggatgaccttgggcaagttttctaagctctcgccagccttaatttcccatctataaaaactggatactgcattactcccaggtttaaccagataatgtttgtgaagaaagcagcccaatacttggcacaaaataggcaagggagtcactattatcgtcaactactggccaaacaaccagagttgaccccaaatccccagtaaacaattaaccgtagcagagcgaatccggatctgacgcacctatttgcccaataaggtgccaggaaataacacagtggagtcaaaccaatggtattagcccttgttgatggacgggctttcttgctgttccaccaatagcttgaagatttgactggggagtgacatcctgacagtccaatgacgcacaaccagcccacactcagcacttcggaggggataaatcaaggagccggcacgtatggattccgttatagggcagtactggttggagagaggagcttagggaaacagcgccgaggcaaggcactaatgagctaaaaataaagaaaaaagacgatggttgcgccaagcgacctcggccgccatcatgctctaatttcccctgagtctctctgggtcctcgaccgaggaagcggcctctgggatgctgagggggtgtgtccccacatgattggctcaggcagctcagccaatcctagctcgttaaacgggaagcacttaaccaatgaggggcgaaggcagcaacgaggaattggaggggcggaacgacagcttgacgggcacaaaagccagccagtgagagccggaagcatcctccctgcggccaatggagtggggctctgggcgggcccccgagtgtttgtgttgtggttttgggggagggatgcggaggggaaagtttgtttattttgtttttagtttttggggtccccgtgctgctgcaaggcgaaacgggagggagtgacccctgcgcccctcagtcccccctacgacgtcgcctccatagtctgcggagaagcggagactgcgcgcctcgcctcacagcgaaacgccgcgcactcggagccggcacggctcggcggtgagtgaggtgcggcggccgcgccgtccttcccctcccccgcgccccgccgggacggagcggggcggccgggggtcggcgagggcgcccccgggggcgcgcggcgcggcccggggcggtgagcggaggcgcggcgtgtgcgtgtcctcgcgagggagcgcgcgtggggcggggagcgggccggggagggggcgtgagcgcgcgcggggctggtgcggccggcggcgctgagcgcgcgctccgcgggagcgggcgccgccgagatttgagtcgaggggcggggagggactcggggcgacgtccggcgcgcgggccggggcgccccgaacggccgggcaggcactggcgggcgcgcgcgcggctccgggcgtcacgcgccagcaggtgtgagctgggggagggcttccgggtgggctggcccggccgtcgagttcgcttcccgtctccggggggcctcggcgcggggacaccttcccggcccgcggaggcgcgtccgcccctggctggcggtggcagagggaggcgtcaggcctcggatcctcgggtccctgcgcagcgtcccggcctgtgtgcaggacctgcgtgacaaggtgaatgcgttccacacccctcgccagggccctgcgtgtgcggccacttggggaggcggctcagactctggacaaggaaacgagg

SEQ ID NO: 28544 - DNA, 2300 bp, Homo sapien
acatcactatgctccagcctggtgacagagcgagactttgtctcaaaaaaaaaagcaggtttgggagtgaataggatgcagtctgtatggagcacagagtttgaaatgctggcatataatctgcatggcaacgtcagcctgatgaaactgtggggctggaaacgtgataggttaggatggaaacagaattgggatcactcaaatttaatagtggaaactgtgagattagatgaaatggctgtggcagaatgagaagaaagaggtccaagggcagaacctagggaaataaatgcttagggagtagtaggagaaagggaaagtcggcacatcctggtcaaacaactttgttgtgccaggcttctggtgaataagacattcaaagtctctgcctcaagaagtttgcattcgtggttggggagacagacaataagacacatgaacaaataagcctttcaggtagtgatatgtgtgatgctggggagtgactggaagtatttcagctgggctggtaggggaagatcaccctggatcaaagagatggccctagagctgatgactgaatgatgtgaaggaagctttcatgtaataatatgtgagaaatgctgtctttttttttgagacggagtttctctcttgttgcccaggctggagaccaatggcatgattttggctcactgcaacctctgcctcctgaattcaagcattgtcctacatcagcctcccaagtagctgggattacaggcatgtgccaccacgcccggctaatttttttttttttttttttttttgagatggagtctcgctctgtcgcccaggctggagtgcagtggcgcaatctcagcttactgcaacctcctccccctagcagttctcctacctcagcctcctgaataactgggattacaggcgcccgccgccatgcctggctaattttttgtgtgtgtttgtagtagagacagggtttcgccatgttggctaggctggccttgaactcctgacctcacataatccacctgccttggcctcccaaagggctgggattacaggcataagccaccgtgcccgaacaagaaacgttttctaagtcaaaggaataaatccaaagcctctaagattgggtgagagagaggaaaagaaatgacggaagatggtccagtacaaggcagagattttcaaaagggtggacatggctactgtattaaatattacttagaggtattcacaatagcgaaaaggtggaagtgatccaagtgtccatggaagggtgaatggataaacaaaatgtggtatatacatacaatggaatattatttagccttacaaagggaaggaaactctgacacatgctacaacatagatgaatattgaagacatatgctaagtgaaacaaactagtgacaaaaagacaaataccgtatgattctacttatataaggtaactggaggagtcagagtcatagagacagaaagtggaatggtgcttgttagggactggggggagcagggactggggagttactgtttaaggggtacagagtttcagatggaaaagatggaagaattgtggagatggatggttgatggttccacagtatctcagtttgtttatgctgctataacaaaataccacagactaggtactttataaagaacagaaatttattttctgatagttctagaggccgcgaataacaagatcaaggcaccagtagatctgttgtcaggggaggccccaatccctgcttctaagagggaggaatactgcgtccccacgtggcaaaaggtggaagggcaaaaagcgacagtgcgtccctgacaagcccttttataacagcgtgaatttatgcaggcagaactcttatgacctaaacaccttccagaaggccccacctcccaacactattgcactggggattaggttttcaacacaaattttgggggacacattcagaccatagcaaagacagacacaaaacaccacatattatgtcactccaattatatatgagaagtcaaaagaggcaaatctgtagagatagaaggtagattcgtggttgtctgggcctcagaaggaggatgaaagggaggcaaaatggagagtgactgctgttacgtaagtagtttcttttggaatgatgaaaaagttctaagattggattgtggtagtggttgcacaattctgtaaatacaataaaagccactgaattgtgtactttaaacaggtgaactttatggcatataggttatatctcaataaaacgattttttaaatggccaaaagacttgaagacactaccaga

SEQ ID NO: 28545 - DNA, 2300 bp, Homo sapien
gcctgccatgaaacagctcctttcctgtcgtcatatctgagtggaaagagcaaaggcgggagactgtataaagacccagaagccaggatgacaacaagtgttgtgggattttacaagcattcgtaggttccttttcaaggaaagccgggtttctagaatccatcagttgtctgctggctggcatggcagcctagtttatgggagaagcacactagggaatcctcccttttctggcttatagagataggtggagtcgatagtcacagggcattctcatgcactttttttttttttttttttgagatggagtttcactcttgctgcccagtctggagtgcaatggcgcgatctcggctcaccacaacctccgcctcccgggttcaagcgattctcctgctaagctcagcctccctagtagctgggattacaggcatgtgccaccacgctggctaattttgtatttttagtagagacggggtttctccatgctggtcaggctggtctcgaactcccgacctcaggtgatctgcctgcctcggcctcccaaagtgctgggattacaggtatgagccaccgcacccggcctcatgcgctttttaccattttagttactttctttcctgaagccgtccttaaaacatagatgaatgcgagtttctgggaactatgtgaccctcattcccctacattttttatattcaggtggcagatttcctcctactcagcccagcccttctgaatagggtccaagtcattgatttattcatttatttacctcctatgtggtgtttggtgtggagcctcacagagcagtgaagacgtggtgtttttccttatacagtttacagtctcctggggaagactaatgttaagcacattctttcataaattgcaattatgaccattgctctgaagaagtagtaaaggatattatgggagtgttaacaggagggcctggtctggactgcgagggtcaagaagccttcccagggtggaggcgaacttttgagatggccaggaaaagatgaacagaactactcaaagaagccaagtgcagagtttcagaggtgaaagaaaccaaagataccatctagggaagcccaatctccgccggctaccaatgagaaaacggaggccaggcagggtgggaggatgggtaagggacttacttacttgctgttagcagtgaagttacacggcctgtgagccgcgggggctggagatgcaaaccgagcttgggtttcttaagtgggtaggagtggagatgtatatgcgaaggagaagggattaggagtggtggaaaccaggtaggttttaatttagtgcctaggctccctcagctgcagagctacctcctgcggtgggggaggggattaaagatgactcagacctgccctagcccagagaaactccgtttgcagtgctgaagcatagtttttatttgggtttgggggaggaggtactgaacacacatacaggcaaaacaataagtgtagagttcagaattgggaaaccagtccctcttctgcagctgttcagctgtgtgatttgggataagtcacttaacctttctgaattgcagttcagtttatacttttgtgcgtttctttcagtctttttctatacattttaggagtttcttagagatcagtcgtgccctgtatttcacctcattctttcaaagctaaagcctcttgtttggtagagctgtgtttcagccccttttacagagcagtttgccagcctgtgcttgcccaaacatctagagaataactagcaagcgagccaggagaagatccaggagctgtaagaatcgttagcaactgagcatatttctataaaccaataaaggtttttctgttttgttcatctgttacccttatgctgttgccactttcacatgcagtgtctgtaggcggagagtatgagataacagcatttcacaaatgaaagtgagtggaaaagggctgcttcccctttaaggcagtctcagctccagctccctcccctttcctgattgacaaacctacccgaagtcacatgatctgcctctatttgaaggtcacaaaaagctgcttcctttagagacagagagggagagagagagcaagagggagagtgtgtgagagagagttagttcaagccaaaatggccgacagagtctctgctggtttctgaatatttaaaatacaaaaaaacagatagacaaaaagaattcattttttggaccttttttcatttccatttctaccttgtatgcctcaatttgctggatttaagcactgctgcactttatgagg

SEQ ID NO: 28546 - DNA, 2300 bp, Homo sapien
ccgaactacacaaggtccatggaggttgctctctgttccttttcacagtgtggtgcaggaagtgtaaatcccttcctggatactgtatgtctattaatgcaggtgtttgtttgcttgtttgtttgtttgtttgtttgttttgagacagagtcttgctctgttgccccagctggagtgcaatggcatgatcttggctcactgcaacctccgcctcccaggttcaagcgattctcctgcctcagcctcctgagtagttgggactacaggcacatgccaccacgcctggctaattttttgtatttttagtagagacggggtttcactgtgttagccaggaattgagagaggctttagtttaacttaatattgattggataatgatatgtgggtgggggaacattgagaagtctaagataccaagcaggtttctgacttgagcagctggttcggtgataagttcattctttgagggtgaagaaatgagattggggctaggaaacaagtttgagaggaagggaaagatgataagtggtagttaaagccagagcatggaagagtttgtactcaaggaactgaaatgtggaaagggtgcagaccctattgtcacattgattttgttttgttttgttttgtttttaagccactacttatggccaaattcatttgccattctccagtcaaaagccaggattgccattatggccgtggacaaagttggcctcactgccaacttttttgtactgcccatgagctaagaatattttctacgttttttaatttattggagaaaaaatggggacaatatttcaagacgtgaaaatgacaggaaattcatatttcactgtccgtaaataaagttttatgggagcacagccacactcatatgtttacacattgtctatggtgctttggccccacaagtgcagagttgagttgttgtgatgaagaccatatggccagtaaaccctaaaatatttactatctggccctttacagaaagtttgctgatcccccctgatcaagagtaggagaagcccacacaggaagaggaaaggaagagctgaagcactagctggagcacgtctcacagaaatgggagggagggaatgacgagtggtgtcagaagctgcagaaaaaccaaagaaggaaaggtccaagatgggctggttagactggcaacaaagatcactagtgacttatgaggaaagaaacttccagggagatgttcaaggcaaaagccagtgtgtgttgggttgaggagggagtggaaggtaaagaaatagaggcagtgctgagaggttactgaaaattgttcagtacacattgaccgctcactgcatgtcatcagatttaaaatgttcagcctagaatatcttttctaggccttgtttgtattttaactactactttaaaaacatttctaggtcattcttttttatgtttgataccattgagatagttaaaggaaataatagtttgtactagttctgtgcagctgctgtgttcagaaccctgcctggtttggaagtttcttaaagagcacttttatctgaaaaagtagcatctaattggagttttcagaaataggggcaattggaagtttaaactgtgagatacaagaatggaataagaaaaatgggatgaggaaggggaggagattcaattattagagcacgtaaatggttcttaaaagaaaatgaatggaggacgggcacggtagctcatgccttttatcccagcactttgggaggctgaggcaggtggatcacctgaggtcagtagttcgaggccagcctggccaacatggtgaaaccccgtctctactaaaaatacaaaattagccgggtatggtggtgcacacctgtaatcccagctacttgagagactgaggcaggagaatcgcttgatcctgggaggcggaggttgcagagagccgagatcacgccactgtactccagcctgggcaacaagagcgaaactccgcctcaaaaaaaaaagtaaatgaatggacggccaggtgcggtggctcacgcctataatcccagcactttgggaggctgaggcgggcagatcacctgaagtcaggagttcgagactagcctggccaagatgatgaaactccgtctctgttaaacatacaaaaattagtgaggcgtggtggtgcacgccagctactcgggaggctgaggcaggagaatcacttgaacctggaaggtggaggttgcaggaagctgagatcctgctactccactctagcctgggcaacagagcaagactcagtctcaaaaaacaaacaaaaa

SEQ ID NO: 28547 - DNA, 2300 bp, Homo sapien
gccgggaggtcactcagcatctaagaaagcccagaggtgtggagggagaacactgtcatgggtgctccataggtttttgagtgaatctgtgaatgaaagcaggaatgggaaggtgactggaaaagaagttattgtcaaagaaaagatcttgaagccttgagatctaatcatgtactttttttttttttttcttgagttggagtcacactttgttgcccaggctggagtgcagtggcacgatctcggctcactgcaacctccacctcctgggttcaagtgattctcctgcctcagcctcctaagtagctgagattacagacacctgccaccacgacctggctaatttttgtattttgagtagagatggggtttcaccatgttggccaggctggtctccaactcctgacctcaggtgatccacctgcctcagcgtcccaaaatgctgggattacaggtgtgagccaccgtgcctggcccttaatcatgtacttgtaatagtctagaaatattatggttattggaaaagtgaagttaactctcagcaaataaactgggagttaaaattggaattcctccacaggtctcattttagtaaggcactcagaaacaagtaatttcaaagcagcatagtactgggctcaagcgatcttcccgcctcggcctctcaaagtgttgggattacaggcgtgagccaccacacctggcttgagtgtctttagattcctcacgtaaaaggcagagagctaggagttaagtgcaggtggagagggtgcaggcacccggctcttttcgtttgttttgtttttgagacagggtctcactgttgcctaagctgtagtggcaaaatcatggcttactgcagcctcaacatcctgggctcaagtgattctcccacctcagcctcccaagtagctgggactacaggtgcacaccaccatacccagttaatttttgtattttttgtagagacagtgtttcatcatgttgctcaggctggtctccaactcctggactcaagcgatctgcccagctcagcctccaaagtgctgagattataggcgtgagtcaccgtgcccagctgagacacctggctcttacagctccagatgaaccctttcctgtgtgatcaccccactggcactccagactgaacaacatagcaagaccctgtcaaaaaaaaaaaaaagggggggggccacttgagtgtttctatttctatttatttatttaattcttttattttttggagacggagtctcgctctgtcgcccaggctggagtgcagtggcgcgatcttggctcactgcaacctccgccttccgggttcaagaaattctcctgtctcagcctcacaagtagctgagactacaggtacaggccgccatgcccgactaattttttgtattttagtagagacagggtttcacgtgttgcccaggctggtctcaaactcctaagctcaggaaatctgcctgcctcgacctcccgaagtgctgggattacaggcgtaggccaccgcagccggctcactgggggcgcagtaaatgccgatttcccttgggtatcttcatttctccttagagccgagctcggtgcgccgcgggcaggagtgggtggggcgacagtaataagagtaacagcaagcgtacacacggccttccaagtgtgccagacaccgctctaacactgaatccgcacaacccgaaaggcaggcctttttttttttttttttttttgctttttgttttttagagacgggagggtctccctgtgttgcccaggctggtctcgatctgtcggcctcaagcgatcctccggtctggggcccccacagtgctgggattacaagcgtgagccaccgcgcccggccaaggaagtcttaatgtacctcttttcagacaggaaaactaaagtgtagcgcggctaagtaacgtaggaagcatcaatcatgtttctggtcaaagaagcgaaccaagtcaattctcaggcagaagcagcggagattctccgcagccggcagcgcccagggcgcccggaacccagagagcgagaccgcgtgaaggaagtcccgccccgccccgtcctgccctggcctccaggtttccgcttccgctcttccctggtccagtccaccctggcggggtcgcagggttgggatggcggctggaggcgatcatggttcgcccgacagctaccgctcacctcttgcctcccgctatgccagcccggagatgtgcttcgtgtttagcgacaggtataaattccggacatggcggcagctgtggctgtggctggcggag

SEQ ID NO: 28548 - DNA, 2300 bp, Homo sapien
agcttatccttttggaaaaacaatagaagacaattctgaaaaccaaattctgaacataggctagtatagcaagcaagcagggatagcatagagccatttgctcaacttccagaaagagttactctgttcatctctaaaaaatcttgaaaagggccgggtgcggtggtggctcacgcctgtaatcccaacactttgggaggccgaggcaggtggatcacctgaggtcaggagttcgagaccagcttgaccgacaaggtgaaactccgtctctactaaaaatacaatcaaccgggcgtggtggcaggcgcctatagtcccagctacttgggaggctgagacaggagaattgcttgaacctgggaggcagaagttgcagtgagccaagatcatgccactgtactccagcctgggcaacggagcgagactccatctgaaaaaacaaaacagaaaaaatcttgaaaggatactaagtctgacacaaggaaattaagtcatgggactctgaccagatattctgtctacttccttctctgctatgggcaacttggaggcagcaactactatcagtttatctgtaatgtgagaatttatattacataacagatactggggatataggataccatggattttagttaatacatttcctcatagaaaataaggaaataacagtcttgttcctgtcctaacaattctgttagactaatgatctccagtgattggcgatttgacctggtttcttcctggactatttgaatgggtggatttgttggtgcatctcttgtcttctttccttttccattctcctttatttttgtatttacatacttgtatgcaactttgtaatctgattttcccatgtaacattttaatttgatgggtggtctgcgtgttcactggaaaacatatatatattaaatgtacatttatgtatatatataaaatatacattcatatatattatatataatatacattcatatatattatatataatatacattcatatatctatcttttatatatatatatagacaagatcttgctctgtcgcccaagctggagtgcagtggcatgaccacagttcactgcagccttgatttcctgggctcaagcgatcctctcacctcagcctcttgagtagctgggactatggcacacacaaccacacgtggttcattttttgttgttttttgtagagacagggtctcactctgttaacccaggctgttgtattttctttaagattggtttaaattcacacggactccagcatcagaactacccagatgtcaggttctgggcagaacttggggcaactgatgaaatgtctgctcagctgaagtcagacacctggacacttaatgccctctttccctggctgatgctcagtttcatttaagaaccaggagagcctgatgtttgtaaacacagctttagtggaagcacgagggttaggagtccctagaaaggtgatatgaagcctaggtggatgtgagggttggtgagatgggaattgcacagcatagaatctgacacagaaggtactcagaaaatttcgttttccggcctggcgcggtggctcacgcctgtaatcccagcactttgggaggctgaagcgggcagatcatctgaggtcaggagttcgagaccagcctggccaacatggtgaaaccccgtctctactaaaaatactgtactaaaaatacaaaaaaattagctgggcgtggtggcgggcgcctgtaatcccagctactcgggaggctgaggcagagaactgattgaacctgggaggtggaggttgcagtgagccgagatcacgccactgcacttcagcctgggtgacagagcgagactccatctcaaaaaaaaaaaaaaaaaaaaattagcaagttatttgcagcgtctatctcccaccaccctgactgctggtccacaccatactgtcccaagcttctcaggctgcggtgcagacgaagaaatcatcgctatgcatgctggccttgggatgggggcgcaaagcccctggacgcgccccgcctagtgggcgggaacgactacagcccccagcatgacccgcggccgcccatgccacgccccgccacgcgtgcgcttaggcgccgctgagcgctgactgggtgcgagtggggaagctgctaacccgacccggattggcgctgaggtggcccgtggggcaggtgagtgcggggcgggagtcagcggagacccaccggcgcctacaagttcccctcaggcgggggctgcggggcggctgtggtcggactgtccgaccgagggtc

SEQ ID NO: 28549 - DNA, 2300 bp, Homo sapien
tagcctttgatctgagcccgaaggctgggtgggattttagcaggcaaccctgtgggtggcatctttcagacctgaggcccccaactaggggacaggcaactgacttcaacctcatcctgattctagaaggaagagtcagcagagcaaccagagttctactacgatgagtttggtttccgtgtgtacaaggaaggtaaacttgagccccttttgtgtgtcatcttgctgatgttctttggggaggactccgctcccttgactgaattactcggcctgtgatggctgagctctgatgcgtcagggttccagatttaaggacagagtgtatctgagggtgatactctcataagtatgggagacttctgctttttttgagataaattttactgatcctcacctgacagtaaaagcaatcgtgttcactgtagagaagttgaaaaattcaggctggacgtggtggctcacgcctgtaatcccagcactttgggaggctgaggtggatggatcacttgaggccaagagttcaagaccaacctagctaacatggtgaaaccccatctctactaaaaatacaaaatttgccaggtgtgatggtgtgcgactgtaatcccagctactcagaaggctgaggcaggagaatctcttgaacccaggaggtggaggttgcagtgagctgagactgcgccactgcactccagcctaggcaacaagagcaaacctctgtctcaaaaaagaaaaaagcatattttcaatggctgtataatatccttttatagtgaatatacagtatttggataactacttttctataactgagtctctagtccatttctgttgttttctactataaatggaccttttggtcctgagtgggctattgggaagtccatctgccaggccagaactgtggctaggacattttaattgactgcaactaatcaccttcaggtcactcacgtttccaattctgacaaaagttttccttgttcttctgattcgtaggcaggtatttgcaggttaaaggtttgggttgagaaggacacagggaacttgctggtatgatggaagtatctgtgtttggctgggtcagtggagtcagagtgttcactgttacaccttggaactgagactgcttgatgcggacaatgttcagacatttgtttatgcaccaaaatgtacacctaacatttgtgcattttactgtaggtaaagtcattaaagttggtgtctttgaaagctgggctgagggattggcttttgggtgaataaggacgaggctgtctgtggagctcacccaggggttgctgggctgccacaggagagcttgacctcattcattcaacagatatctcatggacccaactgtgggtggtgcagtctccacagctgcatccctgcaggcccccgaacaaaactgaaggtggtctcagctgcatggagttctcattttagtgagggagacaggcagtaaacaagcatgtaatattctggagcaagaagggctggaaaaatacttccagggatagagaagaggggcagtaaatcatatataaaaaggtcctgaagtggccctttcagaccatgtcattggagtggagagagcaagaggaaaatggcagggggtgaggacagagtgggcacggcccagaggaagcagctgagggagcgctggaaagcccttggctttaagtctcagctctgagcagagtgacatgatctgacttgcattttggaagggtcactgtggctgctgaggggaacagcctttgggaggtgagggtagcaacagggaggtcagcaggagggccactgcagtgatctggatgaaggaccatggcttggacaagggccatggtcaggggtggtgagacgtaaaggaatcctgtgggtttgctgatggactgagtgtggggtctgggcgagggaggagccagaggtgactccgaggtttaggctgagcatcgggagaatggaggtgtcatttctggatccgggtagtactatggtaggagtggctttgaggagaaggtgaagagctttgctcctcatggggtacatgttagaggctcacctggagctgtcagaaagccattagctatgggaatctggatatggtgggagagagctggcctagagccatgaagctcagaccctcctgaagacggaggcttggctgcttggagaacacgtagtagagaatgctttttctttcctccttggctctctcttggcagaaggtgatgagcctggctccagtctgctggcgaactcccctctgatggaggatgctccacagaggc

SEQ ID NO: 28550 - DNA, 2300 bp, Homo sapien
tcattcagagcggaggtaaccccaggtcccctgctgcctccctgacggccttctctgttcataggtgtctctagccctgggttggtttgtttttattgaatgcttccgtgcgtgaccagtcttgggcaagcactgtggatgcagtggtggctgtgagccctcccgtctccaaggcctgggcgagaggaccagggaaggtgccgtccttcagctggaagcactgccccaaggccctcgcctcccaacgaacagaagagacatttgcccttgtggagctcacagtgcagcctggggaggtggacaacaaatataagaaataagcagatcatatggaagatccgagaggagccttaggacaaaaatggaggagagggagaggtctggggagcctggtggggaaggtccaggatgtctcctgtgagcaggggcagctgtgtgcatctgtgcggcctcgggagtacctggcgggttggagtggagttgaggaaaggggaagaaggccttcatggccagatcatgcgtggcctcctgggcaccagggcagggtggctttggctccattgtgtgggaagccatcgcacagccttgagcagaaaaggcctggtctgatgcaggacccaggcgatagtagccgtgcaagggcagaagcagggagccccaggttggggggcgactggagagctgggctttggcccagcaggcagcagtggcgggcagaggagcggctggaatcagccccatttggagagagccaggttggtgtctttatggatgaagtggggggagagggaaggaacagccaaggatgacttcaagggctgtggcctaaagggccagggtggagtggccattgatggggtgagctggggagggggcacgtgtgggaccacattgcgcggtccctgatggggtgtgtcacgagaccgaatggagggttcacagggacagttgacatcaagtggcatttgtgagagaggtctgggctggaggtaggagttggagtgttgtcacatctagattggcagttggagctgggaggctgccgagggtgtgaggtgggggagcagaggttggggctaagcccagccttgggggtcgggaggacaagtagtggcagggtgcggtgtcctggaatccagccgtgaccaagggagctgaggaccgaggcctggacacggaaggtaggcatcatgggcacaacaggaagtccatgagaggcctgggagcagggtgggggtggccgtagagagctctctgggaggttcccctgcagaggggaagaaggaggtagggcagatgctgggcaggaaatagcgcgcgtctgtgtgaggggacccagctgggagtagaagatcccagatgaccccgagatggtcctggggaggagctcactggcggcagcaggcaagaagtctgggcctgtggtgccgatgctgggtggtgagcgtggacttctctttgagtgtctcagtggcttcaggaggaggaggagcggctgaggggtgcaggcaaagtgggagctcagcctggaaccacagctctaccagagtagatgtgatgttgtgtgaattttatttcaatttaagacaagagctcagtcactggtgttcctgtgaggtctgtaattctcaagccctagggagaatccctgggtccctggggtctgaggcgcatctctcaccagtgcaggtggcactgaggcggcaggtatgggacccgctgtgaggacggctgggctgggcgctcaggagcgaggccttggcgtgagcttcaggaggttccaagggaaggaggtgctaccccagagatattgttcaagaaggaaaagggaacaggctttgaactctagcttctaagggatggcagagaaagggagatggtgggtgtgggtgctgcctgccgccaaagggacactgaaaagtggcccaagaggtggcagtgatgccagaagcaggtgtttgaggagagaggtctgggcaggtggtggcagctgggcaggcagcgacctccttgcctggtgagagcggctgcagggcaaagagtgcattctgccaggacagggggggccagaacccacagggttggggagcaggcctggtttttgcataattctttttttagttgtggtgagataataaaatttgccattctaatcattttttaaatgtacaatcagaggtattaggtccattcacagtgttgtgcaactgtcacccctatccgctccagaacttcatcaccccataaggaaactgtacccattagacagtaactccccattctccccaactccagccctt

SEQ ID NO: 28551 - DNA, 2300 bp, Homo sapien
ttgggctgccacctgcagaggccacgggcgaagctggatggggctaatttctgccttttcttcccaggtcagcaggcgaggccctgggaagcagcgggacccccccagtacgcagcctctccactaccaatagcagctccagctcgggcgcccctgggccctgtgggctggcacgtcagaacagcacctcactgactggcaagccgggagccctgccggccaacctggacgacatgaaggtacatggccactggaaaacttgagccactgccagcctggcccttcccacaggggctgtctgggtgctggtttttaggcagggaaggcagccagcctaggacccaccgtcatggaaagcagagcagggctttaggctctggtccccatcagacagggcaccttggacacagctctgaggctgcctggaggtggtcatggtgaatgacaccagcttcctcgtggtggttcctgttgttggcagcacagccagcatctgtccaggcagtcgcatgtctcttatcttcctcgacttacgtgttgcatgcagtgtgagaagtggggattggtgcccctttgaggatggtcaggctgaggcagtgacaggaggaggagcttgtccacagtcgcagacctggtcagtgtagacaggactgtccagtagcaaccctgcccgcattttcccctttgccggttaatgcagagctcactctgccgttcaggtgcagtgtctgcctgggaagagagcggcctgtgatcagggccacagacttggcttccatcctagggccttggagaggagtgggtcatgcccagtgccttgcgtgttttctctgccccatcagaagatggattggaccaagctctcccttgagaacttgttctctgaaccaggctgggccctactttcatgagctcagttttctctttgcaaaatacagtctgttccattgaatatttattgagcccatgcaccatgctgggggctgggggctggggacagctgtgggcaccatgtaccagcccccgttgcctgcataggtggggagcattttaaccagacccctgctagagtgagaacaatgaaagagaggatgctgttggctcaggtggtggggggcattgcaccctccaggctgctggaggattagggtagttgatgcatctgcagtggcccatggggcccagactgcccttctgcctggacccagtgccctgtgtccagctgcccctggcctccctgactcttgactgccttgcaggtggcagagctgaagcaggagctgaagttgcgatcactgcctgtctcgggcaccaaaactgagctgattgagcgccttcgagcctatcaagaccaaatcagccctgtgccaggagcccccaaggcccctgccgccacctctatcctgcacaaggctggcgaggtggtggtagccttcccagcggcccggctgagcacggggccagccctggtggcagcaggcctggctccagctgaggtggtggtggccacggtggccagcagtggggtggtgaagtttggcagcacgggctccacgccccccgtgtctcccaccccctcggagcgctcactgctcagcacgggcgatgaaaactccacccccggggacacctttggtgagatggtgacatcacctctgacgcagctgaccctgcaggcctcgccactgcagatcctcgtgaaggaggagggcccccgggccgggtcctgttgcctgagccctggggggcgggcggagctagaggggcgcgacaaggaccagatgctgcaggagaaagacaagcagatcgaggcgctgacgcgcatgctccggcagaagcagcagctggtggagcggctcaagctgcagctggagcaggagaagcgagcccagcagcccgcccccgcccccgcccccctcggcacccccgtgaagcaggagaacagcttctccagctgccagctgagccagcagcccctgggccccgctcacccattcaaccccagcctggcggccccagccaccaaccacatagacccttgtgctgtggccccggggcccccgtccgtggtggtgaagcaggaagccttgcagcctgagcccgagccggtccccgccccccagttgcttctggggcctcagggccccagcctcatcaagggggttgcacctcccaccctcatcaccgactccacagggacccaccttgtcctcaccgtgaccaataagaatgcagacagccctggcctgtccagtgggagcccccagcaggtacctgggtatgggaggaaccgggcaggg

SEQ ID NO: 28552 - DNA, 2300 bp, Homo sapien
tgggttctgaaaagcacaataatggagtcaggctagtacaaacgcctaagagcaaagtctgagtgaaagtgatcaatctagtttcactttggaaactggatagaaactagcaacggaagtcagactctatgaggtaatttttgcaatagttgttggccttataattaataagagataagataattttaacctaaaggtcattttaagcttacaacaactagagataattttattataagttttaaaaactaactttattgaacttcaattcagacacaataaacttcacctagtgtacaattcaaagcgttctgacaattgcatatgcctgtataaccacgacaataaagagatatattttcatccctagggttttcttgtgtccctttgtattcaatttctccttccacttccagccccaggcaatcactgatctgctgtcactctagagaaacctgaatttttttcctcacacaatttaaaaaattgagatacaattcacatactataaaattcaaccattcaaagtgcataattccatagtttatcgcaactaattccagaacattttcattgccccaaaaataaaccctgtatccatcagcagtcactctccatttcctgttctggacatttcatttaaatggaatcacacaatatgtggccttttatgtctatgtcctttcatttggaaaatgtttttaaggttcatcatttttttttttaagacgagtctcgttctgtcacccaggctagagtgcaagtggcttgatccccgttcactgcaacctccatctcccaggttcaagcgactgttgtgcctcagcctcccgagtagctgagactataggcacatgccaccagcctggctaatttttctgtatttttagtagacataggtttcgccatgttgcccaggctggtctcaaactcctgggctcaagcgatccacctgccttggcctcccaaagtactgggattataggcataagccaccacacaaggccaaggttcattcattttataacatatatcaacagtgatttctttttatgagtgaataatattccattgtatggatataccatattttgtttattcatcaactgaaagacatgtgggttgtttccactttttagctattttgaaaaagctgctatgaacatttgtctgtgtaaaaatacacagacaaatgttttcagttttctaggatatatatctagaagtagaattgctaggtcacaggatctatgtttaactttttgaaaagctgccaaattgtagtttttaaacttttcattctgagataattatagattcacataataagaaataataaacagctcatgtataaacttttcattctgagataattatagattcacataataaataatacaaagagctcatgtatcctttactcagttccctccaatgataacatcttgcaaaactacagtacaatattacaaccagaatactggcactgttagtcaacatacacatttccatcaccctgaggatccctcatgttgaccttttatagccacatctactttcagccccacaccatccacaggccctgacaatatgaagaaccaatctgtgcttcatatctataattttgtcatttcaagaatgttatataaatagaatcatacaataggtaacattttaggattggcttttttcactcagagtaattctcaagagtcattcagggtgttttatttctaaaacgtttaaagtttgcccctttttaaaagttgctgagcagtatcccacagcctgaattaattaattaattaattaattatgagacagagtctcactctgtcacccaggctggaatgcaggggtgcaatcttggctcactgcaacctctgcctcctgggttcaagcaattctcctgcctcagcttcccaagtagctgggactatgtgtgcccgctaccacgcctggccaatttttgtattttagtatagatagggttttaccatgttggccaggctggtctccaactcctgatcgcaagcgatccacccaccttgacctcacaaagggctgggattacaggcatgagccaccacacccggcctcaaatgaatttttgggatggtacaaggtaagagtcaatgttccctctctctctctcctttttttttttttaagacggagtcttgttctgttggccaggctggagtgcactggcacaatctcggttcactgcaacctccgcctcccaggttcaagcgattctcctgcctcagcctcctgcgtagctgggattacaggcgcac

SEQ ID NO: 28553 - DNA, 2300 bp, Homo sapien
tattttccctctgctttttttttttttgataagtcaaacctctaaattgattttcttttgtctttcttccttttcctttttcccctcttcattccatttttgttcctttcccttcacttctttttttttttttaaagacacagcgtgtctcactctgtcgctcaggctggagtgcagtggtgtaatcatagctcgctgcggcctcaacctcccggggtcaagcgatcctcctacctcagcctcctgagtagttgggactttaggcaaacaccaccatgcctgattaatttttgtattttttgtagcgatggggttttgccatattgcccagtctggtctcaaactcctgggttcaagcagtccgctcgcttctgcctctcccagagtgttggaattacaggtgtgagccactgtgcctggcaactttccttttatcctttgcattctcttcccctaaattaaaatggattagtggcattctttccaaagaagtgcttgtttgaaagaagacccagaattctatgaaattgctttttttctttgtgggaagtttattttttagaagataaggataatgtcatcttagattgtaaaaattattctcatcccctttggaatgtaaggaaatcttttaaaagctaaatttccactggagagtctatgtgcgtatgtattgagccaaaagtattgaaaataattgctatagttttctaatgcccaagttttttttgtttgtttgagacggagtttcgttcttgttgcccaggctgaagtgcaatggcccgatctcggctcactgcaacctccgcctcctgggttcaagcgattctcctgcctcagcctcctgagtagctgggattacaggcatgcaccactatgcccagctaatttttctatttttagtagagatggggtttctccatgttggccaggctagtctcgaactcccaacctcaggtgatcagcccgccccggccccccaaggttctgggattacaggtgtgagccaccacgcccaggtttttttttttttttttttagatggagtttccctcttgttgcccaggctggagtgcagtggcacaatcttgactcaccgcaacctccagcctctgcctcccgggttcaagcagttgtcctgcctcagcctcccaagtagctgggattataggcgtgcactgccacacctggctattttttttttttttttaaagtagcgacggaatttctccatgttggttaggctgaactcctgacctcaggtaattcgccctcctcagcttcccaaaatactggaattacaggtgtgagccactgtacctggcctctaatacccaagtttttaaggaacaatatttccaattttgggggggcacacacatctaatttttaaaatcttcccagttagggaatggatatttaaacttttctgttgtaatttcaaaaacagtgtgtttagtagtatgtagtagaataaatacattgtactagtaatcagattctggctcatttttcttttatcagatcactgaactcttgtgctgtagttccccaactgaaaatgaaaatactggatgtgttagtttctgaggttcttgttataaaagtgtagttattctaggttttattggcatttctctaatgctgataaaagattaagataattttgcttgtaatactattcatataaaaatagaattcatttcaatataaaatgagttagacttggattctaaaggggcttagtcagtgaatgactaaaacaacctttatataagatggtctcatgtagcaatcaatttcaagatccattctctaggaggctggggaggggcgggggagggaaacaaccaccaaaaaataacattgtctgacaactttgagctaaaatccaggatcttaatttgagattaatgtaagaaatctgtcaggtatttttaaaaagtaactcatcactatttaggagttgactttttctgttgtagctttcattgaaggactattgttttagtcattctctcctaaattccttttcctgagactaaaagattgagctcatacctttgcataacgatctggagagtattttaaacttggcatgttcaaacctggcagactcgattaatatgtggacaaactagcacattagaacattttttaagttccaagccataaatgttttaaatgaacatgggcatgtataaaattaatacttaagccttcaaatagcacagactttcaaaatgcctgttgccttgggtgactgattttcagtgaggctctcgcttaccctacacatt

SEQ ID NO: 28554 - DNA, 2300 bp, Homo sapien
ggtcaaggcaggaggatcgcttgaagctaggagtttgacaccagcctgggcaaaatagactctgtcactacaaaaataaaaaattagccaggcatggtggcacatgcctgtagtctggctcctctgaaggcggaggcagggaggagcacttgagccaaggagtttgaggttgcattgagctatagatgtgccactgtgatccagtctgcacaatagagcaagaccatgtctcaaaaaaacaaaaaaaagttcaaaaacttaaaaattgtaaagtgggttttgctttgcagtttcaaaaggaaagagctatatctacttctctggagctactatgtctgagtcttaataatggtcaaacaggagatgcttattatgggatgctggcagatgaagggaaaactgggaactttattatagagtttgaaactcttcttataagtggacagtttgagattgtagtttttttgttttgttttgttttgctttttttgagacggagtcttgctttgtcacccaggctggagtacagtggcacaatcttggctcactgcaacctccaccttccgggttcaagctattctgcctcagccatctgagtagctgggactacaggcgtgtgccaccacggccggctaatttttgtatctttagaagagacggggtttcactacgttggccaggctggtctcgaactcctgaccttgtgatccgcctgcctcggcctcccaaagttctgggattacaggcgtgagccaccaagcccagccaagattgtagttttttattttgtaaagtattgcatatgttatggtaccttaatgagcacatgagcatgttcggttgaattctgcatctgggttgaccagcaggctacataggccttctttattttctctctccctttttaatatatacaggtattgcttccattttcctcttgtcaccttaatcaaatataatctcagcctctcaaagtgctgagattacaagtgtgggccagcatgccctgccttaactgttctttaaaatctctatgcacatcacaccgataatcggaaaggaaagatttgtggtggatatgaaaggcagcagagtgtattgcttcttgtaggaggttatggatatgcctaggagcacagtggtttctcttgactcctttaagactcttggatcgctttagtcattaccagcactttgcatggattcgcatttctgcctcccttacttgtttcagggggcctagtttatttaatcttctctttgggtgcagaagaaagagcaaacagaggaatcaggcagagagagattaagatttttttcataggtgttcagtttgaggagatatgtaacaatatctgttgaggtggactgcttaaaaaccacaattccaaaaaatccccacagtttattcctttaactggaaattgttattttccctctgctttttttttttttgataagtcaaacctctaaattgattttcttttgtctttcttccttttcctttttcccctcttcattccatttttgttcctttcccttcacttctttttttttttttaaagacacagcgtgtctcactctgtcgctcaggctggagtgcagtggtgtaatcatagctcgctgcggcctcaacctcccggggtcaagcgatcctcctacctcagcctcctgagtagttgggactttaggcaaacaccaccatgcctgattaatttttgtattttttgtagcgatggggttttgccatattgcccagtctggtctcaaactcctgggttcaagcagtccgctcgcttctgcctctcccagagtgttggaattacaggtgtgagccactgtgcctggcaactttccttttatcctttgcattctcttcccctaaattaaaatggattagtggcattctttccaaagaagtgcttgtttgaaagaagacccagaattctatgaaattgctttttttctttgtgggaagtttattttttagaagataaggataatgtcatcttagattgtaaaaattattctcatcccctttggaatgtaaggaaatcttttaaaagctaaatttccactggagagtctatgtgcgtatgtattgagccaaaagtattgaaaataattgctatagttttctaatgcccaagttttttttgtttgtttgagacggagtttcgttcttgttgcccaggctgaagtgcaatggcccgatctcggctcactgcaacctccgcctcctgggttcaagcgattctcctgcctcagcctcctgagtagctgggattacaggcatgcac

SEQ ID NO: 28555 - DNA, 2300 bp, Homo sapien
actctgtcgcccaggctggagtgcagtggcgcgatctcagctcactgcaagctctgcctcccaggttccgccattctcctgcctcagcctcccgagtagctgggactacaggcgcccgccaccacgcccagctaattttttctgttttttagtagagacggggtttcaccgtgttggccaagatggtcttggtctcctgacctcgtgatccgcccgcctcgacctcccaaagtgctgggattataggcgtgagccaccgcacccggcctgcatcctgttttagtcacctgggataccggcctggcattgcagtcaccgcagtacgtgccttagcatcctccagtttggtgtaagcacccccagggtagtgactgtatctcatctagcttaccccctcagtgttcttactcaaaaaatatttatcgaataaataattttatcaggtattttgtgcaagaatttttgccttggggaaggtgtgtgtgactaagagcccacgaggatcccgtctaactccaagattctgcgaccggcattggaagctgatttatagtgagtaattgggaatacccaaggccactttgacttttgccgccattggatagagcagcaccctctcctaccctccctctgagttcacccatgggcagtcccagaagcctttgatggggaaaagggggtcatagtgagaatttaccttggaatgtaaagtgagccgccccttttcagtctttgcatcttcacgcgggtccgccccaaacctagaagaacgcccctgaccacttcttcttctatctactgttactccttcctctgactctggtgaccccatcccggaagccttccggaaagcgcttcccccttttccaccccatcgagttggggttatttctccttttctgggctctctcccattgctggggaggaaggcggatacgaagggcctgcatgaccgcagctgtcatcacagtgggcctggcttaccttgttgctctctcccctttcgcctttctcctttctccctgttgcagtcatggacttcactcataatacatatacatatacatatacatatacatatacatatacatatacacatacacatacacatacacatacacatacacatacacatacatatacatgtttttaaatcgggcagccacccgctccccgccctcagcccggaataggttcagagaggtgcccgggttcacttgcggagcgtgtggcctctgcgcctaacgcgcgccccttcactacacgaatgggtgcgggcaagggtataggattttagaattccaagagttgtcgggggtcatcccgtggaatcctcttttttgcagatgctcttcctggagccttccgatgcaagctcttgggctcacgcagcccttttcctcttctaagcccagagcgctttcgctgctgctgatctccacggcctcggcagatagggaggggcaggcaggtgtcagcgtcctccctttcaccgttggggaaactgactcagagaaacaaggcgacgggcctcggcggggcgggaccgtaacgggaattcaaggctccaggccagagcggaatttattgtgtctcgttttgggaagcgtgaatgtgaaatgatcgacttcggagccccaggcggagacccttcagtccccgacaagaatcgggatggggtctgggattaatgcagtaattactcgcgcctgggcattgaccccttggcaacttcgcaagatccggcagggtccaccgcccttcccttcacagggtgaccacagggctgcggcctctttaaggcccagagctccgcccccggctcgtcgccaaccccctcgccgcagctcagccagttccagactttcctcagagatgaggtcatctccccgttgcccattggctgcgccgtgccgtcagtcacaggaagtcaggccgccgttttcgccttcttcatgccgcttccttctccgcccgccctttagtccgccgatcacgaccccgatcaggcctctgattggctagcgccgccgtcacttctccagcggacagtcttcaggacgggaggcgggcgtggtgggcgggcccgcagcttccgtggctgagaggagccggcggcggcagtgtctgtggtggccgcggcggcgagagcgacggtcccatctttcccaccctcttggttgccgctggccacacgccctccgctggcggcgacttctcagctccgtgcgcccgggctggacagtgagcctcgagaggagacgcgggcggctagagccggagtggggcgagccgcggaa

SEQ ID NO: 28556 - DNA, 2300 bp, Homo sapien
gcagggaatgctggtcctccagaatatttcttcttcttttttttttttttgagacggcgtctcactctgtcacccaggctggagtgcaatggcatgatctcggctcactgcaatttccacctcccgggttcaagcgattctcctgcctcagcctcccaagtagctgggactacaggcgcccgccaccacgcccagctaatttttatatttttaatagagagggggtttcaccttgttggccaggattgtctcgatctcttgacatcatgatccgcctgcctcggcctcccaaagtgctgggatttcaggcgtgagccactgcgcccggccactccagaatatttctaagcatgcttcctcacttccttcaggacttttctcagagaggccttccttgatgatcaatcctctataaaatggtaacctccacctctcttggtattcctgggccctctcaccctgctttaagttttttacagcaattgccaatatcataagttatctttatgtggagtatatattttttcttttttttgagacgtagtctcgctctgtcacccaggctggagtgcagtggcgtggtctcggctcactgcaagctccgcctcccgggttcacgccattctcctgcctcagcctcccgagtagctgggactacaggcacccgccaccacgcccggttaattttttgtattttttaatagagatggggtttcaccatgttagccaggatggtctcgatctcctgacctcgtgatctgccagcctcggcctcccaaagtgctggtattacaggtgtgagccactgcgcccggccatattttttcttttttctgagacagggtctttctgtgtcgcccaggctggagtgcagtggcccaatctcagctcacttcaatctctgcctcctg[450 bp omitted]aattgccaataccatgaattgtcttttgaggggttttctgtctccccgcaacttgaatgcaatcttcatgaggacagggactttatcccccaccccacccccacttttttttcttttttttttactgcaaaacctagaacagtgcttggcaggtagtaagtactcaatgaatgtttgttggatgaacccaataagtaaacaagatagaggacacatgtagggatctgcccgtgaacctcgacccctggctcctgagtctggcagtgggtgcagtggcagctcctgtctgtgagggccccagaggctggcagcaggatgcctccgtggaaaattcccttaacgcctttgcctctgcagctgttcctccgggatgatctctttgggggatcatgctcagatatttgtctcaaagagtcccaggccaaacctcagggacctcagagcgtttagaaaaataacacctctgtgagcttggtccaggcagatcccatgcagagaggagtttgtccccttccagtccccgaggtcctggctattgccagcatggagtgacctgtgtcacctctgagtgccaggcaagggttcagcagctgacgactcagcttctgcaggatgctggcagcatagccagcgagatagttggaagccgtcagggcacagggaaggggccgagggtgccctgagtgtgcatggggggcagccctgctgcagtccaagcctttgattcccaagctatgtgcacagtttcctctggactctgccatgtggcccagccacccatacctggaataggggctaagccaagctgctctctcctccaaagggaggcagcctgtgtgctttgtccgtttgcctttgcagagacctcgatcttcacgcaaggcaagcagcagcccctgtaagcacacgagacaatcccaagtgtcagtgggaaggaga

SEQ ID NO: 28557 - DNA, 2300 bp, Homo sapien
agtgttcctgggtagtcctgtgatgatgtttccagaacaaattagcattgtgagttggtagattgagtgaaaaagatcctcccaggtggatcgcgaggtcaggagatcgagaccatcctggctaacacggtgaaaccccatctctactaaaaatacaaaaaattagctgggcatggtggcgggtgcctgtagtcccagctactcagggggctgaggcagaagaacggcgtgaacccgggaggcagagcttgcagtgagcggagattgcaccactgcactccagcctgggcgagagagtgagactctgtctcagaaaaaaaaaaaaaaattagaaaaagatcctccctgtcagtgggtatcatccactgttgagtggacaaaaggtggaagaggggcgaatctgctctttctgggctgacatccattttctcttgcccttggaggtcagtgctcctagctcttgcttttgggcttagactgggacttacatcattgtgcctctggtcctcagtcttcagattcagactgaattataccaccagctttcctggtttttcagcttgcagatggcagatcctgggacttcttggcctccataactgcatgagccaattcccataataaatctacacttgatcttagccacaaggccgagaaacgatcaattcctataataaatctctcttataatatcctgttggttctgtttctctggagaaccctgactaatataccttttttttttttttttttttttttttgagacagtcttgctctgttgcccgggctagagcacagtggtgccatcacagctcactgcaacctccatctcccaggttcaaatgattctcctgcctcagcgtcccgagtagctgggattacaggcacctgccactatgcctggctaatttttgtatttttagtacaaatggggtttcatcatgttggccaggctgatctcgaacccctgacctcaagtgacctgcccgcctcagcctcccaaaatgctgcaattacaggcatgagccaccgcgcccggccctaatacaccttttaacctaaaatttcaggactttctttacttagaaaattatatacacatatatagctgtgattgtgccactgcaatccagcctgggcgacagagtgagcccttgtctcaaaagaaaaaaaaagtttggtatataatcttccaatccctttctatgaatttaaatgtttattttctacctagtaatcttattttttttaattctttatttcctagataatgttcattgaacctttttgtattgagaaattttaaggcacatttaaaaaatatattctaaccaggcaccgtggctatcttagcactttaggaggctgaggcgggtgatcagttgaggtcaggagttcaagaccggcctgatggtgaaaaccctgtctctacaaaaaatacaaaaattagccgggcacagtggtgtgaccctgtaatcccagatactggggaggctgaggcatgaaaattgcttgaacatgggagacagaggttgcagtgagccaagattgcaccactgcactccagcctgggcgacagagtgaggctctgtctccaaaaataataagaagaaagagagagagagagaaacaaacaaacaaacagaggcaaaattaatataagtagcattttttgttgtggttgttgttttcttcctgagacagagttttgctcttacgcccaggctgaagtgcaatggccatgatctccgctcaccacaacctccgcccccagggttcaagcgattctcctgcctgagctggagattacaggcacccaccaccaccacgcccagctaatgttgtagttttagtagagacagggtttggctatgttggacaggctggtctcgaactcctgacctcaggcgatccacccacctcggcctcccaaagtgctaggattataggcctgagccactgcacccagccccgttttttttgtttgtttgtttgttttttttttttttttatttttattttttattttttattttttatttttattgatcattcttgggtgtttctcgcagagggggatttggcagggtcataggacaatagtggagggaaggtcagcagataaacaagtgaacaaaggtctctggttttcctaggcagaggaccctgcggccttccgcagtgtttgtgtccctgggtacttaagattagggagtggtgatgactcttaacgagcatgctgccttcaagcatctgtttaacaaagcacatcttgcaccgcccttaatccatttaaccct

SEQ ID NO: 28558 - DNA, 2300 bp, Homo sapien
tttagagcggaagtagcatccacagcttggaactggcggaagagttgttgttgttgttgttgttgttgttgttttgagatggggtctcgctctgacacccgggctggagtgcagtagtgcgatctcggctcactgcaacctccaccttctgggttcaagcgattctccttcctcagcctcctgagtagctgggactacaggcgcccgccaccgtgcctggctaatttttgtattcttagtagaaacagggtttcgccgtgttggccaggctggtctctaactcctgaccttgtgatccacccgcctcagcctcccaaagtgctgggattccaggcgtgagcaaccgcacccggccggaactggcagaagagttacacgggcttacaaaaaagcagacaattttctttatcctttgggcctgtcaggagttggaattggtactcacgaatggtttgtggcatgcttctctcagtggaatgctgacctttgcttgatgatataggttgcaagttttagtaaagcttcggattctcaagtattttgagtagcttctctcagaactcataaaattatactggttaaaaaatactcctccatctattttggcttagagagtgaaaaaaagtacttgaacttctcagataaaaagctttgaaataccaaatgttcttacaaggactttataatctgttatttaagtaatgtggtacatttttgtacttgaggttgtccttgagaagaatccttttaggccgggtgcggtggctcacacctgtaatcccagcactttgagaggccgaggcgggcggatcacgaggtcaggagatcgagaccatcctggctaacacggtgaaaccccgtctctactaaaaatacaaaaaattagtcgggcgcagtggcgggcgcctgtagtcctggctactcgggaggctgaggcaggagaatggtgtgagccggggaggcggagcttgcagtgagccgagatagaaccactgcactccggcctgggcgaaagagcgagactccgtctcaaaaaaaaaaaaaagaatccttttagtctttctgcttgtgttaataatggggatatgaaagcagatttttttttcttttttctttttttaataagaaaaggtctcactctgttgcccagctctggagtgcagtggcatgatcacagctcactgcagcctcaacctcctgggctgaagcgatcttcccacttcagcctcttgagtagctggaaccacaggagtgtgccaccctgcctggctaatttttaatattttttttagagatggagtctccctcttttgcccaggctgctattgaactcctaggctcaagtgatcctcccatatcagcctctcaaagtgctaagattacaggcatgagccaccacactgggcatgaaagcagaattttaaagaatggttagatcttaatcttagctgcattgcctcctaagtgtttttgtatgtgcctacctcttaaatgaagaaaatttttatttctgaagaatttatttaacaggcaacatatttcacttgtttagaaaggtgggtgcactatacctttctacggtatctgtggaagcttgtgatctctggtcctgagctctcctgtcctccttttctcttaaaacaaatgcagtagactgctcaatagcactttctagtctgatttttctggctgttggtttttctctgttaagtgaagtgtgcattgcattgaataggaatacattctaaaatctaggcaaacaggaatgtgttaatatccctctatactggcctctggggcatgggtgcttttgaaaaaatgagactaggaagaatctgtaactaagggttttttagattataggcaatgcctccagtgacaatgtatgagccttttaagttataactaaagatgactccttaatgttatgtgaatctataaaaatataacaaatacgactgataaaattattaggtgatgccttttattttgagaaatgtgctcttataatgctccttagagataggcagcaaaatatctttaacaactgtatgcaactaatgaaaaaattgaatttgaatctcttggctgttttgtcaagtttatccttggttagactgtatttcctatatataatattttgagataccttaaatcaaaactttatttcttcaattatctttaaatggattttagtaaaagacttctcttccttaggattttttctcttggttcttcagatcttgactagagccagacagttggatgtgtgcttttttactgagtttgttcattgcttc

SEQ ID NO: 28559 - DNA, 2300 bp, Homo sapien
atgagccaggtatgggggcgtgcacctgtagtcccagctactcgggaggctgaggcaggagaatcacttgaacccgggagatggaggctaacatgagtcaagatcgcgtcactgcactccagcctaggtgacagagcgatactccgtctcaaaaaaaaaaaaaaaaatactgttttcagtatgtcagtcttcagttgatcatgctgggcgctgtggctcacacctgtaatcccagcactttgggaggccgaggcgggcggaccacgaggtcaagagatttgagaccatcctgaccaacatgatgaaaccccgtctctactaaaaatacaaaaattagctgggcgtggtagcgcatgcctgtaatcccagctactcgagaggctgaggtaggagaatcacttgaacccgggaggcggaggttgcagtgagccaagcctgggccacaagagtgaaactccatctgaaaaaaaaaaaaaaggttgcaaggcccggtacagtggctcatgcctgtaatacgagcactttgggtggctgaagcaggtggatcacttgagcccaggagtacaagaccagcctggacaacgcagagaaacactgtctcaggtttaaaaaaaaaaaaaagctgatcaaaatgtttttggtatgtaagatacaaaaacgtcaaaacaaagtattaacaatgttttcataactatgatgcataatccagtatattcttgacagcaagctcccaatttgatcaggagtcaatgagaactgagttctcaagttttacagccaactagtttctatgttcccatgccaaaataatctttttttttttttttttaggagtctcactctgtcccaggctagagtgcagtggtgcaatcttggctcactgcaacctttgcttcctgggttcaagcgattctcctgcctcagcctccctagtagctgcagtttcaacattgtaatttctacaaggcgcgtgccaccatgtccggctaattttttctatttttaatagagacagggttttgccatatgggccaggcttgtctcaaacttctgacctcaagtgatctgcccgctacggcctcccaaagtgctaggattacaggcctgagccgctgcgcccagcccaaaatcatcttcgcttcacttttggtccttcactttcacgtcatgattctatggcgtgatgggaatgttcctggaagcagtatcttctgcaaattttgtgaaaacggccaggttaaactttgttagacccctctcccagggattaagtgtgatgatgggcataaaacactaagcctggcatgtagtcagcactgaggagttatcacgaggatattctaaaaggaaacatggtaaagacaagtggtgatggtgtctcaggaaagaatccctgagtccctgaggagcatcctgaagcagaatctcacagtatgacaggttaaagctgaatgtggctgctttagttttgtgtaattttgttagtcactttgcaacatggaaaaaaatttttttccttcagtattttatgaagtactactacataaattggctttcgtaatcctcacagcagatggggattgttggtactagtacattgtcatttcacagaggaaacccaagaggttaaatgacttccatagttgccaactagggggaggctcccactcgcgtcttgtattttgggctcctgatgctcaacatctcttcccaccacactcaagggtttttctggaggaagaagtttccaagtccacaagtgagtttttttcctcttggccaaaatgtgactttcagaatagaaaagagctcaggcgcagagaaacagggagactggagtctcattgagtttccccatctttgtcaccagagtaaaagaaggccattaagacttctgagatggaggaactggtcagggcccgggaacgccagagaacgtcggaggaaccgggagccgggtacctggtgtcaggccgccttgcgccttggagcccagccccgcgaacacctcgctgtcccgccccgcgcccacaggggccaatcagcgttcaggggcgttcttagccgcccccccccccccgctttcccgccccgcgacccggaagtggttctagggcaggcgggcgggtttgagagggcggggattgcgactctcacaccctgagctccggtgctcctttcctaactccactggctgcggcatctgtgggaaaagtgtggctgggtcttcgaggagccgcaccaatggcttccgtgctgtcctacgaaagcctggtccacgccgtggccggagccgtggt

SEQ ID NO: 28560 - DNA, 2300 bp, Homo sapien
gtaagtcttccagtagttagacaattggtggggagctaaaaattgaaaaacttcttagaggaaaaaaatacaacatacaacgctgacagattgtaacgagttttttccttagaaccagattgttgttaagaaatattctttgagctatttggtaatcatgagctcatcttcccacacaaaaatatcacgctgggtgaagtggctcacgcctgtaataccaccactttgggaggcgggggagtcccttgaggccaggagttcaagacaagcctgggcaacttaatgggacccccatctctacaaaaaaattaaattagccaagtatggtggctcgatcccgcactgctagccacctgggagactgatgcaggaggatcgcttgtgcccaggaattggaggctgcagtgatcccgccactgtatgcggcctggacaatacagccaaaccctgtctctaaaagacaaaagtcactaaacacataacgttcacagcagcacctcttaggagtcgcaatggtctgcatagttgctatttatccctgtttagtgcaatttgtatgtcatcttttcagttccccattagtaataattttttaaaaagtcatcttagggaagacttccctgtcactttttctcttcggtgctccttcaacacataaaatgctaattactattatatagtaaatatcaaaacgaacttttctatttattcgtctaaatagacagtacttatactgtttcctagcaccaggcacaatgccttgtcaattaactccttgcacgtagcgaagtactctacagttaaagacaacaagattatatcctggaaacatgccaggccttaagaaattatttttctcagacgtgtttggagtgataacactgccaagtaacggaggtataataagtgattctcaagataattaatcctacgcagctacaaacgctgtaaggtaaaaacaatcatttttacagttatcatttttattcttactagttttgtaacttttaacttactagtgttatattattataacacgacgtaaaggaatagtgcgtaaaggaactgctatgtaccaatgagacctgagcagggcacacaagactgaaagaaaaacaaccccacgcaaaatctaagtcttgcagttttcactcctcgcgtctccagtgtccacgcatccgcagtcctgtttttgtatttcgcccaagatacacccctgggcaacctcagggtgcgaggaacccagctctgcctcctgctccccgcggctcctgtactacccaaggctcgcgatcttccatgacccctcgaagttgcctccctttcccgggcaaagaaggggcagcgaccccgcctcgcccgccggaccgagccaggtccagcctggctcccccctggggccgtgcttcccccgcccccaacggtcctcaggcctgggtctcacctctccacccactccctcaggaagcgcatttcctcggtgtgcagaacgctcggatcctgcttacacattttcacaaaggcccgaagctcgttcactttgcgggggtccatggtagggaggtggtgggcgaaactgggggggctacggcccggttccaggcccaggcgctggctcggcgtgaccgcgcagaagggggcggctgccgcaagacagaacagactagaacctccccggccgctggctcctcccacccaacggtctcgtgacctcgggtcctccgcctgctcattcctactccctctgcgctgctcctgcgcgctccctagaatcttctagaagcgtggctgttcgtgctgttgcctgcctccctgcgcatacattctcatattcttaactaggaaccagctccctggatggggcaaccccagaaatgggcgacttcaaggaggcgggagataacatcccctccagggggcgacgtccaagagcatattgtgtggctgcgtgcactgagtagagctcaacgcccgggacctaaaaaaaaaaaaaaaaaagggcgtggagccggagggtcggtcccagctcggggcatgacgtcacaacctgcgccgccgcgcaaggaaggcccgcgagccgcctccgccggaaggggaggtgcggctggcccggtttcctggcgacgcggccctgcaggcggttgcgttccccgtcgttaccctctttctcttcccgacgcgtgagttaggccgtaatgccttggctgctctcagcccccaagctggttcccgctgtagcaaacgtccgcggcctctcaggttagactcttctcccacggtctcctcccatggtgtcccct

SEQ ID NO: 28561 - DNA, 2300 bp, Homo sapien
ccgaggcgggtggatcacgaggtcaggggttcaaaaccagcctggccaagatggtgaaaccccatctctactaaaaacacataaattagccaggcgtggtggcgggcgcctgtaatcccagctactcgggaggctgagacaggagaatcgcttgaactcgggaggtggaggttgcagtaaggcaagagatcgcgccactgcactccagcctgggcgacaagagcaagactctgtctcaaaaaaaaaaaaaaaaaaaaaaaagcttctccagccatactaaacgattgcaacgcttagtgctggccactccgttttagagttctgtgcctttgcaagtgttccttctggtagtatggctcctttagtcaggctggggagagcctttcaaataaaagcaaattccaggcctggggcggtggctcagagaggagggtggatcgcttgaggccaggagttcgagatcagcttggccaacgtggcaaaacctggtttctactacaattacaaaaattagccaggcgtggtggcacacgcctataatcccagctacctcgggaggctgaggcacgagaattgcttgaactcaggaggcagaggttgcaaatgagcagagattgccactgcactccagtctgagcaacagaatgagagcctgtctcaaaaaaagactgaaaaattgcacatctttcttttcacctaatcccacggagagttgtctttctgcagctttactatgagaactgaagaacaagttctgtgcactggacaataactttttattttttatagtaagaagtcgatgtaattaacattccattttaaatgaattcaagtatatcaacataaacatatgccaagacatagctttgatgtcaaataccatacgttctggttcacacattgttcatatattgacccaaaaaactgaaatacgatccaatggcagatccgcctgcaaggaaggtgattcagttttcactgattaagctttatgttcatcagattaattgctcgcaatagaggacaccctacaaaaaattattctccttatccttcgtcttgtctttgcaaacaggactttcagacacagaacgccccagaagtatttcgaaacagttacctctcctaagaggagctgctgaaagaatttgttactaaacatgcttcgtgtatattctggagcaagctctcacgcctaacagaaacaagagctacttgatgtgagacactttgtcacttaagtgtgataattgccacaacttcggagtccgagtaacttggaagacagcccctctgggggatggcacacttttctctctgcagtcatttcggcttcacaaaatacctcaacggtagagaacacactgggcccacccctttccaggagcagccggtatagaagaaatccgcggagcacagagggttggggagcggaggccccaccaggagaagggtcagccgaaccagggatcgcctgagaccaacttgggtccctccaggggacaccatgggaggagaccgtgggagaagagtctaacctgagaggccgcggacgtttgctacagcgggaaccagcttgggggctgagagcagccaaggcattacggcctaactcacgcgtcgggaagagaaagagggtaacgacggggaacgcaaccgcctgcagggccgcgtcgccaggaaaccgggccagccgcacctccccttccggcggaggcggctcgcgggccttccttgcgcggcggcgcaggttgtgacgtcatgccccgagctgggaccgaccctccggctccacgcccttttttttttttttttttaggtcccgggcgttgagctctactcagtgcacgcagccacacaatatgctcttggacgtcgccccctggaggggatgttatctcccgcctccttgaagtcgcccatttctggggttgccccatccagggagctggttcctagttaagaatatgagaatgtatgcgcagggaggcaggcaacagcacgaacagccacgcttctagaagattctagggagcgcgcaggagcagcgcagagggagtaggaatgagcaggcggaggacccgaggtcacgagaccgttgggtgggaggagccagcggccggggaggttctagtctgttctgtcttgcggcagccgcccccttctgcgcggtcacgccgagccagcgcctgggcctggaaccgggccgtagcccccccagtttcgcccaccacctccctaccatggacccccgcaaagtgaacgagcttcgggcctttgtgaaaatgtgtaagcaggat

SEQ ID NO: 28562 - DNA, 2300 bp, Homo sapien
gtcaggaagttaccctatatggtctgaaatggggaagcatgaataatccacttcctgtttaggatataatcaagaaataaccataaaaatgggcaaccagcagcccttggggctgctctgcctatggagtagccattctttattcctttactttcttaataaacttgcttttactttactctgtggattccactgaaattctttcttgcacgagatccaagaaccatctcttggggtctggattgggacccctttccggtaacagcaggttctcagtatctgtttgtggaatgcctagaacctaaactctttaagtcctagtccgagaaatgcagtagagtggaatgagaacttgaaattagactcaagtttaaaaatcagatttttcactaacaagctatgtagccttagacaaattactttctctctcagaacgtctgttttcttatgggcataaaatatttattttgctagagtgctgtgtcagttaaatgagcacttgctacagtgtgactcagagggtactcaaataattttcgacattattggttattatttccagtggtaggcaaattataatcatgggtaagccacacataagtacatgtaagcacatacactggagagaatttaaattgagttttaagcatttcacaatacctctaaaaaatgagtatatataaaaatgcaaagcaaaaaaatattcagacctgacaaatggtcttgaaagactagaagcatacactacagttttagatttcattagcgtatcatttaactgaggggttataaatgtgatggaaaataaaataaacacaacatagaggaggaaaaacaaagattacagggaattttctcagacaataaaatgagccaggtatagaatataagacctttaaattcgggtctagactactggtagtttatccccaaagaaaatcacctttggtctgtttctaatttggctctcgaattctactttcccatacatgactgaatttccaaatagtagccactgatccattacaaatgtaaatcacatcattaaacttgcatattccccactccccacaaaggcttcccactgtacttgaaataagtgctagctttatgtccaacagccccaactggcaacaaccaaaatgtccatcaacatggccagtggctaccatattagatcactatgtggctgactgtcatataggtctcagcaataatgtcatctcctcagaagccttctaaaaccaatctaaagtagcgctctgcccccagcacattgctattttttttggagcacatatcgcattatcttaaattattttatttgttctcctatttgtattctattataatgcaagcaccaggaaaactggtgtcttttgttcaatactgctatcaccagtggctaaaacggtgcctggcacaaagtagacaatcaataattatacagtgaatacataaacacacaactttccaaatctttaattacatgttttacagcagtaaaccttgggtggacaaagatactataatctcaaatgacttaccactggcatgcagaaagttaacatatcaggctacttcctccaagaggctttcattgacacccccagcctgagctgtctctcatataattgtttagcatccagtacttcctctcatcataactattatattgtaactaagttacttgtttgtatctccctctgaactgtttcttgactgaaataaatatgtcaactgtttgaatactttcttcacccgtaagtcagtacttcatttttctaaaccaaagcatagaagagctgggaagcaattaaggcgcagtaatctagaggtcatattatgcaagggatatgctgtggctattagcaacagattccattggcttatgaggcactgcctgaagcttccagggaaacatacaggggaaacagtccagaggattcaggatggtctggtacgactctggactagctctatttggaaggtccagtccctacactgaccccagaatgacaccataatgcagccctctctgacatatttgtaactctgcttgccacataatcagtatcctcatctcttagcacatggtaataacattgtctttaacataaaagtgtacctatttgcagtcactacctctatcaccaccaccagcagagcctgagctgaggaaaccacggttctcaatacccagcacacccacttccaactatctgttaaaacatggtggattactatgaagttctaggactgcaaagatatgcttcacctgaggacattaaaaaagctta

SEQ ID NO: 28563 - DNA, 2300 bp, Homo sapien
ccactctactgcatttctcggactaggacttaaagagtttaggttctaggcattccacaaacagatactgagaacctgctgttaccggaaaggggtcccaatccagaccccaagagatggttcttggatctcgtgcaagaaagaatttcagtggaatccacagagtaaagtaaaagcaagtttattaagaaagtaaaggaataaagaatggctactccataggcagagcagccccaagggctgctggttgcccatttttatggttatttcttgattatatcctaaacaggaagtggattattcatgcttccccatttcagaccatatagggtaacttcctgacgttgccatggcatctgtaaactcttggggtgctggtgggagtgtagcagtgaggacaatcagaggttactgtcattgccatcttagttttagtggggtttggccagctcctttttttaagaacatcacaggtaaagctcacaggaaggtgacagtctaggagaagatgttcgcagtgtctaaatttgacagggacttattttattttcattattattgttactattattattatttgaggtggagtttcgctcttattgcccaggctggagtgcaatggtggggtcttggctcactgcaacatctacctcccgggttcaagccattctcctgcctcagcccgctgagtagctgggattacaggcatgcaccaccacgcccggctaattttgtatttttagtagagagggggtttctccatgttggtcaggctgatctcgaactcccaacctcaggtgatctgcccgcctcagcctcccaaagcgctgggattacaggcatgagccaccgcacccagctggtcagcttctttactataacctacctgttttattagcagggtttttgtgtcctgcattttgtgctgacttcctatttcattctgtgattaagactgccttaacttactgggaatgtagcccagtaggtcttagccttattttaccaaacccctactgaagatggagttgctctggttcaaacgcctctgacactatgatacagagaaaaggtagaaaataggaaattctgctcttaagaaattcatatagtttgaaaaaactaatttcagtggagtgtaaagttataatacgagcacttgtttctgcagttatacccttctttgttgatcctttgcctcccagccatccgctgtgccattttctctgcctcttcacaacaaaacttatccagagtattgtctcagtgtctttgctttcttacatcctattccctccttggcatactccaatctgtcttctgtcttctttactctgctaaaatcgccagggtctccagtgattgatgttaccatatccagtggttgtccttttggcttccttgtattttgaagcacttgccacactgtgagccctcctcacttttttttttttttttttttgagatggagtttcactctcgttgcccaggctagagtacagtggtgtgatctcggctcactgcaacctctacttcccaggttcaagccattctcctgcttcagcctcccgagtagctgggattacaggcatgtgccaccatgcctggctaattttgtatttttagtagagacagggtttctccatgttggtcaggctggtctcgaactcccgacctcaggtgatccacttgcctcggcctcccaaagtgctgggattacaggtgtgagccactgcgcctggcatagtcctccccacttcttaaaacacttgttttttaacttcctaaataccacactctttttttgtggggggcgggggggcagcgggtagagacagggtttagccatgttggccaggctggtcccgaactcctggcctcaagtgatctgtctgcctgcctcggcctcccaaagtgctgggattacaagcatgagccaccatgcccagcactaaatactgtactcttctagttttccttctttctcctgtgctctttctcacactaaaatattacagtgccaggctttgttcagtctccctgggtaatacccattcccagggctttagatgccatctgtgtgcttataacaccctaatttatatatctagcctagcacttttctccctgaaattaagattgctctttgacctctccattaaatttatttccaataaatatctcaggctttcctgttgcatgtagtggtacaaccatttattcacttgttcaagtcaaaaatcaagaattattcttaattcctcttttttctttatttcttatgtccaattagaagccag

SEQ ID NO: 28564 - DNA, 2300 bp, Homo sapien
aatgtttctttgaatacagtttaaatatattttgtctttatttttgcaaggtgctctttttccaagggactcttaggcaggggaagaatgcacttacataatctgcttgtcccccacatatattgacgtacttttaaattaagtaactttattggcctgcttgagccactagaatatgacagaatcatgatcagcattgccgtagttgtatttagcttgtagtccaatataaagataaccacaataataattttagtaatgataccaacatgtgttgaccattatatgccagccactttgacatgtattatctcatttaatcctcacagctttactaggtaggtaccataaagatccagtattacagaggaaggaattttaacccagaggttaacttacttgccccaaaccacccagttactatcattcctgaacagcatgttcttctttctacttcacaggcatttatattccagaggatgacaaagatgccccagagaagtttcggggtcttggtgtacgaattgaggatgatgtagtggtgactcaggactcacctctcatcctttctgcagactgtcccaaagagatgaatgacattgaacagatatgcagccaggcttcttgaccttcactgcggcccacatgcacctcaggttcaaaatgggtgtcttctggcagccctgcacgtgtgctttctgagtgtctctgtgtgtgcattaatatatgcattccatttgggagcatagcagctgtgtgaatgtatgtaattgtgtgtggggggttttttgttttaagtagttagaagtctgggaaaatgaatttttgaatagtatgttactgcagctttggtaacattaattctatagaattaatgatcagagcaagtttaatttttaaacataaaggtcttggttacacatgtccatgcattccagttaacacatttaaacatatagaaaattcacttcttctttcaagtccttccctttctatacttttgctgagatcaacccaatatcataagaagtttgtgtgatgcctgtatttttagctaattaccaaggtctctgcctatgcaaaaattcatctttcggtgattgtgggcggccaatacataccttctgtaactcctccctacctattctagatcctgcatatctactggagccatatgagccctcaggggcactggtgtcctgcagtcttactagtcagccacagtccaggttccagcaacactagctacctaccaaacaaaacacttctgagcttttcttgccatttggttgcctgggacctggaaagtgtttagattcttgataaagatggaaatggaagagaaagaaaattatatatgtatatactaaagatccagacatcagggctgggcacagcggttccgcctgtaatcccagcactttgggaggtccaggcaggtggatctcttgagaccaggaggtcaagaccagcctggccaacgtggtgaaacactgtctctactaaaaatacaaaaatgagctgggtgtgatgatacatgcctgtaatcctggctacttgggaggctgaggcatgagaattgcttgaacctgggaggtggaggttgcagtgagctgagctcatgcgactgcactccagcctgggtgactgagcaagactctgcctcaaaaaaacaaataaataaataaaatcctgacatcctgccatcttttctcttcaatttaaagttgatttcttaatgatgacttcaaaaattaataaaaagaaaagaaaaaaatgatttctggccgggcgtggtggctcaagcctgtaatcccagcactttgggaggccgaggtgggcggatcacgaggtcaggagattgagacctcctggctaacacggtgaaaccccgtctttactaaaaatacaaaaaaaattagctgggcgtggtggcggatgcctgtagtcccagctactcaggaggctgaggcaggagaatggcgtgaacccagaaggcagagcttgcagtgagccaagatcgcgccactgcactccagcctgggtgacagagcgagactccgtctcaaaaaaaaaaaaaaaaaagaaaaaaaaaagaaagatttctttcgcagatatccctgctccctctatagattcttaatgcactgaccctcacaggttacccttttagctgttgtgctgcgcaggagcagatcctctacttacgtaccctgtcagagtcacagtagtagcgcccagttttcagagaagtacccctgttatcattctgtgatttcctctagtgctaatagaaacaa

SEQ ID NO: 28565 - DNA, 2300 bp, Homo sapien
tgtttaaaacagaacctggtaaatatcaatacttttattgaatgattgataaatatgtcttcaagaccttaatttacaatgggtttctagtattcctgtcagggcctgtaggcacacaacaaattaacaacagaaattttaacaaagtcattaaaacttgggctaagaaaaactttgtagggttcttgtagccctttaaggtctcacacaatttttctttccaagtctggataaagctgtggtggtcttttcccggatctgttgttgctgtttataactaacaaacaaatctcagttctttctcttttattattttttttgggggggaacggagtctcgctctgtcacccaggctggagtagagtggctcgatctcggctcactgccacctccacctcccgggttcaagagattctcctgcctcagcctcctgagtagctgggactacaggcgcgtgccaccacacccagctaatttttgtatttttagtagggacggggtttcgtcatgttggccaggctggtctcaaactcctgacctcaggtaatccacctgcctcggcctcccaaagtggctcccaggcgtgagccaccgcgcccagcctattctttctctttagcaatagagtcagcacgctccattacccgccagttatcttttaagagaaaatacaaggcttcaaatgcacctgtacgacatctaagagtgctctggcagagtcacacctctgcaaggttagagatgtcaaagggagtcctggtctagccagaaatgggagagtgacaaagtacaggtgcttgggtcgggtgggatggctcactcctgtgatcccagcactttgggaggccgaagtgggaggatcacttgggcccaggagttcgagaccagcctaggcaacatagtgagaccttgtctctattttttaaaaaaattaaaaaagaaaaaaaaaaaaagcggctctagcactttgggaggccgaggcaggcggatcacctgaggtcaggagttcgggaccagcctggctaacgtggtgaaaccccgtttctactaaaaatacaaaaaattagccgggcgtggtggcgggcgcctgtaatctcagctactcgggaggctgaggcaggagaatcgcttgaatcctggaggcggaggttgcagtgggccgaaatcgcgccattacactccagcctgggcaacaagagttaaaaaagaatgcctcacaaaaattcaagaaatacagcgactgcagatgggtcggtttcactacagcacaagcagcggaaaaaggacacagatcggggagaaatcaccctacaaagatgacaactgaggaatgcggagtggggactgacacacgttacggtgaaaccgtgcaccacgaccaaaggcggtcctaggactgcgactatgtgggcgcagaggccaccccccaggcttggcgggcgagtaaaggcagggctgggggcctgctcagtgtggccttagggaggaacttcgggggtctcctctctccccatcgaatccctgagcagttcccgaacagaaatcggagaccagacggtgcctgggccccagccctcccacggggactgcaccttgggcctggctcggaagcgggtcagagtctgcgaaagaccagcgaggactcttgggtttcggggcaggccgcgggcgcccacccacgccagcaccgggagccgcgcggcgactcggcgagcccggcaggcaggacaggactgcggcgcaggtctggctcaggcggaggaagcagccgccgccccagctgacggagtgcggccgggggcttcccagaggaggcggcgacgtcgagccctttcgaacgtttccacccggctagctcacgtagcctcggccccgcccggccccgcccggccccgccccacccactccggccaccgccccctccccggcctacagttcgcgggtggggcgacctgcgacagcccctttaagaggcgtggtcacgtgctccgcccccacctccgcctcgcgcgccagtaaggggtggggtgcgggaggaggtgccggggaggtggggggagcgaagtgtgcgctgctgcgcaggcgcggtggtcggacgacagaccgtgtgtttccaaaatggcggcagcgatggatgtggataccccgagcggcaccaacagcggcgcgggcaagaagcgctttgaagtgaaaaaggttgggtctcgccagcgccttcctcagggaagctagagaggcgcggatctggctggcaggcccgaggatggtcgaggcgcggagtaaagggtttcatttcaggg

SEQ ID NO: 28566 - DNA, 2300 bp, Homo sapien
catggggagtctgtaacgtaaggaagcatctttacctgtcagcatggcttgtaaacatatttccacttttcctgctttgctagtcttgaaaataactagggaaaaaaatgactagtccacctttctcccaaaaggtatacaaatagtaaaaaagattttaaatcataatactattcacctgttacagggtaaaaattacagttactgcaaagaggcacttatttgtcttaattataaagtggacccaattttgttagcagtattttggggcttcatctatgggaattgccttcaaaacctacatgcaccctttggaatattctcgtggtagaactttgtacctttgaaacaggcttttttaaagaccaggtgtctaatggaactaagtttgatgagtaaattgagtgttgaagtctctgtgtatgtgtgttttaagtgtggcgtatgtactgagataagattattttttaacatggcttatgccagaaatgttttgtgtagctttattggactgaatggccttccaagagtgtgacagctgtgaaggataacaaatatcaaatatgttagttctagcatgtgttaaaaattcattctttaagctgtaaagtcccagtcacatgagctaaaattgtcttgtcagggcctcctgtgtcatggggacagaatactcacagttcccagcatgacacagggataagagattctagagtcagaccaccattccctgtctttgtgacttacttgctaagtgacgttaggcaaggcatttaacgtctccaatcctgggttccctcataaaatggggctgatagtggaccacataaaattgtaatccggattagatgatttatgttaaaatgtgattaaacaactcccggcacatagtaagcacaagtgcttgttaaaaaaaatctaaataggccggacgcggtggctcacgcctgtaatcccagcactctgggaggccgaggcgggtgcatcatgaggtcagcagatggagacatcctggctaacacagtgaaaccccgtctctactaaaaatacaaaaaattagccgggtgtggtggcaggcgcctgtagtcccagctactcgggaggctgaggcaggagaatggcgtgaacctgggaggtggagcttgtagtgagccgagaccacaccactgcactccagcctgggtgacaaagtgagactctgtctcaaaaaaaaaaaaatctaaataaatacaaatttgaggtagaggtgttactgtgtagatggtgttctcagtagtttttcctgttgggttgcaactctttttcctacctacactggttttttgtttttttttttgttttttgttttttgttttttttttgagacggagtctcactatgtggcccaggctggagcgcagtgacgcagtcccggcttactgcaacctttatctcctgggttcaagtgattgtcctgcttcagccttccgagtagctgggattacaggtgtgtaccaccacacccagctaatttttgtatttttagtagagatggggtttcgccatgttggccaggctggtcttaaactcctgaccttggggcgatctgccagcctcggcctcccaaagtgctgggattacaggcgtgagccaccgtgcccagcccctacccgcactttcgggtacaccttcttccatctttgttgggaccctttggccaggctcacaatagaccatgttggccatgggggagctttaatcgttcatggggataaaggaagtatattgggctctttgccctttctggcatacagacatatactaagaaccatgttcctttatgtggaaagaaaagagagtgaacatccccttaaatttggctaaggagagattctctgagagagcctgccgtagaagagagccagcatggtgtggcagaaggctctggattagtcctgggttctagttctgggtcttctacaaaccagctccatgaattaggcaagtcacttgtctgggtttcagtttcctgtctgtaaaatgaagataaaaatatctgtcatgcttgcctgccagggttgatgtgaggcctcaaatgaggtaatacatgtcaacatcttctgtaaactgtcaagtactataaatttatcttctgtaaattgtactttgaccgctaaatatatccattaatacatcttagtaaatgttcaggggtgctgtcacctccctgacacctcctttacagcccccttttccccagcgcgtggtatgctctgacttagttgggctctaccaggacaccgtactgctgcaaagtgctcagt

SEQ ID NO: 28567 - DNA, 2300 bp, Homo sapien
cctcccacctcagcctccagagcagctgggactacaagtgcatggcaccacatccagctaattttctttcttttttttttttttgagatagggtctcactctgtcatttagactggagtgcagtggcacgatctctgctcactgcaacctctgcctcccaggctcaagtgattctcctgcctcagcctctggagtaactgggattccaggcatgcaccactaccgcccagctaatttttgtattttttaaagtagagacggggttttaccatgtgggccaggctggtctcaaactcctgacctcaaatgatccacctgcctcaacctgccaaagtgctgggattacaggcatgagccatcaggcatggcctaatttactattttttggtagagatggggtttcaacatgttaccaggctggtctcgaactagtggactcaagcaatctgcccaccttggcctcctaaagtgttgggatcacaggtgtgagccaccaagcccagccatactctttacccataaattcctcttttaggaattactgctccagatacagctacacatttacacaaagcttcatgtataaggatgtttctcccttcacattgcttgcatcagtgaaaaactggaaacacaaatgtccaccaatagggactgactttgttttttgagatggagtttcgctcttgttggagtgcgatggtgcgatctcagcccaccacaatctccgcctcctgggttcaagtattctcctgcctcagcctcccaagtagctgggattacaggtatgtgcccccacgcccagctgattttgcatttttagtagagacggggtttctccatgttggccaggctggccttgaacacccaacctcaggtgatccgcctgcctcggcctcccaaagtgctgggattacaggcgtgagccaccgtgcctggccagggactgactttttaaaaaatataaaaaatgttaaaaacatgcaaacaaataaaaaaagaaaagaaaaaagttaaggtacatttacataaagaaatactctgcaaccattagaaatgaggtagtttgttatttgtggaaatggaaaatctccaaaatgtacaaaatgaaaaaaaaaaaaaaggtgaattactgtataggatactcacttttatgttaacaaaaatatatatatacacacaaccatgtaaataccgggacatataagagatagtcagaaaatctcctaagaagctgtcctgttgctgatggctagctccagcaagccggagcaggggcctacagtgggaaattcatattctgtggtataccctttcaaccatttaaatttttaaaagtttaccaggtcatgttttatttatataacaataaaatctaatcaggatagccataaatgctatatcagaattaatcactgtgaaataaaccagtgaaatatgataagtggatacaagtctagcccaaagctacctgacattaggtagtccatggagcctcattaggatgtaattctggaaatatttaagagttcatagattatcacattttctactttcacagaccgtagaaggttgggaaacctgccgggcacggtggctcacacctgtaatcccagcactttgggagaccgaggcaggcagatcagttgagatcaggagttcaagaccagcctggccaacatggtgaaacccaatctctacgaaaaatacaaaaattagctgtgcatggtggcacacacttgtaatcccagccacttgctaggctgaggtgggaggatcgcttgaatctgggaggtggacgttgcagtgagccaagatagcaccactgcactccagcctgggcaacaaagcgagactccgtctcaaaaaaaaaaaaaaaaaaaaaaaggttgggaaaccctaggctgcaaatgtctaatgttggctaatcctttgtgcattttccatatagataagtcctagcttaagtaaccaaaaactagttttaaaaaaaacaaggcatgtatcatgtctccatcccccaagaccacgctcctttcagcctgaggcaagtcaaaaagccccgtcaaaacaaccaaagatacctacttttggaattcccactctctgttgtccaatggacacacctgtcgtgttttgagccagcgagagatgcagtggaagtgaaaagcatgctgaaagaaaacatatattttattaaaaataactctatgcaggctcagccatcgagcgacaacaggtcccacagggtagtggcatgggtgacatatagtgggcaagaaaagaaaagaagacaacga

SEQ ID NO: 28568 - DNA, 2300 bp, Homo sapien
cccaggctggaatgcagtggctcgatcaaggctcactgcagtctcaacttgctgggctcaaacaatcctcccatctcagtttcccaagtagccaaggactacagggcaggtaccaccacacccagctaggttttgtattttttagaaacggggttttgccacgttgcccaggctggtctcaagctcctgggctcaagtaatttgactgccttggattcccaaagtgctgggattacagacgtgagccaccacaccaggccaagctcagcattttaaaagcgggggaggagagcccagaaaatgagattgaagagcagtgaaacctccccattgccagcacgtgaatgctcccttgttcccctctctccccatccctctggtgtgacagcagtcccagttcattcgcttctgatgttgcattccagtggaggcttcctccgcttggaggtctacttggtctccaaggaagatggggcagagagggagtctagacctcctagggacctgtaaaatctttggcatttcctcttcggttcagtctctatcagcagtggctggaggtgttttgctcctcagttaccaaagggcaaagtcacctcatcaccatagaattcattttctcccaacctcacaccgggtagtcacacgaaaaatataatttattcctattggtaggattttgccttgttcacttcaaaatgataaagattccctggcctttttgttccaacaattcatttgcttttcccctaagcctttttttcataaaaatgattaaatgacggccgggtgtggtgctgcacgcctgtaatcccagcactttgggaggccgaggcaggtggatcacctgaggtgcggagttcaagaccagcatggccaaaatgataaaaaccccgtctctactaaaaatacaaaaaattagccacgcatggtggcaggcacctgtaatcccagctacttgggaggctgaggcaggagaatcgcttgaacccgggaggccgaggttgcagtgagctgaaatcaagacactgcactccagcctaggcaacaagagcaaaactccatctcaaaaaaaaaaaaaaaaaaaaaaagaagattacctgaaaaagattaaatgtaggccgggcatggtggctcacatctgtaatcccagctctttgggaggccaaagcaggcagatcacttgagttcaggagctcgagaccggcctggccaacatggagaaacccggtctctattaaaaatacaaaaattagcctggcgtggtggtggaagaatcacttgaactcaggaggtggaggttgcagtgagccaagattgtgccgctgcactccagcctgggtgacagagtgagactgtctcaaaaaaaaaaaaaaaaaagaaagaaagaaaaacgaaagatttcctacttttggagacccctgaatcccttggcctctgcagcacttctcctctccttcctccatgaccatgccttctgagtcgacactgtgctgttccacatacagccagctccttagatgatgcgtttctccaaggtccaggaccctcttctgttttagctttctccggtctccctgggaaagctcattcaccccttagcatcaagtcttaattatatgctgatactttcaaaggctaatctccgtttgcaaccaatttatcatgtttcatatcagtatttctacctgcttagtgaataatagggttagaaagattttggttaaaggatataaaatttcagttagacagcagcacacagtacaagagatctattgtaaaacatgtaactatagttaataacaatatgttgtatacttgaaaattgtgaagagtagattttaaatgttcttttcacaaaaaagatgtgtgtgagttaatggatatgttaattagcttaacgagcttgatttagccattccacaatgtatgcatatatcaaaacatgggcccggctcagtggctcatgcttgtaatcccagcactttgcggggccgaggcagaaggatcacttgagcccaggagtttgaaatcagcctgggcaaccaagtaagaccctgtaactataaaaaatttaaaaattgctctttctcagtgaccgggttctaggcttaggcgcagacgggttaggggagccaacatgccagtggcccggagctgggtttgtcgcaaaacttacgtgaccccgcggagatcctttgagaaatctcgtctcgaccaagagctgaagctgatcgaagagtatgggctccggaataaacgtgaggtctggagggtcaaatttaccctggccaagatcc

SEQ ID NO: 28569 - DNA, 2300 bp, Homo sapien
accgcacctggcctttttttttttttttgagacagagtctcgctctgtcgcacaggctggagtgcagtgggcgatctctgctcactgcaggctctgcctcccaggttcacgccattctcctgcctcagcctcccgagtagctaggactacaggtgcccgccaccacgcccagctaatttttttgtgtgtgtttttagtagagacggggtttcaccgtgttggccaggatggtctcaatctcctgacctcctgatccgccctcctcggcctcccaaagtgctgggattacaagcgtgagccaccacgcccggttcaatttgcctgcttttctactgcagtttgggtgatctaggcctgatcattagaggacagattccatccctgtcagcaacttcaattgctccattaggatcttcactcttatgttcttatttattcatcccaacattaatttaaaaaacaaacagaaacaatataaaaaaaaaaacaaagaaaatccaacaatttgcaaataccagctacggagcatgagatatgaaataaaagaaaaaaaatttttttttctttgggacagagttttgctcttgtcgcccaggctggagtgcaatggcacaatctcagctcactgcaacctccgcttcccgggtttaagagattctcctacctcagcctcccaagtagctaggattacaggcgtgcaccaccacacccggacaagttttgtatttttagtagaaacggggtttcaccatgttggccaggcttgtctcgaactcctgacctcaggtgatccactggcctcggcctcacaaagtgctgggattacaggcgtgagccaccgtgcctggccgagaaaaagcttttaaccgtatcagtagatactggtttcggggtttctttcggggtcacttacacccctgccacctcctccagtaccaatttacccatggccaaacacagggtgatgtgtaggaacctgaaagcacgtctccgacctcagctgcaaaactgtggagtcccacacactagactttatattccagcatttcctctcaccattacatttttgcttttttccatccttacattacctttaccacatttttgtttttcccataattacattagataaggcaatggctagacgtggtcttttactaacttgttctattgggagcggacgagaaaaaaaaaaaagacaaaccctagaaatgtcttcaggtcccagccatgtttaggaaaatacttgaaggcttctgcggtgagagtgctacctggtaagggcgtatggacacacgtggagggcaagaaatgaatttgggtctggtgccgaaacatctttccactgctgtgattttgttttctggtcagagtaataatgctcgttgtaaaataaataaataaataatacataaaaaggaaaaggaaaattcagagaaaatgaaaacaactcgtaatcaacgtgctttttggatgtgaactgctccctttgggagggcaatggagaagtgaggacgcactgggtatctggcccggaacagccggcagtgggtacaccctgcctggtgaattcgaccggggttttgggggacccgccacccaagggccgaagagcagggccgccctacgggcgctcccatttggccacctgagtggcgacttggcgccttcctcggagcagctccggggttccgtcgtcccggttcccactggtcccttacgcagagaccaaaggcaggaaccttccctcgtaactatccaccgactgaaaatagattctgagtccgcccccgcccctccccccttaaaatcctccccactcttaaaatcctcccctttaaagggagccacagggtgacgccgggggagtttgcggaagcgctaaccgcgttggggcctagggcggatcccgtgattgggacaggccccgcccccggctccacttcccccattgtgtgagcggctcgggcctaggccccgcccccctccggaggcccggccactccccttttccacccccccttggctcatttccggccgccgccgctaccgctagcctgtaaggaggattcggcagagggaagaaacaacagccgccatcttgtttgtgtgctaggctgggggggagagagggcgagagagagcgggcgagagtgggcaagcaggacgccgggctgagtgctaactgcgggagccagagagtgcggaggggagtcgggtcggagagaggcggcaggggccgagacagtggcagggggcccggggcgcacgggctgaggcgacccccagccccctcccgt

SEQ ID NO: 28570 - DNA, 2300 bp, Homo sapien
tgggattacaggcgtgagccaccgtgcctggccgagaaaaagcttttaaccgtatcagtagatactggtttcggggtttctttcggggtcacttacacccctgccacctcctccagtaccaatttacccatggccaaacacagggtgatgtgtaggaacctgaaagcacgtctccgacctcagctgcaaaactgtggagtcccacacactagactttatattccagcatttcctctcaccattacatttttgcttttttccatccttacattacctttaccacatttttgtttttcccataattacattagataaggcaatggctagacgtggtcttttactaacttgttctattgggagcggacgagaaaaaaaaaaaagacaaaccctagaaatgtcttcaggtcccagccatgtttaggaaaatacttgaaggcttctgcggtgagagtgctacctggtaagggcgtatggacacacgtggagggcaagaaatgaatttgggtctggtgccgaaacatctttccactgctgtgattttgttttctggtcagagtaataatgctcgttgtaaaataaataaataaataatacataaaaaggaaaaggaaaattcagagaaaatgaaaacaactcgtaatcaacgtgctttttggatgtgaactgctccctttgggagggcaatggagaagtgaggacgcactgggtatctggcccggaacagccggcagtgggtacaccctgcctggtgaattcgaccggggttttgggggacccgccacccaagggccgaagagcagggccgccctacgggcgctcccatttggccacctgagtggcgacttggcgccttcctcggagcagctccggggttccgtcgtcccggttcccactggtcccttacgcagagaccaaaggcaggaaccttccctcgtaactatccaccgactgaaaatagattctgagtccgcccccgcccctccccccttaaaatcctccccactcttaaaatcctcccctttaaagggagccacagggtgacgccgggggagtttgcggaagcgctaaccgcgttggggcctagggcggatcccgtgattgggacaggccccgcccccggctccacttcccccattgtgtgagcggctcgggcctaggccccgcccccctccggaggcccggccactccccttttccacccccccttggctcatttccggccgccgccgctaccgctagcctgtaaggaggattcggcagagggaagaaacaacagccgccatcttgtttgtgtgctaggctgggggggagagagggcgagagagagcgggcgagagtgggcaagcaggacgccgggctgagtgctaactgcgggagccagagagtgcggaggggagtcgggtcggagagaggcggcaggggccgagacagtggcagggggcccggggcgcacgggctgaggcgacccccagccccctcccgtccgcacacacccccaccgcggtccagcagccgggccggcgtcgacgcctaggggggaccattacataaccccgcgccccgcggcgtcttctcccgccgccgcgggcggccccgaacggagccccggggggcgggcgctcccagcacctggccgccggcggtgggggccgtagcagcggccgtatttatttattttccgcgggaaaggaaggcgaaggaggggagcgcggcgcgaggaggggccgcctgcgccgccgccggagcggggcctcctcggtgggctccgcgtcggcgcgggcgtgcgggcggcgctgctcggcccggccccctcggccctctggtccggccagctccgctcccggcgtccttgccgcgcctccgccggccgccgcgcgatgtgaggcggcggcgccagcctggctctcggctcgggcgagttctctgcggccattaggggccggtgcggcggcggcggcgcggagcgcggcggcaggaggagggttcggagggtgggggcgcaggcccgggagggggcaccgggaggaggtgagtgtctcttgtcgcctcctcctctccccccttttcgcccccgcctccttgtggcgatgagaaggaggaggacagcgccgaggaggaagaggttgatggcggcggcggagctccgagagacctcggctgggcaggggccggccgtggcgggccggggactgcgcctctagagccgcgagttctcgggaattcgccgcagcggacgcgctcggcgaatttgtgctcttgtgccctcctccgggcttgggcccaggcccggcccctcgcac

SEQ ID NO: 28571 - DNA, 2300 bp, Homo sapien
gcctttccccccttgcctaggctccatcacaacacctgctaaattcctcctcagttggaattagatgtttgataagtcttcactgtctccctgcaggaggtaggaagctctgtgaggacagaaattcacctgtgttttcccagagtccagcaccgggcctggtgcacggtaggcactaaataaatatttgatgaggccaggcgcagtggctcacacctgtaatcccagcactttgggaggccgaggcgggcagatcacctgaggtcaggagttcgagacttgcctggctaacatggtgaaacgccgtctctactaaaaatacaaaaattagctgggcgtggcagcaggcacctataattccagctacttgggaggctgagacaggagaatcgcttgaacccaggaggcacaggtcgcagtgagctgagattgcgccactgcactccagcctgggcaagaaagagcgaaactccgtctcaaataaataaatagataaatatttgatgaataagatgatttgtcactagcagattctctgtgaaatgtatggctgtgcccctaaagtattaataaaagattaagcaactaataaaggttatttttctcaaccggttgctaccatcccagtgtctaataggatgatcataactaccatatactgtgcccagtactgcacacttattatttattttatttatttatttttgaaactgactgtcgcccaagctagagtgcagtggcatgatcttggctcactgaaacctctgcttcccaagttcaagcgattctcctccctcagcctcccgagtagctgggactacagacgtgcaccaccatgccaggctaattgctgcatttttattagagacagggtttcaccatgttggccaggctggtcttgaactcctgacctagtgatccacctgcctcgacctcccaaagtgctgggattacaggcgtgagccaccgcgcccggcagtttttgcattttaatacatagcactaccaaccattcagtgatttcctcttgatttctccctctccatcccttattgttcaatccatcagcaaatcccgtttattctccaaaagctacctcaaatattttttacttctatttatttttttgagactgggtctccctctgtcgcccaggctagagtgcagtggcacgatcacgactcactgcagcctccacctcctggtggagcctcacacgtcagccaacccccaaaccccgccccagtagctgggactacaggagtgacaatcacacggataattaaaaaaaaaaaaaaaactttttttttttttttttgtagagacagggtctcattatgttgcccaggctggaatttttacttctttttatccctactgccatcacttaaatccagaccaccatcatatcaacaccctggatcccactgaagctcctagctgggttctcctcttaccctatcctattatttttctacgtagcaatctttttaaaactgtacattggatggactaactcccttgtgtcactgatttgcaggacgagggcttttacccatatgagccacttctgtttcctcttcccctggttgttttataagactcctggggagggggcgggtgacccaagtagaagtgagagagttagagaaaggccaggataagaaagttattcattcaaataatgtaccgcgtgcccctgtgctctgcgcactgtgggtacagcagtgaaatcaaggaccgcacagttcgggcgctacgagagctgccgttccaattccatccgaaggaagggagacaacgctttcccgcgcggacgagcggccaggcgcggcgctaactgcttggacgccccgcctgccaccgtgcctcagctcgcctcttctgcacaacgggactctgccccacagggacaccgggaaggtcccgacccgagcgctcagtgggacggggtcgcaccaagagtccgcgcggaactcccgatctgggcggggcccaaaggtcacgtggccgggaaggcgggcgcgcgggctgcgagcaccaaccgccggccgccccgcgctgcgtcgccccgcctcccccgccccacccccgtcgcccccagcgcgtgcccgcccggcgccctctagggtggaaggctgcgggcgtcctaccagtgccaggactgccagagcgggaggagcgcggcgcgggccagccgggactgctggacagcggggtccaggctagaggcgagcgagcggtcagtgacggctgtggaggagggaggcgctgggcgtcagcgcgggacccgagcctct

SEQ ID NO: 28572 - DNA, 2300 bp, Homo sapien
ttgcacagaataaaatccaagcactccacaagaccctgaatgacctggtctcagctttctctcaaacctcatcttgtatcaccctctccatgttttgctatatccatctactctctctgtctttctgtttattgcataccaagcttgagttggccccaggacctttgcacttgctgttccaccaatgtggcctttgcacttgctgaaccaacctgtctttttctttttttttcaccactatcttattccagaacatttatttttatttttattttttgagatggagtcttgctctgttgcccaggctggagtgtagtggtgcaatctcggctcactgcaacctctgactcccttgttcaagcgattctcctgccttagcctcccaagtagctgggattacaggcacccgtcatcacacccagctaatagttgtatttttagtagagatagggtttcatcatcttggccaggctggtctcgatctcctgaccttgtgatctgtccatcttggcctcccaaagtgctgggattacaggcgtgatccactgcacccggccaggtcaatgagttttaaagatcacctgtgtgtattaaaggtgaagatttaaaaagggtgaccacaggaggtggaggttgcagtgagtggagatcccactgcattccagcctgggcgacaggggagactccatctcaatcaatcaatcaatcaataaaagaaagaaagaaagggtgaccagttgaagggctgctgcaatgggccggtggcttgtattagagtggtagtggtggaggaaatacaggatatattttggaggtagaaaaaccaacacgttgacagcatggatacaggggtttagggtggaaggggttgaaggaaagaaagacctctaggaagagtttgacatctccacggcggacttcaaatttaggcatatattttatatgtattcagcctccacatattgcatttagagtctcaattaattcactgggacacggcatggcatagggaaggaatctgtactaaatttggaatcccaatcctgtgtgatcttggaaagtgcctaaacctgaagtggtgaagagccaccacttcctcttctttcaaacggtgataggatgtctaagggtttgaaaagatgtttgcaaagctccacaacagcacctagaactcagggtgtctaaggaggttgtgggaaaccctaacgggatgaggcagagagcctcagattcgaggtttttacccaggagagagtggtgaaggaggaatgttgtaagattttgagcaggctggacatttacagtattgagaaaaagaatattccagtttcagccgggcgcggtggttcacgcctgtaatcccagcactttgggaggccgaggcgggtggatcccgaggtcaggagttcaagaccagcctggtgaaaccccgtctctactaaaaaatacaaaaattagccgggcttggtggtgggcgcctgtagtcccagttacttgggaggctgaggcaggagaatcgcttgaacctggcaggcgtaggttgcagtgaaccgagatcgcgccacggcactccagcctgggcgacagggcaagacttcgtctcaagaaaacacacacacacacacacacacacacacacacacacacacacacacacacagagtattccagtttcttccttttttttttctttttaatctggagtagtccagtttctgcctgagttggaaatgagtccctctgctatgcatcccagcaaaagggcaccttaaatatctaacccgggagagtacgaggttattcctggagtctggaacagtgactatcataggtgctcaataaccgtttagggaagaataacatccagtgaagtcaagaggttggcgtaattggaacactcggcgtgaggcgcaccaggtttccagcgcccctggtttccacgtcgctatggtaacgactcaccctgcacacatgcgaactacaattcccataaccgcccgcggcttccccgcccacagggagagaatggcgggagcaggcacggaaccggcttttcctccttcctgcagcgtgattggcccgcggctcagggaggcgaccaatgagtgctctcgcggagagcgacggggcaggccaatatggcttcctgcacctggtgacgcttggcgaaactgaggtctcatggagaagccccggagtattgaggtgagaaggcgaggacttagcgtgactgggaaagggaactccgagagcctcgctccgtgggcccttctttagggcttttagcgacgcctggaggg

SEQ ID NO: 28573 - DNA, 2300 bp, Homo sapien
cctttcatcacatcctcccactggtcatagagtgggacctgtgtggcgatgagagtgtaccgagagagtgagctaactgtgctagcaggggagacagactgcctcacggcctcagtcaagtcctcgtttgcacctcaacttttcacatcacccactgtgtgcagaaccagctactagagataaagagatgaggtctcctgtccttgaagagctaagccgggagtagaggtggaggtggtgggatgcagggtgatggctagagacccagagtcagacagaaccgagtcctaaaatctttataggactggtttcttactgtatcattttgggcacatgatgccttggtgagcctcgatcccttcgtccctgtgccagcccgagcaatggcagggcgctgatattagcacaaatatactttccttcaatcatcatacaaacctgggctgtgggcattatgacccccttgtttacacacagccatccacctgcaagtttactctctacctcccctcctactgaaatgctccagggggccaggcatggtggctcacgcctgtaatcccagcactttgggaggccgagacgggcggatcacctgaggctgggagttcgagaccagcctgaccaacatggagaatccatgtctctactaaaaatacaaaattagccgggcgtggtggtggcacatgcctgtaatcccagctactccggaggctgaggcaggagaatcgcttgaacctgggagggggaggctgctgtgagctgagatagtgccattgcactccagctctgggcaacaagagtgaaactcccatatcgaaaaaataaataaaataaaataaagtgccccaggacagcactggactgtttcagttgccttcccagtacctaatcctcactttcctgccaatggtacttttgattctcctttgggagaatcactttttttagagtcttgctccgtcacccaggctggagtgcagtggcgcaatctcagctcattacaacctccgcctctcaggttcaagggattctcctgtctcggcctcccaagtagctgggattacaggtgcctgccaccacttccagctaatttttgtatttttagtagagatggggtttcaccatgttggccaggctggtctcgaactcctcacctcaggtgatccacccgcctcggcctcccaaagtgctgggattataggggtaagccactgcgcctggccaaattcaccttttttattctcagccctggcttcagccagttgaggtatcccattccatctccctggtcacttgagtttagttcatcacagaacccggacacagttgcgctagcccaggcacgcaggggcaggctttttacaaagcaaattggattatatgtgttagacacaaggatgatgcaactccctggaaatgaaaatgctgaaactattagagaattcagggcaaaaaagaggctccccctccagcaggaaggaggtgcaccttcattagccattcagagacgagaggagtgagttagctgagtcaagaagcagctgtcattgttcagggcactccccagagttcagtggcagttctgaaaggaggagaggaagtggcttactctgggtaaaagactccctacttcctcaagactaaagaggcctcctcctggatttcccggagcttagggacgtggtgtgaagacaaaacaagagtgctgttgtgggctctgctctcccggcctgcaggctccacacgtcacagctgctggatattcggttcttgcgctcaagccccgcccctaagggccttgcccttcgttctggcttttacatgatccgcatcgaggagccttttacagaagtggctccaggagcatccacatctgcctctcggggcccacggggcccaggccagctacagaagcaccctgctttccatgggaaaatgctgcaaatgggggagaaaggagagaagggtttcagactgcaaagacccttcgacatcagctagcaccaagttccatcatgtaaataaactgaagggcttcagaccgggagtgaagccaagcaggtgatagaagtgtttgtaggaggatttttttgacataaacatgaaatggagcgagtggtaacgccatccgtctcctgcccagacctccccactgtcactgtccagcctgaagccgccctggtgaagcaggtggaggagcagctccaggcccggctccccggcctccctccctcagctccagggcactcacgtgcttgaaacagctgacgggagcagccttgtaactgtgatccttc

SEQ ID NO: 28574 - DNA, 2300 bp, Homo sapien
gccgcctgctcctgctcaacctggcctccaaccacctgcgtgagctgccccaggaggcgctggacgggctgggctcgttgcggcggctggagctggaggggaacgcactggaggagctgcggccggggacgttcggggcactgggtgcgctggccacgctaaacctggcccacaacgccctggtttacctgcccgccatggccttccaggggctactgcgcgtccgctggctgcggctgtcgcacaacgcgctcagcgtgctggcccccgaggccctggctggcctgcccgccctgagacggctcagcctacaccacaacgagctccaggctctgcccgggcctgtcttgtcccaggcccgcggcctggcccgtctggagctgggccacaacccgctcacctacgcgggcgaggaggacgggctggcgctgcccggcctgcgggagctgctgctggacggcggggccctgcaggccctgggtcccagggccttcgcacactgtccgcgcctgcacaccctcgacctccgcgggaaccagctagacaccctgcccccgctgcagggcccgggccagctgcgccggctgcggctgcaggggaatccgctgtggtgcggctgccaggcgcggcccctactcgagtggctggcgcgggcgcgcgtgcgctcggacggcgcgtgccaggggccgcggcgcctgcggggcgaggctctggacgccctgcggccctgggacctgcgctgccctggggacgcggcgcaggaagaggaagagctggaagagcgggctgtggccgggccccgcgcccctccgcgcggccctccgcgcggccccggggaggagcgggcagtcgcgccttgccctcgcgcctgcgtgtgcgtccccgagtcccggcacagcagctgcgagggctgcggcctgcaggcggtgccccgcggcttccccagcgacacccagctcctggacctgaggcggaaccacttcccctcggtgccccgagcggccttccccggcctgggccacctggtgtcgctgcacctgcagcactgcggcatcgcggagctggaagcgggcgccctggccgggctgggccgcctgatctacctgtacctctccgacaaccagctcgcaggcctcagcgctgctgcccttgaaggggctccccgcctcggctacctgtacctagaacgcaaccgtttcctgcaggtgccaggggctgccctgcgcgccctgcccagcctcttctccctgcacctgcaggacaacgctgtggaccgcctggcacctggggacctggggagaacacgggccttgcgctgggtctacctgagtggaaaccgcatcaccgaagtgtcccttggggcgctgggcccagctcgggagctggagaagctgcacctggacaggaatcagctgcgagaggtgcccactggggccttggaggggctgcctgccctcctggagctgcagctctcgggcaacccactcagggccttgcgtgacggagccttccagcctgtgggcaggtcgctgcagcacctcttcctgaacagcagtggcctggagcaggtgggcactgggcatctggcggggttggtgcaggaggcggcacaaggccacaggcagcgtgcattcactcaacaagcatttgccagccccttggtgccaggtctcagcctgggcacggggaccctgagataaaccaggactgcccctaccggtgtgagtgacagtccgggcagaacccaggccacacacggtgcctgcacaggacggtattgctggagcatagaggagggaggaatttgggaccatgcagtcatctactgtttgtacatattgagagcccccaagaggttttgccattattgggtggtggggtggaccatgaactgggcatctgggtgacttggacggagcaagtgttttgacatcagaccagcctgggttttgacccagcgctgcacttcctggctggaccagcttgggctctccagcttctcttctgctgagggaagatggggctcccttccagacttgggggtgggacagctctgccaggagctcacattggggcctggcaactccttgcagatttgtcctggggccttttcaggcctggggcccgggctccagagcctgcacctgcagaagaaccagcttcgggccctgcctgccctgcccagtctcagccagctggagctcatcgacctcagcagcaatcccttccactgtgactgccagctgcttccgctgcacaggtgggcacccccacctagacctccagccaaagaccaccca

SEQ ID NO: 28575 - DNA, 2300 bp, Homo sapien
caggctgagaacagaggggccagctgggcaggggaggtgatctatcatcctagcgctttgggaggccaaggtgggacaatcacttgaggccaggagttcaagaccagcccgggcaacatagcgagaccctgtctctaccagaagtaattaaaaaattagccaggcgtggtggtgtgtgcctgtagtcccagctactcaagaggctgaggtgagaggatcactttagcccaggaggtgaaggctgcagtaagccatagtcattccactgcactccagactccagcctgggcaacagagcaaggcttgtctctatttaaacaaacaaacaaaaaaagactcaaggacccggactggatgcctccctcctttctggggggtaccattatgctcctgccacctgggagctggcatcatatcagtctgaggacaggctgcttccgagcctaccctggaccagagcctcaccacagcctgagaacatgctctgaactggagtcattctcacagtcagcaagtcctcactgagccattgggcagaggcaaagggactaaccaggtcacttttctgagcctcggtttcctcccatgtaaaacaggactaatcataggacctccactgcgtggggggtggggggcagggaggctcagggtgattggcactttcctgggcccaaaggaggaggctctgaggggtttttggggcaggagctgcaccatggctgggactaagtgagggacagcatgtggcctcggcccttgtgcacaacagactctccctccccgtcccaggccccggagctccacccatgtccccttggtgctgccgcttcttgtacttctgctgctggccccggctaggcaggccgccgcccagcgctgcccacaggcctgcatctgtgacaactccaggcgacacgttgcctgccggtaccagaacctcactgaggtgccagacgccatccctgaggtcagcagggcaggagcacaggcacagagtggcagtggggcaaggtggggacccagagggaggagcctgggctgggcaccagttgatctgccaccgcctgcccgggagaccttggcaaattacttctctttgagcctcagtttacacttctgtaaaatgggaataataaaaaccagtaacagggagatgatctatttaaaatccttactgtgtgaatggaataagtaggtgacccatagatcgatactgaattcactgcagaccctgtggtggagaggcgggctgtggcagggtgaggtgtggtctctgctctgcagagtcatcagctagtggaggagagagagcgaggaggcagggacagcacagtgtgaaaaatgccacagtgggtgatgcccagggcactggagaggaaggcttcctggaggaggtgtcaggggtcggatgaagagaaatatgggaaaggtgacaggagaaaagagtgttccggggaagaagcagcacttgcaaaggcggggtccctgcctggctcagccccactttctcctcgctgtccccagctgacccagcggctggacctgcagggcaatttgctgaaggtgatccccgcagccgccttccagggcgtgcctcacctcacacacctggacctgcgccactgcgaggtggagctggtggccgagggcgccttccgtggcctgggccgcctgctcctgctcaacctggcctccaaccacctgcgtgagctgccccaggaggcgctggacgggctgggctcgttgcggcggctggagctggaggggaacgcactggaggagctgcggccggggacgttcggggcactgggtgcgctggccacgctaaacctggcccacaacgccctggtttacctgcccgccatggccttccaggggctactgcgcgtccgctggctgcggctgtcgcacaacgcgctcagcgtgctggcccccgaggccctggctggcctgcccgccctgagacggctcagcctacaccacaacgagctccaggctctgcccgggcctgtcttgtcccaggcccgcggcctggcccgtctggagctgggccacaacccgctcacctacgcgggcgaggaggacgggctggcgctgcccggcctgcgggagctgctgctggacggcggggccctgcaggccctgggtcccagggccttcgcacactgtccgcgcctgcacaccctcgacctccgcgggaaccagctagacaccctgcccccgctgcagggcccgggccagctgcgccggctgcggctgcaggggaatccgctgtggtgcggctgccaggcgcggcccct

SEQ ID NO: 28576 - DNA, 2300 bp, Homo sapien
aaaaaaaaataaaaagatgattctcactaacataatattgagtggaaaacgccagacacagccaggtgcagtggctcatgcctgtaatcctaacgctttgggaggccgaggtgggaggatcacttgtgccccggagttcaagaccagcctggacaacatagcaagaccccaactctacaacaaattttaaaaccagctggaggtggcggtgcatatctggaggtcccagctgcttgggaggctggtatgtcaaggccgcagtgagccatgatcacacttcactcacacctgggcaacagtgagaccctgtctcaaaaaaaggacgaaagagcacactgaagttccattgattggaatttgccaagcaaaaaaagcacaaagcagatggctgtgtggcatggcactatttctttttttaaaatgttactgcagggctgggcgtggtgactcatgcctgtaatcccagcactttgggagatcaaggcgggcagatcacttgaggtcaggagttcgggaccggcctggccaacatggcgaaaccccgtctctactaaaaatgcaaaaattaaccagatgtggtggtacacatctgtcatcccagctacttgggaagctgaggcaggagaatcgcatgaaccagggaggtggaggttgcagtgagctccagcctgggcgataaagtgagactctgtctcaaaaaacaaaaaactcctgcagtctaggaaaagtacacacagatgttcattgtttaacatatataaatatatataaacatatacatttatatttttattatatataaatatatacacacataagtgtatacacacacacatacatatatatatatatatatatatatatatatatatatatatatatatatatgtatatattttttttcttttttgagacagtttcactctgttgcccaggctagagtgcagtggcgccatctcggctctcgcgttcatgccatttgcctgcctcagcctcccaagtagctgggactacaggcgcctgccaccacacccggctaattttttgtacttttagtagagatagggtttcactgtgttagccaggatggtcttgatctcgacctcgtgatccacccgcctccgcctcccaaagtgctgggattacaggcgtgagccaccgcgcccggccttttttttttctcttgagacagagtctgtgttgcccaggctggtctcaaactcctgggctcaagtgatcctcccacctcagcctcccaaagtgctgggattacaggcatgagccactgtgcctgacccctgtttccaattaaaggaacaaacagtagaagatgcaattccatcagaagcaggaatctgaaaaatcaagatacatgaacattggccatggtctggatgtattatttaaaaaacaaacacgagcttgggaagatgcgtatttggatattctttgcaatattgtttgtaaatagcaaaaaattggaggtagccaatgtccaagatgaatggctaagtcaatgtgatacatttacacaatggaatactatataccacagaataatgagattcggaagagtcaatttggataactcccagtaatctgaggttaagtgaaaaaaatgagtgtctagaatcctgtgtgtccagtattaaactatttatgtcaatgtgtaagcacaaacggaaggaaagggtcacctgttctgaagcacccactgtgtgccaggtgcgggcctgaacccccactgtgacctcagagctacttattaatgggatgtgtttttcagagactaggaagcagcctctgggagggcagcccacatggcaggagggagcccaggactgctgactcccgggccagctgctggtgccccctccctgtcgggctggcccaaggattcaggccggggcctcagtcctcggctggggcaggcaggaggccctgtaactccagccgctgctcccgcccgccgcccgccccttcttcacctcagcctggggaagcctggcttgcctggtctgccgacaatgcctcccattcagccctgtcccagctgccaggcctgcgggccgtggaggggggctcctgccaggcggggacagcctgtccctgcgctgcgcctccaggctggaccagcagttccaggcggcatggaggggtgagtctttgggcccgatggtgcaaggggggattcagagcagctcagtggcctcaggtaagtctctgccccctctgggcctctcagaggctggcgggcaggggctctggggacttcctggggttctccaggaagggggtct

SEQ ID NO: 28577 - DNA, 2300 bp, Homo sapien
agcagtcctcctgcctcagcctcccaagtagctgagactataggcacacaccaccaaccttggctaatttttttcctttttgttgacatggggtcttgctatgttgcctaggctggtctcagacttttcgcctcaagccatcctcccacctcagcctcccaaagtgctggggttacaggcatgagccgccacacccggctgggatgatttttcatccttgttcattcactcattcattccctctctatgctgcatatgtgcttgctgcaggccaaatccaagccagactctgaagggacagcatggggtaaggcaggacctgttcttgcccgccaggggcctttgtactgcccaggcctctcctagctagcgtcagagcccaggtacctctccaccacgtgccacaggccaaccattgtctcttttgtcctcagactgacacgtctgaccccgagaaggtggtctctgccttcctaaaggtgtcatctgtgttcaaggacgaagctactgtgaggatggcagtgcaggatgcagtaggtaatgtgggctgggtgagacctgggtgccctctgtcccttgatgctcgtgggccccaggtatccttcgtggttgccgtaactcgtcagccccagcgctctcatgggaactgctctttggccacctgagtttttcctccgtcagggtcctgccgtggagccagctggctgctcttctccctgtttttcaccactgagaaactgaggcctttcccaaatccacacagccatgtacagttagaacccatagcccgctctaggaagtccagatagtcacatctgcaagcccaatggacgcaggtctatcgggaggagggatggtgagagccaagcccttgtccacaccttggagcttctgtgctcacgtccactctacctggaggttccttgcacagaggacacctttccccataacattatgggggcttccttggagcaccagcccatatccctccagccctatcacaaccctctccccaccctgtctgtttcctccattccagcacctgtcaccttccaccctgtttccatgtgcttgactgagcctccacatctaacgaaacctgagccagttccggttaggcagaggggaggaagggccctgaggcgagggggacggttcctggaaaagatagaaaggggtggaaggacatgtggtgcctcttcccggcgtggcgtcgaagcggggagggcggctcagtgggaaatgaggctcggaaggaggtgggggccagacacaagcctgctccctgagggcccgcctgtgggcatttttgggaacaagttgccctagttctgtttcccaggaagcctagcacagtccctgcacatcccctcaccctgccaaaataacctgaatcctccccagtggtagcctgcctcaggaaatctccattcccacggtgtgaggtgggcacagtgggtgtcatccccatgcccattttatacctgaggccaggatgggcaagggccagagtgtcacagctggcagatggactgagcccatcccctgatgccaactgccactccctctggttcctgtgtctctgccgtccctctcgtgttcgcctcttcgtcagggcgaggaggcaggcgagcctgtgtctgcgcggtgttgggggaaccctgggtgccttggcccagccctctgccatagccagcagcctgcccctgctgcttctgccctacagatgccctgatgcagaaggctttcaactcctcgtccttcaactccaacaccttcctcaccaggctgctcgtgcacatgggtctgctcaaggtgaggccggaaggaacagcaggcccgggagggaggtgggtggggtctgcacagaagctgccccagccatgcccgccaacctccctcacctcgagtcctgagccggctcgcccacggggccccgaggcctgggtctgccccagcagccttggtcttcacgatgagattccggctagactcagttgtgggcactatcagcagagtctggatggtggagtccaggggcccccccaggtgactttgaagctcaccccgcttttcgctgtgttcctctcagagtgaagacaaggtcaaggccattgccaacctgtacggccccctgatggcgctgaaccacatggtgcagcaggactatttccccaaggcccttgcacccctgctgctggcgttcgtgaccaagtgagtgtggccttgtccttctgccggtgcctgccctctcgggcttctctggccaggtctgaaggcgcccggttccgggaggccca

SEQ ID NO: 28578 - DNA, 2300 bp, Homo sapien
tggtttcttcatttctaaagcgggaggcagggagtggtgtacatcactgtcttgtgatttaagtaaacacagtacgtgactcatcgttggctgcagggcattatttttgttgttggtgttattcttcctgcccactttgccccacctggaggacagagcctgccatatcctcacttggggaaactgaggcttagagtagaacctggtgtcctggcccgggtttctgcctgcctccaacccttcctcttattttcaggagctgaacttgtcattctgtgaaatcaagagggatgctgccctggctgttgctgaggccatggcagacaaagctgagctggagaagctggacctgaatggtagtcggatgggggaggcctctgcacaggtctgctaggctggccctggcaccccggctgactgctcttccctccccttgagcaggcaacaccctgggagaagaaggctgtgaacagcttcaggaggtgctggagggcttcaacatggccaaggtgctggcgtccctcaggtagggaactcggggtggccccagaggtcggggtcaggccattcctttctttctttcttttgttcttgagatggagtcttgctctgttccccaggctaaagtacagtggcgtgatctcggctcactgcagcttccacctcctgggttcaagtgattcccctgcctcagcctcccaagtagctgggattacaggcacccaccaccacacctggcccctttatttgtttctacttgtatttattcagaaacgttgggtgcactcctgttacgtactaggtcatacactaggcatcagggctataaggatgggacagtcagggcttctgtctcgtggggtggagacagaatgagttgtccgttcaacagaggagctcgtacgggctgagcggggccaccctgtagagtggtggagttggggaggcctctgaaggggtgaggccagatctcatcctgatgtggtggggcctggggagtgatgggggtgggaggtgggggcagccagaaggggctgcactcgggattgttcttaagacgctgactctagaaaggaagagaccatggggcctggggagtctacctggaggtgaaggtgggtggccggggagtggccatctcctggatccaagtccggttgggccatcagcatcgggctccctgtgcccctcgcatctccaagtcggcctcattcgtgtgtcagatactcagtcgtgtctcctcggtgctaggccctgagctgaggctaggaactggggactccgaggtgggctgaacctcacaggtcccactgtccctgggaaatggtccagccttcctatggggcaaggacacccctactcttcttcctcccccacacctgtagcttcctgaggtcatgtggatgtgggcgcccctgccctggcatctcaacctgggcagtgttcctgccaagccctgggctctaggtgtgacaaagctgtcttcgttttctgtctctccatgaaacctggggctccttgaggacagggacaagatctgatttttttttgttttttttttttgtttttttgtgggggatggagtctcgctctgttgcccaggctagagtgcagtggcacaatttcggctcactgccagctccgcctccagggttcacgccattctcctgcctcagcctcctgagtagctgggaccacaggcgcccgccaccacacccggctaattttttgtatttttagtagagacggggtttcaccacgttagccaggatggtctcgatctcctgacctcatgatccacccacctcggcctcccaaagtgctgggattacaggcatgagccaccgcgccgggccgatcttatttttttgtgtccacagcatggatttccctggtgatccacctgcccctgccctgggagcaggtgctcccaccccaccaggctctctccctcctggctgaggtgaggtctctgggctcatggagccaggccttagagccaacctgggctgctgggtagagaggatctgcttcagccagctctttctgcagtgatgacgaggacgaggaggaggaggaggaaggagaagaggaagaagaggaagcagaagaagaggaggaggaagatgaggaagaggaggaagaagaggaggaggaggaggaagaagagcctcagcagcgagggcagggagagaagtcagccacgccctcacggaagattctggaccctaacactggggtgagtttctatcatctgccacaatcagagccctggtcctgagaacgtgaaatcccgaggc

SEQ ID NO: 28579 - DNA, 2300 bp, Homo sapien
gtggtgaagattaaatgagctgtgtgtaaaaggatatggcatgatctgttaattaattaattaatttatttatttatttagagacggagtttcgctcttgttgcccaggctggagtgcaatggtgcgtctcggctcactgcaacctccgcctcccgggttcaagcgattcttctgcctcagcctcccgagtagctgggattccaggcatgcgtcaccatgcccagctaattttatatttttagtagagacggggtttctccattttggtcaggctggtctcaaactcctgacctcaggtgatccgcccgcctcggcctcccaaagtgctgggattacaggtgtgagccactgcgcccagcctgcatgatctgtttaactttttttttttttcttttttcagtttttgagacaaggtcttgctctgtcgccagggctgaaatgcagtggtgcaatcacggctcactgcagcctcaagctcccaggctccagatcctcctgcctcaggcccttagctgagactacaggcttgcaccatcacgtccaactaatttttgtattttttgtcgagacagggtttgaccatgttgcccaggctggtctcacactctctcgcctataatcccaacactttgggaggccaagatgggcaacaagagtgaaactccatctcaaaaaaaaaaaacaaaaaaaaaacgctgtttgtgtttttatgcttaaattcacacctacagaaaagttgcaaaaatgttcaaagaactcccatattcttcaaccagattaactgattaacattttgccacatttgtgtctctgctttctctatgtatatgtataggtatatttcttttaaccataaaggttgcagacatcatgtcctttttgtccctaattatttcagcatttttttccaagaacaagggcagtctcttacataaccctgtaccataatcaaaattaataaatttaacattgatacaatactattatctaatatagtcaagttttgctgtttcagtattgtcctttatagcaatccccacccaggatccgatccaggaccatgtcttgcattcagttgtctttttcgtttcctgtaatcggcaacagttcctcagtttttctttgtcttacataatacagacatttccggaagggtacagatcagttattctgtaccatgtccctcagcttgggtttctcatgattagactaaggtcatgcattatagaccggacggtgacgccgtgtttttctcagtgcatcacacagaaagcgtgcgatgaatgtcagcttgtcctgctgttgatgttaacgtggccgttcaagtggtgtctgcggagcttctctacgatagttactatttcccctttttaattatcaggtaatttgtgcatatttatgtggaagccttcgaatgccctttcagtttcatgggacggaaaagagtcttttctttcgggaaatggatacctgtgtcttgcccaagagacccagcagccagcagtacctgttatcaacaaagttacgcgaacaaaacctttccggaagagctgagggacctgggtgcaacgcattctgggaattgtagtctctgggcgctcccggctgaacacctccctgcggtctctgcgagaaagagccagaagccaccaggggagggcgaagaggagggcggtggaggacgctctgcgcgcggtgcgccatgggacgggtagttcgcggtgcgcgccccatcgcgctcccagatggggaaccggactactctacccgagaggccgcgcgagcggggcgagggcaagccggccggggcctcgaacaaatcaaatcgaagcaaagaaactgccggctttcaaaatcctcctcctccgccatcatccgccgcggtgcggagagcaggtggtgctggaagcgcgtgaggccgggagctcgagagagctaacagactagccggctggacatctggaccgctggatccggaggtggcgaccccggcctgacccggaccctaaatccgtccccgccccagagggcggaggcgcgcgctcgattccccccacgcggcggcgccgcctgtttacggtagagtcagggtccctttcctttccccgtcacctgcctggaacaggggtgcggggcgaggagggcgtggcgcccgtgtgcgccttctgcctgccccctcggccttcttcacttagccttcgacggccgagcgccccaggggtggcggtgggagtggggttgttgagcggcgctggctcctttcacaaatggggaaactgaggcttaaagggcgtctgac

SEQ ID NO: 28580 - DNA, 2300 bp, Homo sapien
tcaaagagccccagagtcccaggccaactgctgtggggctttgcatcttgctgtgggcacctgcaggagggagagactcatgaagtagcatttgacatgggccttgtaggtaaaaaggagagggaaggtggaaagaggatccacatctcaggaactttgagaactgggagagttacactctgtctagagcttcagttttctcatctctgtgctgggaagggtggtaatgatgcccacttcccttgtggtggtgaagattaaatgagctgtgtgtaaaaggatatggcatgatctgttaattaattaattaatttatttatttatttagagacggagtttcgctcttgttgcccaggctggagtgcaatggtgcgtctcggctcactgcaacctccgcctcccgggttcaagcgattcttctgcctcagcctcccgagtagctgggattccaggcatgcgtcaccatgcccagctaattttatatttttagtagagacggggtttctccattttggtcaggctggtctcaaactcctgacctcaggtgatccgcccgcctcggcctcccaaagtgctgggattacaggtgtgagccactgcgcccagcctgcatgatctgtttaactttttttttttttcttttttcagtttttgagacaaggtcttgctctgtcgccagggctgaaatgcagtggtgcaatcacggctcactgcagcctcaagctcccaggctccagatcctcctgcctcaggcccttagctgagactacaggcttgcaccatcacgtccaactaatttttgtattttttgtcgagacagggtttgaccatgttgcccaggctggtctcacactctctcgcctataatcccaacactttgggaggccaagatgggcaacaagagtgaaactccatctcaaaaaaaaaaaacaaaaaaaaaacgctgtttgtgtttttatgcttaaattcacacctacagaaaagttgcaaaaatgttcaaagaactcccatattcttcaaccagattaactgattaacattttgccacatttgtgtctctgctttctctatgtatatgtataggtatatttcttttaaccataaaggttgcagacatcatgtcctttttgtccctaattatttcagcatttttttccaagaacaagggcagtctcttacataaccctgtaccataatcaaaattaataaatttaacattgatacaatactattatctaatatagtcaagttttgctgtttcagtattgtcctttatagcaatccccacccaggatccgatccaggaccatgtcttgcattcagttgtctttttcgtttcctgtaatcggcaacagttcctcagtttttctttgtcttacataatacagacatttccggaagggtacagatcagttattctgtaccatgtccctcagcttgggtttctcatgattagactaaggtcatgcattatagaccggacggtgacgccgtgtttttctcagtgcatcacacagaaagcgtgcgatgaatgtcagcttgtcctgctgttgatgttaacgtggccgttcaagtggtgtctgcggagcttctctacgatagttactatttcccctttttaattatcaggtaatttgtgcatatttatgtggaagccttcgaatgccctttcagtttcatgggacggaaaagagtcttttctttcgggaaatggatacctgtgtcttgcccaagagacccagcagccagcagtacctgttatcaacaaagttacgcgaacaaaacctttccggaagagctgagggacctgggtgcaacgcattctgggaattgtagtctctgggcgctcccggctgaacacctccctgcggtctctgcgagaaagagccagaagccaccaggggagggcgaagaggagggcggtggaggacgctctgcgcgcggtgcgccatgggacgggtagttcgcggtgcgcgccccatcgcgctcccagatggggaaccggactactctacccgagaggccgcgcgagcggggcgagggcaagccggccggggcctcgaacaaatcaaatcgaagcaaagaaactgccggctttcaaaatcctcctcctccgccatcatccgccgcggtgcggagagcaggtggtgctggaagcgcgtgaggccgggagctcgagagagctaacagactagccggctggacatctggaccgctggatccggaggtggcgaccccggcctgacccggaccctaaatccgtccccgccccagagggcggaggcgcgcgctcgattccc

SEQ ID NO: 28581 - DNA, 2300 bp, Homo sapien
tgcaatctcggcttcctgaaaggaggttctcttgaacctctgcctcctgggtccaagagagtctcctgcttcagcctcctgagtagctgggattactgacacgtgccaccatgcctggctaatttttgtattttcattgtattttactttcaatttattttttaatattaaaacattttttttgagacggagtttcgctctcattgcctaggctggagtgtaatggtgcgatctcggctcactgcaacctctgcctccttggttcaagagattctcctgcctcagcctcccgagtagctgggattacaggcgcccaacaccacgcctggttaatttttggtatttttagtagagatcggggtttcaccctgttggccaggctgatctcaaactcccaacctcagatgatctgcccgcctctgcctcctaaagtgctgggattacaggcgtgagtcactgcacctggccttcatcttctcttttaataatcctcttgtggccgggtgcaatgtctcatgcctgtaatcccaggactttgggaggccgaggtgggtggatcacgagctcaggattttgagacccgcctgaccaacatggtgaaaccccgtctctactaaaaatacaaaaagtagctgggcccctgtaatcccagctactcgggaggctgagacaggagaatcgcttgaacccgggaggcggaggttgcatgagccgaaatcatgccattgcgctccagcctggtcaacagagtgagactccgtctcaaaataaataaataaataaataatcctcttgttccaaaatggaaacaattttttttttcttttttaatgaaaactgagctgggcacagtggctcacgcctgtattcccaacaccttgggaggctgaggtgtgaggattgcttgagcccaggagttccagaccatcctgggcaacacagcaaaactctgtctctacaaaaaaattgtctagccgggcgcggtggctcacgcctgtaatcccagcactttgggaggccgaggcgggcggatcacgaggtcaggagattgagaccatcctggctaacatggtgaaaccccgtctctactaaaaatacaaaaaattagccaggcgtgttggcgggcgcctgtagtcccagctacttgggaggctgaggcaggagaatggcgtgaacccgggaggcagagcttgtagtgagccgagatcgcgccactgcactccagcctgggtgacagagggagactcctctcaaaaaaaaaaaaaaaaaattatacaaaaagttaaccagcacggtgatgcacatctgtaatcccagctactcaggagactgacggggtaggattgcttgagcccaggagttgaaggctgaagcgagctgtgatctcaccactgtgcttcagcctaggcaacggagggagaacctgtctcaaaagtaaataaataaataaataaaatgaaaactgtcaataatctgtttagtataaatgcaaaagagcattaagaaataatttttaggctgggtgcagtgcctcacgcctgtaatcccagcactttgggaggccgaggtgggcggatcacaggtcaggagatcgaaaccatcctggctcacacggtgaaaccccatctctactaaaactacaaaaaaattagttgaatgtggtggcgggcgcctgtagtcccagctacttgggaggctgaggcaggagaatggcgagaacccgggaggcagagcttgcagtaagccgagatcgcgccactgcactccagactctgtctcaaaaaaaaaaaaaaaaaaaaagaaaagaaataatttttaaaatacttggttttttaaaaaaattcctttttctcttttggtggatatggggtctcactatgttgcccaggctagttagtctcaaactcctgggatcaagcaatgctcctgcctcagcttcccaaagtgccgggattataggcatgagccaccgtgcctggcccacctaactttttcgttaaaaacaaacaaacagcccatcctgcagttagaaaaatctactcctctccctctccttctccctctccctctccccacggtctccctctccctctctttccaaggtctccctctgatgccgagccgaagctggacggtactgctgccatctcggctcactgcaacctccctgcctgattctcctgcctcagcctgccgagtgcctgcgattgaaggcgtgcgccgccacgcctgactggttttcgtatttttttggtggagacggggtttcgctgtgttggccgggctggtctccagctcct

SEQ ID NO: 28582 - DNA, 2300 bp, Homo sapien
ttcactacgttagccgtgctggtctcgaactcctaaccttaggtgatccacctaccttggcgtcccaaagtgctaggatttcagatgtgagccaccgtgccgagctacagggtttttgagagggtaaaagaatcaacatatgcaaagtgtttggctcatagtaaagaagcggtggctgttactgctatttcagctttaacatggggacatagagcacactgtgacaacatgggactgacaacatggggcttcccagaaagcctaccgatgccagcctcctggcccttttctttttctttctttttttgagacagagtctcactctgtcgcccaggctggagtgcagtggcatgatcccggctcactgcaagctacgcctcccggattcacgccattctcctgtctcagcctcctgtgtagctgggactacaggctcccgacaccacgcccagcttattttttgtatttttagtagagatggggtttcaccgtgttagccaggatggtctcgatctcctgacctcatgatccgcccgcctcaacctcccaaagtgctgggattataggcgtgagctaccgcgcccggcctcctcctggcccttttctccaaagcatcctcacctctggttggggtcttgtaataaagacccctttaccatcttaggcagcccaaacaattgaacaagttggtaccaacttgaagagataagaggctggtgtcctgctgaatcccccttgaatgatggacagtcctcttcaagaatatgtgttcattatttcaccagcaacctggggtggtggaatcaccagaccatttgccatctagttcacttgaggcaaaatgcagcaatccaactggcctcagcatcctcatcgatgaaatgagagtgataataaccatggtggtaaatgtgataagttgtcaagggtgtttcattgtaaattgcctagggggtattgggaactcacacacacacacacacacacacacacacacacacacacacacacacacacatatatttctggagacagttttgctcttgttgcccaggctggagtgcaatggcatgatcttggctcactgcaacctccacctctggggttcaagtgattctcctgcctcagcctcctgagtagctgggattacaggcacccaccaccacgcctggctaatttttgtatttttgtagagatggggtttcaccacgttggctagtctggtcttgaactcctgacctcaggtgatccacccgtcttggcctcccaaagtgctgagattacaggcgtgagccactgcacccagccctgattgtcaatatctaatcaggttcctcattttccaccattccccaggtgatgtctgatcaccttgccctgccttcagcaagaatcttgttagatgggtttaagcgagaatcctctcatctctgatgcagtttcctatgcactggcgctcaatcagtggatcctttctccttcctcataaattcccagttgcccatgctgatttctgaattgagcccaaatactctccctgaccgcaaaacccactgcagtggtccctacacccatcatgatgccaataaagtcggccttgtagtctttaacaagtgtcattcaatattttttttaacatcctatacataaaactccagccaagtgaggtcctgattcttctatgtgtctccggttcccatctatgagaagggcacaacgcaaccagggttttgggcagccttccatgaaagcacctggaagccggagaaggggggcggggggacttttgacacagatggggaagggcggaggcgctgggtttgagcagcatcagcccagaaatgcagaactgccaaaagaaacccccctaaaaggcaggacacttttaaagaaaataaaggtgaattccaggcatgagctttcgacggggaatggggcttccccgactcgcccccacgccccccgcccttctccccaggtgcgcagcccgcgccgcccaccccgggcgcggcgaggcgacgggagccgagctctctaggacccgaggaggaagagctgcagggagacagtgcctccagcgggtgctgccgcgagcggccagccgaggggctggaaatgaaagtaaagcgctccagagccacatggacggagctgccggggcggcggcgccgggagcaggatgcggccgcccgtaattaaatagcatttactcttattattactaataataataacgtaatcatacctctagtcatagcataccatttatcgggctcggcgcaggcccgcggggagcgcag

SEQ ID NO: 28583 - DNA, 2300 bp, Homo sapien
ttgtgtttttagtggagactgggtttcaccatgttgccaggtctggtctcgaactcgtgacctcaagtgatcagctcgccttggcttcccaaagtgctgggattataggacagtccctgttcttgcttacgtatctgagaggaaggtggtgcagagggcaggagcacactcaagagtcaagaaggcctggattcaaatcctgcagattgaccttgggctgggcacacaaatcccgtgttcctcaatttcttcatctgtgaaatggagattataatgcccacccctcacggagctactataacaattcgagagaatgtaagtcaacttcccagcacagaagcaattgtggctaacccagaaattcccttcttctccaccctggcaagcctccccattctttgaagttcaaattctacttcctagaagaagccttctctaacttttccaggtagccttgagctgtcttctctccactcccactgcactgaccccagaattcttgtgttctcattggttcactagaatcaactttctctttccagccagataataaatgacaaagtcaattgcaaacctgccccacagcatctcacaagaggcacttgaaaagtaacttgcagacaggcatgaggtggctcacgcctgtaatcccagcactttgggaggccgaggtgggtagatatgttgagcccaggagttcacttgaattcagatatgttgagcccaggaatcacttgaacccgggaggcagaggttgcagtgacctaagatcatgccactgcactccagcctgggtaacagagtgagactctgtcaaaaaaaaagaaagaaagaaagaaagaaacttgcagcagccaggtgtggtggctcatgcctgtaaccctatccctttgggaggccaaggcaggaggattgcctgagcctggcagactgagctacaattgtgctactgtactccagcctgggtgacagagtgagaccttgtctcaaaaaataaaaagaaggctgggcatggtggctcacgcctgtaatcccagcactttgggaggccgaagtggctggatcacgaggtcaggagatcaagaccatcctggctaacacggtgaaaccccgtctctactaaaaatacaaaaaattagctgggcgtagtggcgggagcctgtagtcccagctactcaggaggctgaggcaggagaatggcgtgaacccgggaggcggagcttgcagtgagccaagatcgcgccactgcactccagcctgggcgacagagcgagactccgtctcaaaaaagtaaaataaaataaaataaaataaatgaaaagtaacttgctaaggtggcccaggactctgggaaagggtgacgatttggagccagaaaactgggtgggaatcctacctctgctgtctgactttccagcaagacacacaattcggcctaaggtttcttatctagaaaatgtctacctgacacagttgctatggaggacagatgagccaacacatgtgaaagcccttttgttataaactaaaaagtgatatttgagggattattattttcagattgagggattattttcagattctctatccatgtctcaaccgacatctcagctttcctactaagactcgagagatcagcacatcccaccaagcttctaagccccacaataatctaccaaaacccccattcctgtctaacctatacaaaagccagcagctaagaacacacagcatctacagaacagaaactttatcccagctcagggacaacaaagtctctctcccatcctcagatctcatccctcctggacaggttctttcttcccaccttaagtctccccacttctcaaacatgctccatccaactgttgaccaggtgtcatttccaccttgcagtccaacttctgtgggaggtggacacggggaaagaagaccaccacggaggggatggctgtatgtgtgtagaggaagtattggtagtagaactaaagattctgccagcattttgtgtccaacacagttgctacatgtactataattatctcatttgtgtgaaaattcaaggatctgcattctgctattttcatcaggctgaactgcagatgctgaggaatatggcaagaagttggggttcaaagtctgatgccaaagctagcaacccgagaaataaaaccgctgatcaccagctccccactcaggcccagcccccttttagagcccccagactccccacgcagggccctagccccctagtcttccccgtcaatgccctgttggcaatacagccatcaggttctatc

SEQ ID NO: 28584 - DNA, 2300 bp, Homo sapien
ggaggacactggcctgagggtggtcatcgccctcagggacacgcctcccgacatggggaagggaatgagagtgggagtgagagcacccaatcacaggacccacgaagtggtggtggctgacggcagcctggctcttgctgactgactgatggactgtgctctcttccccagagactgatggagaggcagaaacggaaggcggacatcgagaaagggctgcagttcattcagtaagcctgcatgcggcaggggctggacggctgggtgggcaagggtgggttctctgagagccatgccctcccagcgctcccttttcttgctgctgagcctttgctgccaaggctcctgtgtgcgctggggtgcgggcaggtgggaggagccaggaaggggctggtgtggctgtgcgtgaactccacatgcacacatgctccctggcccaggttacccttcaatcttgtccagtaggtaattctgccctcacccttcacatttgcactccctgttaattctcttgcatgactgcacgagttttctgataaatcaatggtccctctgttacaatctcagtctccgtgctgggaccttcacatctgtgtcttctttgagacagaatctctccttgttgccctggctggagtgaatggtgctcctgacctcctggactcaagcaatcctgcctccacctcccatgtagctgggagcataggtgcacaccaccatacccagctaattttttttttttttttttttgagacagagtcttgccctgttgcccaggctggagtgcagtgacatgatctcggcttactgcaacttctgcctcctgggttcaagcgattctcctgcctcagcctctcgagtagctgggatttcaggtgtgtgccaccatgcctggctaatttttgtatttttagtagagatggggttttgccatgttggccaggctgccttgaactcctggcctcaggtgatccacccacctcggcctcccaaagtgctgggattacaggcgtgagccaccgcactaggccatttaaaaaatttttttgtagagacgaggtcttgctatgttgcccaggctggtctcaaactcctgggctcaagtgatcctcctgcctcagcctcccaaagtgctgggattacagacatgagtcactgtgcctggccaatccatcatctttttaatcttctcaacagcccagtaaagtaggtagccttatttccattttgcagatgagaaagttgagactcacagaggttaagcaacttgtttaaggtcatggagctattgaggaatagcattctagcccaagcctggttgaccacaaaactcaaaactcacattcttttttttttttttttttttttttttttgagacggagtctcgctctgtcgcccaggctggagtgcagtggcgggatctcggctcactgcaagctccgcctcccgggttcacgccattctcctgcctcagcctcccaagtagctgggactacaggcgcccgccactacgcccggctaattttttgtatttttagtagagacggggtttcaccgttttagctgggatggtctcgatctcctgacctcgtgatccgcccgcctcggcctcccaaagtgctgggattacaggcgtgagccaccgcgcccggccaaaactcacattctttctattgtatgcctctgagcacccacatgccacactttttttttgtttgtttttgagatggagtctcactcttgtccaggctggaacgcagtggtgcgatctcggctcactgcaacctccacctcccagattcaagcaattctcctgcctcagcctcctgagtagctgggattacaggcgcctgccaccacacctagctaattttcgtatttttagtagagacggggtttcaccatgttggtcaggttggtcttgaactcctgacctcgtgatctgccctcctcggcctcccaaagtgctgggattataggtgtgagccaccgcatccagcccgacatttgtttttgttttatttctctttttttttacacacaaaatattttgagtaacctttttctcttattgctcttaaatagatcctcagaggcataattatcacaacactaatgaagcgtgggcatcgtggcctctcacttgcacgagccccttccgaggccctggaaggcatgcacccttgcaatcctgcgttcatcattttgtgttctttttcttaaatagggctccccataaaactggaattcgcctctatgttcccttatatactccccacttttgttctctcacacagac

SEQ ID NO: 28585 - DNA, 2300 bp, Homo sapien
tcctgggttcaaaccattctcctgcctcagcctcccaagtagctggggttacaggctcctgccaccatgcccgactaatttttgtatttttagtagagatgaggtttcaccatgttggccatgctggtcttgaatttctgacctcaggtgatccacccacctcagcctccccaagtgctgggattataggcataagccaccacgcctggccgcatgtgagggctttaatctcccctggcactctaagtgctcctcggtgctgggtcaacagcatagtcacgtggggaggggctggtgctgggtgctgggatcggggccttcccagccacagcgccactgtggccctctccccacagggaacttctaatggattggggtccatagatgacatcgaaacaggtaatgtccccgatacgagggaacaagtggaaattggggccccgagaggtcaggggagtcgagccccctccccatcccagccctgtagatgggagggcctccgaggggttccccaccctggtactccctgaggcatgggagaaaacagtgggttgagagctacagacccactcaaggaggggagggcatctctagtctggcagagaggggtgctgcctcttagctaggtgcaacagtcccatggccttcactcctggctgcctgcacacccccacctcttccaaagccctttcccctcctcttcctcattggcttccagaaaaggttgccttttaagagtgtcccctggagagggcattgcttaccccagaagaaggaggcagcagtggtggacatttaggcattgagcctgggccaaggattgacatcataggactgagggcccctccctgctctggggctgtggccttccttgaccaccccctgagcatctgccagtgggatcagccgatggggaaggcagggctcctggcaagagctgaaagaagaagggaaagtgttggatgagcatcacggggcccgggacgcctcctccaccctcaccaagcagtgctccccttcggctcttgcccaccccatccgcagactgctacgtggaccctcgaggctccccagcccttctcccctccacgcccacgatgcccctgttccctcacgttctggacctgctggcccccctggacagcagcaggaccctccccagcaccgacagcctggatgacttctcagacggggatgtctttggcccagagctggacaccctcctggactcgctggtgagccacaccaccctccttgtgctcccctgatcccctctccccgctgtgtccccattgtcccaggggtggagggaaggccccaatgctcatgtcatgtgtctcaggaggaggcctcagtagggacttgtttggtacagaaatgaagctgcacactgggcacggtggctcacgcctgtaatcccaatactttgggaggccaaggcagcggattacttgaggtcaggaattcgagaccagcctggccaacgtggtgaaaccccctctctactaaaaatacaaaaattagccgggcatggtggcacatgcctgtggtctcagctcctcaggaggctgaggccggagaatcgcttgaacccgggaggcggaggttgcagtgagccgagatcacaccactgcactccagcctgggcagtggagcaagactccgtctcaaaaaaaaaaaaagaaatgaagctgcacaatgtctggccagaagggaccatagtgagccctgctcccacatgggacaggatgaagccaggcgacagggtgcaggtctccttgcttccccaagtcctgatgctgcccaggcctgggcagtcctgttttcctctgacccctccctctgtccctgcctcatagtctctggtccagggtggcctgtctggcagcggcgtgcctagtgagttgccccagctgatacccgtgttccccggcgggaccccactgctaccacctgtggtgggtggctccatccctgtctccagcccactgccccccgcctccttcggcttggtcatggacccctccaagaagctggccgcctctgtgctggatgccctcgatcccccgggccccacgctggaccccctggacctgctgccgtactcggagacccggctggatgcactcgacagctttgggtcgacacgaggctccctggacaaacctgactccttcatgggtaaggccatgggtgggcccgttcaacctccctggacaggttgcacagtgctgtggcctctttggtgcctggagagtggagttgagttacagatctgtttgtccccatcactccttagc

SEQ ID NO: 28586 - DNA, 2300 bp, Homo sapien
atacaactctgcaaaattaaatgtttgtgtgtgtgtgtgtgtgtcataaatatatacatatatatgtttacttttgcaaaaagaaacattggggaatgggaaagagggacagggatagaaaggacatttctaaagtatacttccttgaggctgggcacagtgcctcacacctgtaatcccagcactttgggagggtgaggagggcggatcacctgaggtcaggagtttgagaccagcctggccaatgatgcgaaaccctgcctctactaataatacaaaaatcagctgggcgtaatggtgtgtgcctgtaattccagctacttaggaggctgaggcaggagcctggtaggcagaggttgcagtgagctgagatcctgctactgtactgcagcccgggcaacagaatgaaactatgtctctaaataaacaaataaataaacaaaccttatcggaggttttgagctgtgagccacgtattgttttttgtattcaaaagttaaaattaatttttaattaatttgggaaagagcataatttggggagggtcattagggagggaaggagggtaattaagagtataagctgaggtcattgggaaaggaagaagccagaaggggctcttggagtatttttgattctgtacaaaatggaattttggaaaacaacaaagcactgcttagaaaccagctacaggccaggggcagtgttcacacccataatcccaagactttggggaggccaagaccgggggatggcttgaacacaggacttgagaccagcttgggcaacagtgtctttataaaaaaaaagtccagtgtggcggcatgcacctatggtcccagctacttgtaaggatgaggcagtgagccgtgatcccaccactgcacttcagcctgagcaacaaagaccctgtttcaaaaaaaaaaaaaaaaatcagctaccacgcagaaaaccaaatgtttattgcagcccatctggagcttcagagccatagaactagagctgaacggcaccttagaggtcactgcattcggtggttcgggaactgagacccagagttgctgccacgcttgctcaagatcccacagcaatgtacggcagaatcgagaacctggcatcccccggcaagtctggctttgacgtgatgttggtctgacgtagaggttgacatccagaacctttgcttcacccattcaagtaacccaaggaccacaggggccagcgtcctggtgggagggtatgagagggaactacagcaaatagccaattggcactttaagtccccacaatgactgggaagcagggattcctcatccaggacaagcctgaagcaggctggcagagctgcccccctttcagtggtgcctggtctcctggcacctgccccttttcccctctcccctgaagaccaaagaacctgaggcggtaggttttatcacttccttttggggaacaggcttcaggctgtgcagatggtataaagctccaattatgcatgccatatgtacactggcgtgccttgtagggtacgtgtgcatggcataaacacagcatcaaaacatgccacaagcccttgaggctcagaagcgcacaggtgaaggcatgatgtccgaccgcatccctgcatctgccaacacagggtgtcttgtgctcggctgcctgaggtgctgtccttgcctgtcatcctccttttctcttggagcctcaggtcccagcccgggatggtttccactgcgtgcctgggcctccagggcacctccatgctgatgcgtgcttgctgtgggcgtggagcttaccattctcacctggcagccccagttatggctcccagcctgggggagaacttccctttccaaagttagataacaggctgggctctctgtcagaggattggcgcgacagctccacgtgctgcagctggcgcagggccaggcccgccctgccaagcagcgggaagggaaggcctggctgcagccggagctggcaggtggccgagccgggggtggacgggcgggctgggactggtgctggccattggctgcctcaaggctcccaccccgcctgcctccctagcctgcggctggcggcccctgcctctccagctgcctctgaactccctggagcaagcacctcctgctgggctgtgtgagctgcgactggttctcagtggcccctgccatggacatgcctgaggtcctcaagtccctgctggagcactctctgccttggccagagaagagaacaggtaggagcacaggtgacctgcattgattggctgcccaggtactcgagggggcgag

SEQ ID NO: 28587 - DNA, 2300 bp, Homo sapien
ctccagcctgggcaacaacagcaaaactccgtctcaaaaaaaaaaaaaagaaaaaaagaaaagaaaagaaaagaaaataaaaagaaaaggaggcctgaaaaggtaaagcaatcgaggcatcagattcagaaaatgactgaggttcaattacagtggcagtgagagcttgaattttggaatcagacctatcatcctgtctctaccaccacccaaagtccttcaaatctcttgctttccaggcctggtcagctacccaacttctttttcctccttaccccgccgcaaaattatttttatttatttatttttttgacatggagtctccctctgtcgcccaggcttgactgcagtggcgcgatctcggctccctgaaacctccacctcccaggttcaaaccgattctcgtgcctcagcttccccagtacctgggattacaggcgccagccaccatgcccgtctaattatttctgtacttacagtagtgtcggagtttcgccctgttggccaggctggtctcgaactcctgacctcaggtgatccgccacctctgcctcccaaagtgccgggattacaggcgtgagtcaccaagcccagccccagcaaaattctgattgcatcagcttgataacttttagctggctgtgggtgtctggatcatgcatctaccccctgaaccaaggactatcactataccacccccccaacccctcctgctagaagggctgggccactgtagggatgctggataaacaagccaagctctctgccttccgggagttaagcggggagtctaatgttgcctgggtttgcagcggagtctgatctgtactataaagaggtacaaagttctgagcgctgtttaggagcagctttccatttgtgtaccgcgccacatattacatttttacggatttctgcggaactcccggggaggctttatattttaagagaggaggtggttctcccacaaaacgtggcatcggtacctggtgtcaaggaggtttttgttttctaggtaaaagaagggagagttctagaaaggaaaagaatttcacatctgtttgggactgtggagattctctagcccaacctcttaattttatggccgaggaaacaagctccagtgaagcaaccggactttcccaaggtcataagctagtaagtgggagggcggaaacatgtactcgggccctggctcaggtcagagcttcaggaatgctccctccacgctagtgttgatctggatgcgtgggcaacccgacaccccgctctagggcggccaagcctgctcaggccatccctacgacttggcaggtcgcggtccccggccctgccctcaggcgacctctgggtcgcgtgggagcagaagtgcgggctaagctcagcgtccctgccccgcgaccctgggcagagtccccagaacaaaaagacccgtccctcccttcccctcccgccccgccacagccccgcacgtgcggcgcctcgtgcaccgccccgggccccgcccccgccctccattggctgttcccgcgccttcctcctctgccccctccccccgcgaccagactcggctgcggctccacgtgacccgcggggggtggacacgccgcgcgagcaggagctcggataggtcgctttggccggcctggccgctccgagctccgcccctcttcggtggcgcgtcgggaaggttgcaagtcggggacaagagggagaggctgcggtggttggggagggcgggggttatgaagagggcggtgaagggggaacactggtaggagggaagggaccgcgccgaggaaggcccaccacaaagactccagcaggcgccaatcaggggacacaggggcggcggggcggggcctccgcgagggtcctcacctggccccgcacgtgtctatcttatcccggctgcccgaccaatcacggcccgaggatctgcgcctgcccctctcgcaggctggaccaatccagagcaacgatccggggaagctggcctggcctcatgaataattaatgtgccagagccggtccgcaggcggggtagcgatggaaggaggcgggggcgccattgggcgcctgcgcagtagctgcccgtgtcggcagctgcagcgggtcgcacggctccggcccatctcggggggcgggcgggggaggcgaggtgcgcgagccgagtccggggcacgatgtccgacgcgggcggcggaaagaagccgcctgtggacccgcaggcaggacccggtccggggccggggcgcgcagctggggaaaggggcctgtcggggtccttccccctggtc

SEQ ID NO: 28588 - DNA, 2300 bp, Homo sapien
tccggaatggtagaagacgtctaccctctaactgcttatatgtactccagctgttcctcctaagatgccgtaggacaactcgcttcagctcaccttcacctttaccattgtcagaagtttcacattggagagtggacaccatactcagcccaggatatgcaggatgtgcagaggcaatttggcccaaacactaatctttaaattaagaatagcaacgatttgagccaggctttacatacagcatcatatttaatccccgacacgagctccattttatagatggggaaactgaggtttggtgatgtcaagcgttttgctgcattaaatcaagatcacacagtcggtagccgaactgggatgtaaacccacctatttacatggctgccttaatcaatgactacaaataccagcatcccttgccgtgcccgctggcgcaaacgcacactcccaagggcccagtcttagcggctggatcctaaacccaatcagacaccgcttctccctttcccccgaccaatgggaaggctgttgctaacacaccggctatatttttagctttcagtgctctgggagcgtgtgggtcggctgagcctctctgcctggtgggaagagctaggggaaaagagagaagggaaggggagggggaaagggagggtgcagcgggcatgtgcgggagggggcgtgtgtgtgacgctgtcactcgctgacgcacaaggcaagtagtccctggaggtgcccccggggttgcgacgctcagagtgtgggggatgggggggcgctcaggctatctcccgcctccctgtcccggtggagtttgccctccagcccggcatttctctgttgcattcagggaaagtgcatttaaaccccccacgctactggtgctctccgcccttgccaaaaaaagcgatcaaggaaaaaaaaaaagcaaactgttcgtagctggaaactttcggatctcgccacccaacgtggggatggcggctgctgctgggccggaaccgtctggaatgacaaaaaaggtgtgggcgggaggggagaactgggaaatgggagatctaaggagggaccggggagaagacctcactcacagtcccccgggggctccagactgcatcttccggcactcctgtctgcctgtgaccgcagaacacggccctccctccccctggctctgtgtcccgcacactcacagaggcagagcagcccgcgtggccagagccgggggagggggcctcagcgcgcgggcctggcgcgcccagtcccgggttcgcggagcctcgctccgccgcccgaggggccgtagtgggtgcgagccttgcgcccgttgcacggtcaggggccaccccacgccggcgggactgcgactagaagaaatgtggggctctcccgcgtgccccacactggggtcgctggccagaaagagcaaacaagagttgggagaggggctgcgcccgcgcgcctgcgcagagccagagccggccctccaggctgcaaggaaaggagcgccagaggcggtgaggggaaggtcctttgtggcactcggctagtttcacggccgtcagcctcgtcctcggctcctcttactcccgcacagcgtggcccaggccccagagtctccctcgcctttctttcgacgttgagccccccgaggaatcacaaggcgctcggaagactcatgcctgcccgaaacgggtccgaaatgtttccagagcccgcgtcgtcccctcagttccccctcccgcagaggccgtaacggggcgatgctatcgccgcggacacggccagacgctcggagctggagggaaggccccgggaaacggctcgggcaaacgtccgaaccatgggctccgaggcaggtgcagggcggacgactcagcggggggtttccggcgggcatggtgactccctcccctcccccgcgatactcgtcccccaaacacaactaaagggagagtgcactgtgcccggctcgtgagcaacccggccccaggtggtccccggccctcacggagcgcccctgggagaacacctcacacgacgcgcacaagttcagagtggtatgggaatgaaggaaaggagtgcggcgcggcgctgtgacagggaggggaagacggggagccggacgcacgaccggcgagcacagaagggcacaggagctgctccgcgagataccagcgagctgaggcgcggggctggctgggaagtagtcccggccgggccctggccccgcccctgcagggcggagggacgcatcacgcaggggtggggaagccggatccgtgcgcagggttgctaag

SEQ ID NO: 28589 - DNA, 2300 bp, Homo sapien
caaaaaacaaaacactttttttttttttgagatgggatcttgctctgtggcccaggctggtctttaactcctggactaaagtgatcctcctaacttggactcccaaagtgctgagattacaggtgtgggccaccacgcccagccggatgtcatttctgaataagaataaccacagagacatgaatgagagggctctccaaattgctggtcttgacaaagatttgcttcccttgcattcttccccttgatgcaaaataactgccttttattggactacacccagtttgactcacagaacttgaagaaattataacctagatgactagatgaacacagtaatctccatagaccataggagattgcagtggatggcaaagtgttactaaacaaaaggaggaaaggtcagatggaaagctgtacacttacgtccttctcctggatggtgcactccttacaataataggcatcagagaccccaggtcctccacagatcacacagcgcccctggtaagatccatagttacactcatcacatatgcgcaccagagtgcagggacgcacataggagtcacaaatcacacacttgccatcacctgtaaggaagagaatggagtcatgctcacaagttcttcagtcctctgctatctcctgccatggggaaatatactagtctcctgggaaatacactagtctccttttgacagtgactttagggccctcctcttggcatcacaaaacttggtttccccagtgtccatctcaagcccctcaacacatacaaaagtttaccaattaacatatgtgaagagcttagaaaagcacctcggagatgataagcctgtataattgctggcaaagtgctgtgtgttggggaggggtcatgctactctggcgattcttcccgttgaaaactagagagatacagcgttaaatgtgcaagcggcagtggggagttagaggggcctttggctaaagtgcagcattcagtgttcacatacttccaggcacatctactcaaagccctctttgtggcacttttgctggttccacagaaaactgggagtgggaagggtgggttgttgggacggtgtgttccactcacatttttcacacagtcttccgatggctgcaagatgaaagatggtaaaaagtacaattagaataaaggttttgagaaagaggagaagtacatcctcgagctgggggtagggacatgagtaaggactgcagtgagtgagacctgcggatagccattttatcattacaaatttccatatgaaccaaacctacatccaagcaccctcctgaatctcctccaacgccctgggcaagctcagagtttctctggacctggttcagaccccaccccccgatacctgcctggggctcccagcacgcgcacccccgccctcttctcatcagaggccacaaacctgcgcgctcctacaacaccccgcgcctgagaggcgggaaacgtggcgcctgcgaggcaagcccctaaggaagagacgggaacccccgaccccccagctcctaataccacccctgcccagacagccaggggtagggcgcagtctcaccaacaccagcctgcttgcggcaaaagatcaaatcaggatgatgtttagccatagctcctaactaagccggccaccggaagcttcgggaacttccgtccgacctttaacccccattgttcctgcctccacgtcgctgtgattggttctctaagcttccgtcagtttacaatccttgcaccaggcccgtcttgctctcgcgcgagtttttgtcgctgctgggcggccaggtcctggcaggtgcatgaaactcttaaaaactctcccagatttggatggcggagataactaaaatttgttcttgggtaaaacatctttgtgcttggtatctatttctgcaagtgtctttgggcagtccgatttcctcttgcgtgtctgttcgttgcacgtgagctccgcccattgcgttcacagggttctggcgcctctagggaggcctcgccttcaccgtgacgccccactcttccgggcacgcccctgcccaaaggctttaaaggcgccgtgtgggacgtcactttaatgcgacctcatctttgtcagtgcacaaaatggcgccctacagcctactggtgactcggctgcaggtgagcgagctcagggacctctgggttcacgggggcggggtgcctcctactgtgccggcggctgtgggcgaggcagggcgaggcgggcccaacctggggccaacttctcgtgtacctgtcccggttgtgggcccggcac

SEQ ID NO: 28590 - DNA, 2300 bp, Homo sapien
ttgggaggccaaggcaggccgattacttgaggtcaggagtttgtgaccagcctggtcaacagggtgaaaccccgtctctactaaaaatacaaaaattagccaagcatggtggtgcacacctgtaatcccagctactcgggaagctgagggcaggagagtcacttgaacccaggaggcagagttgcagtcagccaagattgcgccattgcactccagcctgggtgacagagcaagactgtctcaaaaaaaaaaaaaaaaaaaaaaaaaaaaaaaaaagatgtaaagagataattaggtgcaaatcctttcccttagcccggaattgagatcagaaatattttctttcagataaatgatgattttactttaaaccatatggtttcaatttaagcaatgtgatgaaaaataagttcaagtttaaatttaagcaatgtgatgaaaaataagttcaagtaccacaagcttcctgagagtacaacgcataacaactcgtaaaattctattatcaaagttgcgccacttgatccaaaaggaattcacaaagttaaatgtgaaaggttgacagagaatgtctacagatgcttgcttgatttttattaacaaagtacacatttgacattgaacctctgagtataacaccttcccagggctgtcaagttagaagtgaaaaaatcatctggcagtcagtcagctttctagatagctcctaacaggggagtcaaggtcaaactggagtctccttatcctcccatatttgacaagcaacttattgtgaggctcaaaatattcgtactgcattctgacaaacagaaataattgcaccgtggttcataaagttctgtgagggcaggctgacataaacaagaactgagtggtggtagggcccatgcttctgccacagcacttcggtgacactcttgagaatcagaactttcacctactttctaccagctttatcatctatcaaatgagaaaaaccacctcattcctacgattacaggaatcaaataatattatgaagaattaaaacaggcctcaaatcttgtgcaaaggtgagagactattattatattatttactacgtatgggcccagaagaccgcccccctccccgacattccacgttccgcagggtcctcaaaaggtggtacagggtcctagtttcttctccagactccaggcctggcaaccgtagatgctgtcatgcctctgttgctaagagatgggaagtgaggcctcaggaactgggcctagaagactcaacaacgaccgcgccccctagtcaccttgtcctcaccttgaggaatggaaacacaccccacgggagcaggcaatgctgtcctcaaaaagaagaaagaggtgcctccgctcttcacccggccgccgctgcttgggcccacgcttcttgcgaggcagggacagggccaggaaagctgactgtgccggggacgccttgacctagggcaccagagaagcgggcacgggtgccgggcccacaaccgggacaggtacacgagaagttggccccaggttgggcccgcctcgccctgcctcgcccacagccgccggcacagtaggaggcaccccgcccccgtgaacccagaggtccctgagctcgctcacctgcagccgagtcaccagtaggctgtagggcgccattttgtgcactgacaaagatgaggtcgcattaaagtgacgtcccacacggcgcctttaaagcctttgggcaggggcgtgcccggaagagtggggcgtcacggtgaaggcgaggcctccctagaggcgccagaaccctgtgaacgcaatgggcggagctcacgtgcaacgaacagacacgcaagaggaaatcggactgcccaaagacacttgcagaaatagataccaagcacaaagatgttttacccaagaacaaattttagttatctccgccatccaaatctgggagagtttttaagagtttcatgcacctgccaggacctggccgcccagcagcgacaaaaactcgcgcgagagcaagacgggcctggtgcaaggattgtaaactgacggaagcttagagaaccaatcacagcgacgtggaggcaggaacaatgggggttaaaggtcggacggaagttcccgaagcttccggtggccggcttagttaggagctatggctaaacatcatcctgatttgatcttttgccgcaagcaggctggtgttggtgagactgcgccctacccctggctgtctgggcaggggtggtattaggagctggggggtcgggggttcccgtctcttccttaggggcttgcctcgca

SEQ ID NO: 28591 - DNA, 2300 bp, Homo sapien
atgaccagatattggctagtcacggtggctcatgcctgtaatctcagcactttgagaggccaagatgggggggatcacctgaggtcaggagttcgaaaccagcctggccaacatggtgaaatcttatctaaaaatacaaaagttagctaagtgtggtggtgggcacctgtaattccagctatttgggaagctgaggcaggagaatcgcttgaacccaggaggtggaggttgcattgagctgagatcatgccactgcactccagtctgggcgacagagcaagattccgtctcaaaagaaaaaaaaaagaaaaggcctgaaccgaagcaatagcagtgggagtggaatgaagaggaaacatttgagaggaagaattaatggtaatccctaaacacctttactcaatgcttcctaggaatgtgttaggggattgtgggaataaagagctgaagtagcatttgctgctgtcctcaagtacctcaaatcctatagaagcacacctaaaaataaaatcatagatgcagggaaggccacatttagcatcactgcagccagtgtcactgagagatcactatgcttgtgaaatcagcaaattaaggcaccatacatttccaagtgcctctgtcatttaccccaagtatcttttgtaagtacctaaattgttattttggttaaaacacactacaagcccgggcgcggtggctcacacctgtaatcccagcactttggaaggctgaggtgggcagatcatgaggtcaggagatcgagaccatcctggctaacacggtgaaacctcgtctctactaaaaaaaaatacgaaaaattagccaggcgtgatggtgggcgcctgtagtctcagctactcgggaggctaaggcaggagaatggcgtgaacccgagaggcggagcttgcagtgagccaagatcgcgccactgcactccagcctgggcgacagagcgatcctccgtctcaaacaaacaaacaaacaaaaaaacccactacagtatacatctacaccccaccaatttttagaggcagggtagtgaggttcagactgggcccacctctaccacttgtcaacacgtgatcttgggtaagctaccaaattctcttagcccatgctatcacgtgaagatgaatgagactggaatgtcagcgagacagagcatgatggggctataggaggggggtatggtcagatcttgcagggccgtgtgaactaccataaaggttttggacttttcttctttctttcttcttttctttcttctttcccttttctttcttctttcttcttcttcttctccttcttctttcttcttcttccgcctctccttcttcttctttttcgtttagacatgaggtgtcactgtcacccatgctagagtgcagcatgcaacctcaaactgcaacctcaaactcctggactcaagcgatgctgctgtctcaggcttctgagtaggtgggactacgggtgtacaccaccacgcccggcttggatctagtattctaagttcaatgggttgtgttttttgttccaatttattataacttttcaattggaacataatgtctacaaataaatgcaaaaatcttgccgagttcaattagtttggacaattatatacgtcaatgttataccaccgaaaacaaaatacagaacatttccatcatctcagaacagtcccaagtgcccctttcctgctaattctccttgtctccggaacacttaagggtgctaagcatgttatgtttgcggtgggttttttttttaacttagatgtggtaatatatgtttgcgtttccaaaggatcactctggctgccgagcagaggacagcaatgcgggtaaagcacaggccaggcgagggataatcaggcgggattgcacggaggtcgcctagcaacagaaagcgctgtcgggggcgggggaaccgctctgctcctgtgaaaggaggaggccccgccctctcctcgccctctctctgccccacgctgtgcgcgagcacacaggcagccccgccccgcctcggcggggtgggggtggacagaggtttcttattggtgagttttccggaagcgatggattcggaatctcgcccgcagtcgcgcaagcgcgagcggctgtgcgcggtgcgtggtgcgtggtgcgtgatacgagcggcggcacgtggcgcgggtgcggggcgtggagtggcgtggcgtggagtggcgtggcgtggcggggtctcgcggcgcgggcgcgcacccggagctgtggacggagagtgcctccctctggcctcagtttcctcatgttgta

SEQ ID NO: 28592 - DNA, 2300 bp, Homo sapien
gtagagacagagtttcaccgtgttagccaggatagtctcaatctcctgaccttgtgatccacccacctcggcctcccaaagtgatgggattacaggtgtgaaccaccacgcctggccccgccacatacttttaaatgaccagatattggctagtcacggtggctcatgcctgtaatctcagcactttgagaggccaagatgggggggatcacctgaggtcaggagttcgaaaccagcctggccaacatggtgaaatcttatctaaaaatacaaaagttagctaagtgtggtggtgggcacctgtaattccagctatttgggaagctgaggcaggagaatcgcttgaacccaggaggtggaggttgcattgagctgagatcatgccactgcactccagtctgggcgacagagcaagattccgtctcaaaagaaaaaaaaaagaaaaggcctgaaccgaagcaatagcagtgggagtggaatgaagaggaaacatttgagaggaagaattaatggtaatccctaaacacctttactcaatgcttcctaggaatgtgttaggggattgtgggaataaagagctgaagtagcatttgctgctgtcctcaagtacctcaaatcctatagaagcacacctaaaaataaaatcatagatgcagggaaggccacatttagcatcactgcagccagtgtcactgagagatcactatgcttgtgaaatcagcaaattaaggcaccatacatttccaagtgcctctgtcatttaccccaagtatcttttgtaagtacctaaattgttattttggttaaaacacactacaagcccgggcgcggtggctcacacctgtaatcccagcactttggaaggctgaggtgggcagatcatgaggtcaggagatcgagaccatcctggctaacacggtgaaacctcgtctctactaaaaaaaaatacgaaaaattagccaggcgtgatggtgggcgcctgtagtctcagctactcgggaggctaaggcaggagaatggcgtgaacccgagaggcggagcttgcagtgagccaagatcgcgccactgcactccagcctgggcgacagagcgatcctccgtctcaaacaaacaaacaaacaaaaaaacccactacagtatacatctacaccccaccaatttttagaggcagggtagtgaggttcagactgggcccacctctaccacttgtcaacacgtgatcttgggtaagctaccaaattctcttagcccatgctatcacgtgaagatgaatgagactggaatgtcagcgagacagagcatgatggggctataggaggggggtatggtcagatcttgcagggccgtgtgaactaccataaaggttttggacttttcttctttctttcttcttttctttcttctttcccttttctttcttctttcttcttcttcttctccttcttctttcttcttcttccgcctctccttcttcttctttttcgtttagacatgaggtgtcactgtcacccatgctagagtgcagcatgcaacctcaaactgcaacctcaaactcctggactcaagcgatgctgctgtctcaggcttctgagtaggtgggactacgggtgtacaccaccacgcccggcttggatctagtattctaagttcaatgggttgtgttttttgttccaatttattataacttttcaattggaacataatgtctacaaataaatgcaaaaatcttgccgagttcaattagtttggacaattatatacgtcaatgttataccaccgaaaacaaaatacagaacatttccatcatctcagaacagtcccaagtgcccctttcctgctaattctccttgtctccggaacacttaagggtgctaagcatgttatgtttgcggtgggttttttttttaacttagatgtggtaatatatgtttgcgtttccaaaggatcactctggctgccgagcagaggacagcaatgcgggtaaagcacaggccaggcgagggataatcaggcgggattgcacggaggtcgcctagcaacagaaagcgctgtcgggggcgggggaaccgctctgctcctgtgaaaggaggaggccccgccctctcctcgccctctctctgccccacgctgtgcgcgagcacacaggcagccccgccccgcctcggcggggtgggggtggacagaggtttcttattggtgagttttccggaagcgatggattcggaatctcgcccgcagtcgcgcaagcgcgagcggctgtgcgcggtgcgtggtgcgtggtgcgtgatacgagcggcggc

SEQ ID NO: 28593 - DNA, 2300 bp, Homo sapien
aaaaaaaagaaagatattattgctggaggagaggaaggcaaagaagaaagaagagacgatgttatcccagcactttgggaggccaaggtaggaggatcgcttgaggccaggagtttgagactagcctgggcaacataatgagaccccatctctataaaaattttttgaaaacttagccaggcatggtggtgcacccctgtagtcccagctactcatgaggctgaggcgggaggatcatttgagcccaggagttggaagctgcagtgaactgtgattgagccactgcattctagcctgggtaacaaagcaagaccctgtttcaaaaaagaaaaaataaataaataaaaaggaggaaagagagaggagaatttaaaggggaagggaggctcctctgggtagagttctcaggtggggctgtgaaataaaatcagaaccctggctgggcgcggtggctcacgtctgtaatcccagcactttgggaggctgaggtgggtggatcacgaggtcgggagatcgagaccattctggccaacatagtgaaaccctgtctctactaaaaatacaaaaaaattagctgggtgtggtggtgtgtgtctgtagtcccagctactcaggaggctgaggcaggagaatcgcttgaacccgggaagcggaggttgcagcgagctgagatcaagccactgccctccagcctgggcgacacagcaatactctctaaaaaaaataataataattcagaacatccccaggtaaccacaggcagcatttctcaacagtctctcctgcagaaccagaaacccagactgtctgagcctgattgtcctgagaggttctggaagggcaggggcgtgtggtgacactgggtgctcctgggttccagtacctctctagccagttggaagaatataggcaagtcaagtccttcctcctccctgagcctctaattcctcaccggtaaagtagggatgataaaaataaattattaaattgttgtgaggtttcaatgagggcaaagcttgctgcctgaaacagagcaagctcttgtggcgtcttagctatttgtattagttacttgtatttttctctgcggtttcccttttaactcccacctcctttttattttaaaaagactccttttgaaaatgccagcctgcctcagtagtaccaggagacaccagggaaaggcttccttctttccaagctgaggctgagaaggaatgggaagaacgaagagaagcacctttgtggaggcctcctccagctggccctgggtttaggaacatcacacactcaacctccaaaggccctcaggggctggcccaaggtcacacagcttgacagtgcggagcacttcgaagccagggcgtgtggtgtagaacaggctgggtgcctgaattcaatcagccctctctacttctctactcagagcctcccaggctgtggggtgttcacctgtgcaccttcaagccgatcacttccttggggtcctcgtcaattcaattccatggaaatattacaaggggtagacagagatgagccgtgtcagtgtctgtactagcagagggcaggaccactgagcgtccggaggggagacgagtgtctgggtgtccctgggaacctggcttgtctcgacccctctggggggctcctcttggctctgacctccattctcccagactcacccccactcatgcccacccaccccgaggggccccccagtgtgcactcacacactcacactcaaactcaccaccccacttgctctctaattaccaggaacgtggcgctgtctcaggttcttcctcccctgcattcctcagcagctgccctcactgggcagggcaaattataccgtggcccgaccataaaagccactttccaaaaaaagaagctttaaggcccccgagagacgcagctgagcctctcacctggcagtgcctgactcaggaggtgatgtctgggccatgagccacagagcctggtgtccctttaagcagggagtacaaattctcatccctccctcctgctctccctgacgtcagctggaaggcgtgtgagtgagtgaggggctgaggtaccgcccgcgcgagcacacacagacacacacacacacacacacacacacacacacacacatcttccagacccatcccctgcctgccagctccacgagccagagagagacagagcgcggacgccgcaggaggcagtgcctggaccccagctgcccaggagaggtgaggggctagatggggcctgaggacactgtgccagaaactgtggctttggccaggccgaag

SEQ ID NO: 28594 - DNA, 2300 bp, Homo sapien
ttggctgattctagagtgctgtgcctctgtcagagcacacttctctcaggcccagctcgtccctcccctccttcaaatcccctttcacatccttttcccagtggggcctccgagagtatcacatccactgctgcacttcctcctccttcccctaccttatttctccccaagtagccttggacaactttcatcatctacttttaaaatccgaattactgtctgtccctgtcccagaactgtaagctccatgagggatttctgcggcttgttctcctctggatcccctatgcttggcacatggcatactttttgttgttattgtttttgagacagggtcttactctgttgcccagtctggagtgcagtgcagtgatccagtcctagctcactgcagcctcgatctctcaggctcaagcgatcctcacacctcagcctcctgagtagctgggaccacaggtgcattacaccatgccaggctaatttttaaaatattttgtagggatgggatctcgctgtgtctcccaggccagttttgaactcctagcctcaagtgggccttctccctcagccttccaaagcaccaagactgtaggtgtgagccaccgcacctcgcaaagaaatacccttttttgtttttttttttttggagactgagtttcgctctgtcacccaggctggagtgctgtggcacaatctcggctcactgcaacctccacctcccgggttcaaacaattcttctgccccagcctcccaagtatctgggactacaggcacatgctgccacgcccggctaattttttttttttagacagagtcttgctctgtcaccaggctggagtgcagtggcacaatctcggctcactggaacccctgactcgctggttcaagcgattcttctgcctcagccttcccaagtagctaggattacatgcaccacaatgcccagctaattttttgtatttttagtagagacggggtttcaccatgttggccaggatggtctcgatcttctgacctcgtgatccgcctgcctcagcctgccaaagtgctgggattacaggcgtggccactgtgcccggcctaatattttgtattttagtagagatggggtttcaccgtgttgcccaggctggtctcgaactcctgagctcaggcaatccacccacctcaaccttccaaagtgattataggtgtgagccactgtgcccggcaagaaataccttttgaatgaatgaaatgagctgtattatctccattttataaatgaggaaaccaaggctcgatgagaagggccctgcccgaggtcacatagggagttggttgcagagcaaagatttgattttgccattggccctctggtgcctccctgagggtgcctctcagctcagtgactcctgactcccacctgtgccctgaggcttaggggaggcagtgcccacaggcacagggactttttttttttttcttgatagagtcttgctctgtcacccaggctggagtgcagtagcatgatctcagctcactgcaaccttcgctgcctaggctcaagcaattctcctgcctcagcctcctgagtagctgggattacaggcccatgccaccacacctggctaagttttttggttttggttttggttttggtttggttttgggttttttttttttttttttttttgagatggagtctcactctgtcgccaggctggagtgcagtggtgagatctcggctcgctgcaacctctgcctcccgggttcaagcgattctcctgcctcagcctcccaagtagctgggactacaagcgcctgccaccacgcccagctaatttttgtatttttagtagagacagggtttcaccatgctggctaggatggtctcgatctcttaaccttgtgatccgccctccttggccttccaaagtgctggaattacgggcatgagccaccgcgcccggcctaatttttgtattttttagtagggacagggttttgccatgttcaggctggtctcaaatccctggcctcaagtgatctgcctaccttggcctcccaaagtgctgggattatagatgtgagccgctgcgcccggccacggggactttttttttggggtagttaggattggtcttaggcaaagaacccttcccccccaatacacgtgctgagaagttatcccttcctgtccacccaggttcccagtcccagctctacccatttgccttgtaacctggaaaagcatctttactaacgtgtgcctcagtttccttatgtgtaaggtgggggtaatagcagttcccatccc

SEQ ID NO: 28595 - DNA, 2300 bp, Homo sapien
agctgggactacaggcaagtgccaccatgcctggctaatatctttttttttttttttttttggagatgaaatctcattcttgtcccccaggctggagtgcgatggcatgatctcggttcactgcaacctccacctcccgggttcaagggattctcctgcctcagcctcctgagtagctgggattacaggcgcttgccaccacgcccagctaatttttttttctttttttttttgagacggagtctcgctctgtcgcccaggctggagtgcagtggcgtgatctcagctcactgcaagctctgcctcccaagttcacgccattctcctgcctcagccctcccgagtagctgggactacaggcgcgtgccaccacgcccggctaatttttttgtattttttagtagagacagggtttcaccatgttagccaggatggtctcaatcccctgaccttgtgatccacccgcctcggcctcccaaagtgctgggattacaggcgtgagccaccgcgcatggccaatttttttttttttttttttttaatttttagtagaaacagagtttcaccatgttggccaggctggtctcgaactcctgacatcaagtgatccaccctcctgggcctcccaaagtgctgggattactggtgtgaaccaccgtgccagcccatgcctggctaatttttaaaaactttcggccaggcacggtggctcacgcctataatcccagcactttgggaggcccaggcggatggatcacctgaagtcaggagttcaagaccagcctggccaacatggcgaaaccctgtctctactaaaaatttaaaacttagctgggcatggtggcaggcgcctgtaatcccagctactcgggaggctgaggcagaagaatcgcttgaacccgggaggcagaggttgcagtgagctgagatcacgccatcgcactccagcctgggcagaggtttcagtgagccagaatcacaccactgcactccagcctggatgacagaacaaaaattcgtctccaaaaaaattttttttttcatagagacaatgtcttcctttgctgcctaggctctagtctcaaactcctgggtcaagtgatctttctgccttggcctcgcaaagtgttgggattgcagacctgagccacagtgtccaacctgtctaatttttggtgtctaagctttgtactgcttcagatccaggtagaatgtgggcttcctgggttctcagcactaagtgagggctaagtggaggtcccagacatgttgaaagccagaatgctatgcttcccctctccccccatagaaaattgaccctgaggtggccgccttcctgcagaagctacgaagtagagtgcagatcggtgtggtgggcggctctgactactgtaagatcgctgagcagctgggtgacggggatgaaggtaggagtgaggctgggggtagagggagtggggagtttgagagattcctgggcgtcttcaaagatccagtcctgcttctgtggggcagaagaaatagagagagagcagccagatagttcccttactgatttgacaaacacttgagcacttcctattgccagggattgtgccaggcccttgagaaatggctggggcaaagcaagcagaacctgcccttatgcagtttacattctcatttctccctgctgagtcttgatttcctcatctttaaaatgggctgaaccagccggcacagtggcttacgcctgtaatcccagcactttgggaggccgaggcggatggatcacttgagatgaggagttcaagaccagcctggccaacatggtgaaaccccgtctctactaaaaatacaaaaaattagctgggtgtgttggcacgtgcctgtaatcccagctactcgggaggctgaggcaggagaatcgcttgaacctgggaggcggaggttgcagtgagccaagatcaggccactgcactccagcctgggtgacagagtgaggctacacatccaaaaataaataaataaataaataaataaataaataaataaataaaagggcagaaccaatgatggctaccatttgtcaaaaatgatcatgtgttaatgtcattgcatttgatccccacaatcacactttagagtaggcgtgatcatcccatttaacagaggatgactctgaagttatccaggaaatcgactggacctcagagcccctggtctcagcccagtcaaagtgggtgcctccagttcctcaagccagaaacttcctcgaatttttccttttccccacctcttgtttattccatcagcaaacc

SEQ ID NO: 28596 - DNA, 2300 bp, Homo sapien
gcatccagctctacagttattttttatttatttagttagttagttagttagttagtttgtttgtttgaggtgtagtctccctctgtctcccaggctggagcgcagtggcatcatctcggctcactgcaaccaccgccttccaggttcaagtgattcttccgcctcagcctcccaagtagctgggattacaggctcctgccaccatgcccggctaatttttgtatttttagtagagacggactttccccatgttggccaggctggtctcaaactcatgacctcaggtgatctgcccatcccggcctcccaaagtgttgggattacaggcgtgagccaccgcgcccagcctgttacttattttcatgtgaaaagcaaacctacaaagcaggtggtgttcatcccattttataggtgaagacacaaagcctctgagaggtgaagtgacttgtccaaggtcccatagtggtggagctgggaaggcaacctggaagtgactccaaagtcaacgcaatggttaaataattgtgaatcgaatctgggaaggttggctgggaacggtggctcatgcctgtattcccagcactttgggaggctgaggcaggcagatcacctgaggccaggagttcgagaccagcctggctaacatggtgaaaatacaaaattactactaaaaataaaaaattagccgagcgtggtagtgggtacaaaataatcccagctactcgggaggcagaggttgtggtgagctgaaatcgtgccattgcactccagcctgggcaacaagagcaaaactccgtctcagaaaaaaaaaaaaaattagccgggcgtggtggcgcacttctgtagtttcagctactcaggaggctgaggcaggagaatcacttgaacctgggaggcggaggttgcagtgagccgagatcatgccactgcactccaacctgagtaacagagtgagacccagtctcaaaaaataaataaataaataaataaatcgccctgtgtcaaaaataaaataaaataaacataaaagtaagtaaaaatacaaaaattaggtgggcatggtggcacacgcctgcagtcccagctactcgggaggctgaggcatgagaaccgcttgaacctgggaggtggaggttgcagtgggcagagatcccgccactgcactccagcctgggcagagcgagactctgtctcaaaaaaaaaaaaaaaaaagaagaatctgggaaggtctccaagcaggtagaccctgagagctgggtcttatgtgtggacagaaggaataaggctcggggaaggcaatttggcaaagtccaaagcctgaacaaaggccttcaggagatttcttttcttttcttttctttccttttttttttttttttttttttttgaggctggagtgcaatggcgcgatctcggctcaccgcaacctctggcttctttggaatcaagcgattctcctgcctcagcctcctgagtagctgagattacaggcatgcgccaccacgcctggctaattttgtatttttagtagagacgaggtttctccatgttggtcaggctggtctcgaactcccgacctccggtgatccgcccgcctcgacgtcccaaactgctgggattacaggcgtgaaccaccgcgcccggctcaggagatttcctacagctcaaaatttgtaaggcaaagagatggccacaaaccttgtgagagtggatggggagcgacctcggctctcttagtcccgcctggcccactagacactgcactgcatggtagaggccccgcccgacccagccccttaatcggcctgttgcaatcactatcaacccgccaattctggccccgcccctgtcttccgggttcaccctctcacttcctgcgggtcccaggctcaggcccctcctccgccttgtttggagcaatccaatcgaacctggagggctccgctccgccctatgccgcgctcccctcctccacgagcaatgagaatcagctcaggccccgcccccgcttccgcccgcctagaccacgccccttcttcatttggccaatcaggcagtccactggcccccgccccctaatgccccgccccgtcagcacttatccctgagctgcttctgccgttgcatcttcgggactccgccccgcgcgcggacctgcagccatggcagtcaccgcccaggcagcccgcaggaaggagcgcgtcctctgcctgtttgacgtggacgggaccctcacgccggctcgccaggtaggaccctgaagattggaagctcccaccgggagtgtcacgcggacaccc

SEQ ID NO: 28597 - DNA, 2300 bp, Homo sapien
ggttgcagtgagccgagatcacgccattgcactccagctctaggctagaggtagactctgtctcggggtgaaagaaaggcattaatactggcaacctagcatttgtcatttttccagaatattccctgtactccctggcagacctctgttcctgaaaaaaatccagttgtttgctgtcctcacccctttgtcttctttttcatatccttcttcttttgcctcagtttccctgcttaaatttgatcttttccttgctcacaagaattaaagacacaagcacatagagcacagaaagttctagttctctgtatgtagccagcctactcaaaccacagctaaccaggctctagaggtgaggccctgaggagggaaccccaggaataaaaatacagagcaggctatttcggagatgccctccaagaacactggtgtgtgaggcaggtgggaaacttaagtgaggtgacgaggtgctctttccttctctgctggtgctgcttctgctgccaccagcgcccactcctcctccctacccgtgggcagcacagggtgtgtgacagcaggccacatcccagagcccacccctctcatgtctctgtttccttgcaggccctttggacaggcacttcggcccctcctggactccattcagatccagcctccaggagggagctccgtgggcagacccaacggccagagctaacaggactgcctgggaccgccctgcctcaccagggcttttcctttttaaacaaaacaaaccctaccagatttctattttataattttacatcagagctaacaaccaggggacggctttttaaatttcccagggaaggagaccgtcaggccgcatgtagacaatgctgctaagaaacagaacaaaatgccaccccttctaatagtattatactaatttattaaggctgtcttgtctgtgcgttcacttcggatgctgtttcctaagcgtcctccacactggagaaagggaggggctttgtttaaacagaaagcgagtcacagtttgcgggagccccaacctagaactctttccagagaacactcacgctctacccaagttgccaacacctgtgggacccaggtgagttttagaacatccgtgacccagaaagttactctagtgttaaatgaaccaaaggatttggtgtacatgggaccggtttcaggatgactaacctaacctaagtgaactctttagccacaaccctcaccttccctcccttaccccaagcaaggccagtgctggagcagccattgcctccggatcaagggagtaacagcaagtatcaggccggagaaaacaggataaagccattcctccttccacctagatggattgccaatcttctgccatcaattttgggaaacctgcctttgtgcccccgaggctgcctttcctcagcatagctgacttgtcatagtggatgaggtctgggctggagcagtagaagccaaggccttttttctgcaagtaatgatgtaggttatttgcagtctctgtaaccaccatccaggccagtacgcagtatttagctggggaccaagggatgggattccctactctaagaaaatacctttattttaattattattattttttgagacggagtctcgctctaccacccaggctggtgtgcagtggcatgatctcggctcacagaaacctctgcctcccgggttcaagtggttctcctgcctcagcctcctgagtagctgggattacaggtgcgtgccaccacgccaggctaatttttgtattttcagtagagacagggttttgccatgttggccaggctggtctggaactcctgacctcgggtgatccacctcccttggcctcccaaagtgctgggattacaggcgtgagccaccgctgcctggccagaaaatacctttgatatggaaagaataatgatgtgaggcctggcgcggtggctcacgcctgtaatcccagcactttgggaggccgaggcaggcagatcacttgaggtcaggacttcaagaccagcctggccaacatggtgaaaccccgtctctactaaaaatacaaaattagccgggcatggtggcgcatgcctgtagtcccagctactcgggaggctgaggcaggagaatcgcttgaacccgggaggcagagattgcgatgagccgagatcgtaccagtgcactccagcctgggcgacagagtgagactccatctcaaaaaaataaaataatgaagtggaatcaaggtggcaagaaaatttagaatcgtttctgatagggactttcccttatcctaa

SEQ ID NO: 28598 - DNA, 2300 bp, Homo sapien
ctggttatctaggcccaaatccctgtcaaataatgggttggctacataagaattagctgataagctcattaaaaatacagatttttggaccaaaactccaggagattctgatttagtatttgtgaagccttagaatccatataattaaaattttctcattttaaatagatattatgtgtatgtaatacacaggtccagaggtaagaaacagtttacagcaaagtttctcttctacccctgttcccctggcatcaagttcccctttccataagctactgctgttatcaatttcttgtgtatccttacggataattatttgcctaagcaagcacatatatatcctttgatttgcatatttaaagagctattctaaccttgttttttctaatctcatttacaatatatgttggaaatgagggtatctgcatttttaacaagcaccctagatgattttgatgtgaagccaaatatagaaacaactcatggacccacggttgtgagattaagttcaattcactacgacatattagaaactcaaggacattgaaggatgccctcaaaagtagcctcccttacttgatctctgccccctcgtctcacagagatgaactaaatcattcgccagtgtctccacagaagccaggaaaaactagccattcaaatggatgctgtcaaagcttcaattttcaataattggaattctttcctgctcattgttacccgaaattacaaacctgacaattcctgtgttacacaagacattcctgtatttaagttgaaataaggtgtgatcgtcactgaatgagggctggtttttctcctgccagttaagtagtttaatggagcacaaccgaaatactttctttactaatccttattcacacagcctcatccaaacttcccccaaaactgctttcttgccatttgagcaaaagcaattaacttagaaactgtggggagaagactgcttggtgaattctggagttcggggctcctcttatcctgacttgacctacctgggggcgatggctgggtccctaggcagctctatctcccccatcccacctatccctgggactgcaaagggagcttccttttggcactgagacaaggttctccgagagccacccgacctccgcagtgtctctgtcaccacgaggggcaccgcgcggcaggcatcctcacctttcctacaccgcgccaaggaggcaggagtgcactgggctacccgagcgaggcagagaacccgccgggatccagcgctggtttaccccacaccctcgtcgaaggggctctcgagggctcggtttctgcccaagccccctgcaaggtggaggcatgactcctccatcccttccccttgaattcaaacgtgaggatggtatctgcgaggctaaagcggggctcagatggcccaaacttcagaccactctcttctccactcggcttttcttccatcctcctggccatgtgtctccccgtgagtcgtggcccaagtctccccacctcggccagccgccaccctctggcctggctcccgccctcctgcccacctggccccttccccctcacccagcatgatggggctgagccgccgggccaggcctttggacaggtcgtacacgtagagcttcaccggatagagattcggcggctccattgggacccgtggcgacggcggccacgacggccctcgggcacccggcagcggcttggaccttcccgtacccgacgggagtgcgaagcggagggagagggggggaccgagcccgggcccgggctgaggggtgggggagaggccgccctgcgctgctcgcgcccccacacccgctaccggcaacgactactgtgaggtgacagagaggggacagggagggcccacacggaagagggggcgggggcagggatgcacttttgcgcatgtgcttacagtcctgacgtaggaaggggcggggctttgccgaagggggcggggctctcgctgatgggttggctttcgtcagggacataggtagaagctggttggggagtgtgcgtgccagcctgacgcgatatagtgcgcacatgcgtgatgacgtagagggcgttgattgggaccgagtacagggcccgcgcatgcgtggattgtcgtcttctgtccaagttggtcgcttccctgcgccaaaggtaagcgggccgttatccatttgtgttgttcgccagctaggcctggcctcgtcccgcttcgctcggtcggtctcgcgcgcccccatagccttgctagagggttagcgttagccttaagtgtgcgaatccgagga

SEQ ID NO: 28599 - DNA, 2300 bp, Homo sapien
gctcattgttacccgaaattacaaacctgacaattcctgtgttacacaagacattcctgtatttaagttgaaataaggtgtgatcgtcactgaatgagggctggtttttctcctgccagttaagtagtttaatggagcacaaccgaaatactttctttactaatccttattcacacagcctcatccaaacttcccccaaaactgctttcttgccatttgagcaaaagcaattaacttagaaactgtggggagaagactgcttggtgaattctggagttcggggctcctcttatcctgacttgacctacctgggggcgatggctgggtccctaggcagctctatctcccccatcccacctatccctgggactgcaaagggagcttccttttggcactgagacaaggttctccgagagccacccgacctccgcagtgtctctgtcaccacgaggggcaccgcgcggcaggcatcctcacctttcctacaccgcgccaaggaggcaggagtgcactgggctacccgagcgaggcagagaacccgccgggatccagcgctggtttaccccacaccctcgtcgaaggggctctcgagggctcggtttctgcccaagccccctgcaaggtggaggcatgactcctccatcccttccccttgaattcaaacgtgaggatggtatctgcgaggctaaagcggggctcagatggcccaaacttcagaccactctcttctccactcggcttttcttccatcctcctggccatgtgtctccccgtgagtcgtggcccaagtctccccacctcggccagccgccaccctctggcctggctcccgccctcctgcccacctggccccttccccctcacccagcatgatggggctgagccgccgggccaggcctttggacaggtcgtacacgtagagcttcaccggatagagattcggcggctccattgggacccgtggcgacggcggccacgacggccctcgggcacccggcagcggcttggaccttcccgtacccgacgggagtgcgaagcggagggagagggggggaccgagcccgggcccgggctgaggggtgggggagaggccgccctgcgctgctcgcgcccccacacccgctaccggcaacgactactgtgaggtgacagagaggggacagggagggcccacacggaagagggggcgggggcagggatgcacttttgcgcatgtgcttacagtcctgacgtaggaaggggcggggctttgccgaagggggcggggctctcgctgatgggttggctttcgtcagggacataggtagaagctggttggggagtgtgcgtgccagcctgacgcgatatagtgcgcacatgcgtgatgacgtagagggcgttgattgggaccgagtacagggcccgcgcatgcgtggattgtcgtcttctgtccaagttggtcgcttccctgcgccaaaggtaagcgggccgttatccatttgtgttgttcgccagctaggcctggcctcgtcccgcttcgctcggtcggtctcgcgcgcccccatagccttgctagagggttagcgttagccttaagtgtgcgaatccgaggagcagcgacagactcgagaccacgctccttcctcgggaaggaggcggcacctcgcgtttgaggcccgcctgcgtttgaggcccgcctgcgcttgcggcccgcctgcgcttgaggcctgtctgcgtttgagatctcattgggcgtgattgaggaatttggggaggtttttgggcggtattgaggacgagggggtccgttagtcagcatagaatcctggagcgggaatccctcaccgtctaaatggcgtcgggggcgggacctccgggatctggcttccgcgggccgccgccggccctgaaacgtgagggatagctgagatgaggcagctactgggatggcccccatgcgcatttacatgcagtccgactgccgagctttcgaggcagcaggatttaccgtccacattcctcactactaaccaagcttttagaacagatctcacaagaacctagaggtcggtattttttcgatttaaatttgcctgttactgacgttaacgtctttcgcctagtgagcagtagccaacatgtcagggtgggagtcatattacaaaaccgagggcgatgaagaagcagaggaagaacaagaagagaaccttgaagcaagtggtaagtgacttcagcatgtagtgccattcggtgtgtggaagaaagaccttccctgcctatctctgctggatggactttgctgtttgatggcctgcccttct

SEQ ID NO: 28600 - DNA, 2300 bp, Homo sapien
ctattaaaaaattaaaaaatatatatatttcattaggaaataaatattgaaagatacttgaaagaaaaatacaaaaatgtcaaaatgctggtagtggttgtgttagagtggtagattatagcaaatttttttcttttttgtatttcctatgtttctcacttttttttttttcctgagagagtctcattctgtcacccaggctggaatgcagtggcgccatctcggctcactgcaagctccacctcccaggttcgcaccattctcctgcctcagcctcccgagcagctgggactacaggcgaccgccaccacgcccggctaattttttgtattttttttttagtacagacggggtttcaccgtgttaaccaggatggtcttgatctcctgacatcgtgatccgcccgcctcggcctcccaaagtgctgggattacaggcttgagacaccgcgcctggccgtttctcatttttaataaaaatattcaaaatttttctgctcaggagttaaattaaccagtatgaagattacatgtacccctatttctcttcctttgttttatgtgttactgtgttgcctgcacatacactcccaaacgtggaggctatagtgagggaatcaatcactttcctgtaactgtgttgcttgcgtttattctttggttggtgtagttattgcagggtgggggcatttttacactgaggtcctggaatggtaacactactttcctggatgagaagggtctcacctgaaccacttaagatgacaaaaaatacctatggtcatggccatttatcagggaccaaaagatgtcaaactaccagtgtccaaaaaaaacttagggcacactagagtaagatctgcatataagagcctagggtagctctgcgaagttcaaaggaagaaaagaatttcagaattatctgggaggagaagggcaggccatcaaacagcaaagtccatccagcagagataggcagggaaggtctttcttccacacaccgaatggcactacatgctgaagtcacttaccacttgcttcaaggttctcttcttgttcttcctctgcttcttcatcgccctcggttttgtaatatgactcccaccctgacatgttggctactgctcactaggcgaaagacgttaacgtcagtaacaggcaaatttaaatcgaaaaaataccgacctctaggttcttgtgagatctgttctaaaagcttggttagtagtgaggaatgtggacggtaaatcctgctgcctcgaaagctcggcagtcggactgcatgtaaatgcgcatgggggccatcccagtagctgcctcatctcagctatccctcacgtttcagggccggcggcggcccgcggaagccagatcccggaggtcccgcccccgacgccatttagacggtgagggattcccgctccaggattctatgctgactaacggaccccctcgtcctcaataccgcccaaaaacctccccaaattcctcaatcacgcccaatgagatctcaaacgcagacaggcctcaagcgcaggcgggccgcaagcgcaggcgggcctcaaacgcaggcgggcctcaaacgcgaggtgccgcctccttcccgaggaaggagcgtggtctcgagtctgtcgctgctcctcggattcgcacacttaaggctaacgctaaccctctagcaaggctatgggggcgcgcgagaccgaccgagcgaagcgggacgaggccaggcctagctggcgaacaacacaaatggataacggcccgcttacctttggcgcagggaagcgaccaacttggacagaagacgacaatccacgcatgcgcgggccctgtactcggtcccaatcaacgccctctacgtcatcacgcatgtgcgcactatatcgcgtcaggctggcacgcacactccccaaccagcttctacctatgtccctgacgaaagccaacccatcagcgagagccccgcccccttcggcaaagccccgccccttcctacgtcaggactgtaagcacatgcgcaaaagtgcatccctgcccccgccccctcttccgtgtgggccctccctgtcccctctctgtcacctcacagtagtcgttgccggtagcgggtgtgggggcgcgagcagcgcagggcggcctctcccccacccctcagcccgggcccgggctcggtccccccctctccctccgcttcgcactcccgtcgggtacgggaaggtccaagccgctgccgggtgcccgagggccgtcgtggccgccgtcgccacgggtcccaatggagccgccgaatctctatcc

SEQ ID NO: 28601 - DNA, 2300 bp, Homo sapien
caccatgcccagctaatttttgtatttttagtagagatggggtttcaccatattggccaggatggtcttggacccctgacctcgtgatctgctcgcctcggccttccaaagtgctgggattgcaggcgtgagccatggcacccggccttgctttttttttttgagatggtgtctcactattgctcaggctggtttggaactcctgggctcaagcaatccacccacctcagcctcctgtgtggctggggttaaggcatgtgccactatgcctggcacattgtgaatgtattaaatacctcttaattgttcacttagaaaatctaaatttcagcttaattaaaaagattagtgtttctttttttttttttttaatttattttttttattgatcattcttgggtgtttctcacagagggggatttggcagggtcataggacaatagtggagggaaggtcagcagataaacaagtgaacaaaggtctctggttttcctaggcagaggaccctgaggccttccgcagtgtttgtgtccctgggtacttgagattagggagtggtgatgactcttaacgagcatgctgccttcaatccatttaaccctgagtggacacagcacatgtttcagagagcacagggttgtggggtaaggtcacagatcaacaggatcccaaggcagaagaatttttcttagtacagaacaaaatgaaaagtctcccatgtctacttttttccacacagacacggcaaccatccgatttctcaatcttttccccacctttccccgctttctattccacaaaaccaccattgtcatcatggcccgttctcaatgagctgttgggcacacctcccagacggggtggtggctgggcagaggggctcctcacttcccagtaggggcggccgggcagaggcgcccctcacctcccggacagggctgctggccgggtggggggatgacccccccacctccctcctggacggggcggctggcagggcggggggctgacccccccacctccctcccggacggggcggctggccaggcagaggggctcctcacttcccagtaggggcggctgggcagaggcgcccctcacctcccggatggggcggctggcctggctggggctgaccccccacctccctcccggacgggtcggctgctgggcggagaggctcctcacttcccagatggggtggctgccgggcggaggggctcctcacttctcagacggggcggctcccggacagaggggctcctcacttctccgacggggcggttgccgggtggagggtctcctcccttctcagatggggcggctgggcagagacgctcctcacctcccagacggggtcacggctgggcagaggcgctcctcacatcccagacggggcggcggggcaaaggcgctccccacatctcagacgatgggcggccgggcagagacgctcctcacttcctagatgggatggcggctgggcagagacgctcctcactttccagactgggcagccaggcagaggggctcctcacatcccagacgatgggcggccaggcagagacactcctcacttcccagacggggtggcggccgggcagaggctgcactctgggcactttgggaggccaaggcaggcggctgggaggtggaggttgtagcaagccgagatcacaccactgtactccagcctgggcaccattgagcactgagtgaaccagacaccgtctgcaatcccggcacctccggaggccgaggctggcggatcactcgcggttaggagctggagaccagcctggccaacacagcgaaaccccgtctccaccaaaaaaatacgaaaaccagtcaggcgtggcggcacgcgcctgcaatcgcaggtgctcggcaggctgaggcaggagaatcaggcagggaggttgcagtgagccgagatggcagcagtacagtccagcttcggctcggcatcagagggagaccgtggaaagagagggagagggagaccgtggggagagggagaccgtggggagagggatagggagagggagagggagagggattactgtttcttttgtgtacttcgtagagaagaattttcacagatttattatatatctcatgtctcataattttagaatttggaactgaacagaaacttttcatgttctaatttgtgtacaaatagttcttggtaggcagggtgtggtggctcacgcctgtaatcccagcactttgggaggctgaggtgagtgaatcacttgaggtcaggagttcgagaccagcctggccaacatggtgaa

SEQ ID NO: 28602 - DNA, 2300 bp, Homo sapien
tgttctgcatttaaggagagaatagctgtggacgaaggccagctagagctcaggcaggacatggaggggatcaccatggttggtttattcctcagctttgcaggttccaaaacttaatttttttttttttttttgagacagggtctcgctctgtcatctaggctggagtgcagtggcatgatctctgcccactgcagccttgacctcctgtgctcaggtgatcctcctgcctcagcacccctgagtagctgagtagtggggactacaagcatgtgcatgcccagctaatttttttgttttttgtagagacattgttttgccatgttgcccaggctagtttcaaacttctgtagcaatcctcctgtgttggcctcccaaagtgctgggattataggcatgagccactgtacctggcccgaagacttaattttgttagtgctccagaattaggtaggcccctagaactgatgaactctcttttttttttttttttgagatggagtctcgctctgttgcccaggctggagtgcagtggcgcaatctcagcccactgcaacctccacctcttgggttcaagcgattctcctgcctcaacctcctgagtagctaggattacaggcacgtgctaccacatccaactaatttttgtatttttagtagagttggggtttcaccatgttggtcagaatggtctcgaactcctgacctcgtcatctgctcgccttggcctcccaaagtgctgggattataggcatgagccaccgcgcctgggtgaactgatgagctcttacaagacctgatgtaccagatgctgacattagtttatatagaggggtagacctttcctgttactggaatactgatgtctttaactgggtagttaaacagttttatttcaaggatgcgcttactggtagttattgacttattttcaggtcacatgtacttaagcattgtaattattttatatagtcatcccttgttattgagggaattggttgcaggactccccgtggattccaaaatccgaggatgcccaagtcccttaaataaaatggcatagtatttgcatataacctacacacatcctcccctatactttaagtcatctataggttactcatagtacctaatacaatgcctatgcatcacttcattcacatggcttcaatgtagtacttggcacatggcaaattcaggttttgctttttgaaacgggaatttctttgtttttcctgaatatttgagatttgaggttggttgaatacatagatgcagaaccagcagatatggagggccaactgtgtatataaactctgtttcctgataccaaggtacttgaaagatcacatgacctgtccaaattcagccagttaagtaagtgacatcagtaggactcaactccaggttttctgattccaatgctttgcttcgccccaactcccatagcacaatttcctccctctgatacttcttttccttttttcttgagataaggtctcactctgttgcccaggctggactgtagtggtgcagtctctgctcactgcagccttcacctcctggggtcaagcgatctttcacctctgcttcccaagtaactgggaccctgtgctgccatgcccagctaatttttttgtttttttttgtttggtagagatggagtctcactatgttgcccaggctggtctcgatctcctagggtcaagtgattctcccacctcagcctcccaaagtgctgggattgctacagatgtgagccactgtgcctggcctgaatatacgtattgttaattctctgatttcaatggcagggactgcttatacttctaatgtatacttactgcattctggtttttgttaaaatttgatatttatgcccattactttcactgattcattacccctgaaggtagggatcttgccttattttagtgccatatacaaattcagtgcacatattttgagcaactaataggtactgagcacttatggagcttccatttagtggtaagtaaatattaattgaattttttttttcagtgtatccaaagtgtgtacatcagtaagatcataagcagtgatcgagatctcttggctgtggtgttctatggtaccgagaaagacaaaaattcagtgaattttaaaaatatttacgtcttacaggagctggataatccaggtcagtaatattttaagatcagcttttcccttatatatgagaatatcagtactctgatcaaagaggactgtggagaaggaagcaagttacatcttgtctaggagtatgctttcctcca

SEQ ID NO: 28603 - DNA, 2300 bp, Homo sapien
gctcttgggggcggggcatccgtgtccttgcggtgctgggcagcagaccgtccaaaccgacacgcgtggtatcctcgcggtgtccggcaagagactaccaagacagacgctatggtgagtgttcctactgggccattatctccgggtcacctcccgagagctgtggtgccgcgagcgtggtcccgctgtgtcagaaaagctgtaaaaaaacggaaggaggaaaaggcaggtgcgcggtgtcgggcaggagaccaccgaggcaggcgctatagatgagtggtcccaccaggccatctccgtctccagcgactgccgtccaccctatgtccagcctccaaggccgaggttaggtggtagccgcagtgaatcactcgcgattcgcacgttacacacgatggcgacatgtggggccgcacctgggttataatatgaatatatccttgtatataaatatgtgtttgtaaaaacaaaaaaaaaaagagaaaaattaatgaaaatgatttactggagcagtgggaatgagatggaaggagcggaataggcaggccactcacccaatatgctccctacatgggtgtgtatttatttatttattgagacggagtctcgctctgtcgcccacgctggagtgcagtggcgccatctccgctcattgcatcctccgcctcctgggttcaagctattctgcgtcagcctctcgagtagctaggactacaggcgtgagacaccgcgctcgtcccctacatgggttattttgacacagatctgaatgacatcattttatccataagtattacagtatatatctataaagtaagaatttttaacataactgcaaatgccattaattagttaataagggttgcaagttggtgatatttaactgtaccattccctctttatttattaggcggaagagtgatacaagaggtacttctcatcttctacctggttaccgcctaatacagcatttaggaaaggcacagaagatgattgtttccctttcccagttttcaaaatattgagttgctatcacttgcatagttttgacttttaaaccatgaagatattttacatatttgaaaaataaaatttaaagcaagctgactacaaaataaatctacttgtataccaaattgctaaccacaaggaaaattttaatttgaataacttttgaacaaagtcctgccactggatggctttgataggatatatcctaagaacaaaaataaattttgactttggtgagtttgttggtagaggtggtatattggtgtagcaattttggaaccattttgtgtgtattgtagaggaggtgaggaaatactttaatgtgttggaaaccatgggtttgaacagaagatacgcatatggagtggggaatggaaagaaaactttgtgctacatttactgtaaattatatcttattgattcagtaaattcaggtggaatacggaagttcaaatttaaagattacccatggactcctgacctcaggtgatccacccgcctcggccgcccaaagtgctgtgattacaggcgtgagccaggagtttgagaccagcctggccaacacggtgaaaccctgtctccacaaaaaatacaaaattagcctggcatggtggtgcacgcttatagtcccagctacttgggaggctgaggcacaagaatcatttgaactcgggaggcagagattgcagtaagctgaaatcgcaccactgcactccagcgtgggcaacagagcaagactccatctaaaaaataaaaacagaaatggattagccatggactcaaatggatgcggagccatgggaacccgtttgtaatccatttgctgtaatattatcaaacattcggctgaagaaagacaaaagtacatgagctttagtatactttactgaactgtgtaattcctaatagtgtatttcctttttttcgaaggtaggagtggaaagtccattgttaactacctggtgttttgtgtgtttgagggttagggagcagggcagctgccccctgtgtctcaattgttgattagtattttgtgactcaggtaggaaaacttctggctcaatttgtctgatatttttatgtcccccccatagactgaggctgatgtgaatccaaaggcctatccccttgccgatgcccacctcaccaagaagctactggacctcgttcagcagtcatgtaactataagcagcttcggaaaggagccaatgagggtaaggcagccacaggatgctctgggggaatgttaaaggcacctgtttccatctggggcctctgatctgatttc

SEQ ID NO: 28604 - DNA, 2300 bp, Homo sapien
aatattacataccatttttgcctaacccaaaaggaaataagttaaaaattagtaacaaagtagtttgaaatgaaaaatataaactatcagagagatttaaaaattgtagtaggaattcaaaaatagaacagaacaataatgaaaataccacataccagagcataagtgacaagggcagaggggggaagaaacaaatgaaaggatataatgaaagtattacttggagcctaagatgctaatgctagggagaaacgggataaaaaggtagaaaaaaacactagcacaaaataaccccaaagaaagtagaaggaaagaaaaaaaacaaaaggagaaattgctgaaatagaaagtagagcatactgctgggtcttttcctttccgaagcccctctttctcaccagagagagctgttctttctctttcttttgcctattaaacctctgctcccggccaggcgcagtggctcacacctgtaatcccagcactttgggaggtcgaggcaggtagatcacctgaggtcaggagttcgagaccagcctggccaacatggcaaaacccagtctctactaaaaaatacaaaaattagcccggtgtggtgacgcgcacctgtaatcccagctactggtgggggctgaggtaggagaattgcttgaacccaggaggcagaggttgcagtaagccaagatcgcactactacactccagcctgggcaacagagcaaaactccatctcaaaaaaaacaacaaaaaaaaaccctgctcctaaactcctgtgtgtccatgtcctaaattttcttggcatgagacaacaaaccctggatatttaccccaggcaacgaagctagttcagtttgacactgttgtcaaagttttggggaattagtcactgtcatgcattgctggtgggtgtgcaagttgttaaaccctatatagggtcaatttagaatagatataaaagttacaaatgcatattatatcttttgactcgttaatcccacttctaggagtttatcttacagatatactgaatgaaacataatatagattaggtatagatgagattagacattatagcatttacataatagtgaaagattaaaaaatatataaatgggctgggcacagtggctcacacctgtaatcccagtactttgggatgcccaggcaggaagattgcttgaggccaggagttcacgaccagcctggacaacataataagacagtgcctctaaaattaaaaaattagccagacgtggtggtgcatgcatgtagtcccagctacttgggagtctgaggcaggaggaccacttgagcccaggaaagtccccctcagaaagattaatcgaaaaaataaggccaggcacggtggctcacgcctgtaatcccaacactttgggaggctaaggcaagcggatcacttgaggtcagcaattgggagaccagactggccaacatggtgaaagaccttctctactaaaaatacagaaaaattagccgggcgtggttgtgcatgcctgtagtaccagctgctctggaggctgaggctggagaatcgcttgaaccccggaggaggttgcagtgagccaagatgccaccactacactccagcctgggtgacagagcgagaccctgtctcaaaaaagaaaatgtttaagtaggtaacatgtgaaggagacatactctatagacattaaaaagaaaggatggccaggtgcggtggctcatgcctgtaatcccagcactttgggaggctgaggcaggcagatgacctgagatcaggagttcgagaccagcctggccaaagtggtgaaaccccgtctctactaaaaatacaaaaatcagccggccgtgatggcggtcacctgtaatcctaggtactcaggaggctgaggctgcagtgagccgagatcgcgccactgcactccaacctaggcgacagagggagactccgtctctaaataaataaatgtatgaggaagagaaaaataatatggaggtcttcccttgacctcccccaacccccttcctttagagaactcctccatccttcacctaattcttcctagttgtcctgggaccaagacaaattcgcctaagataaggagttacgtagaagacagggcgtcctggtgtacgggctggccctggacgtcacttccgctggcggcagtggcgtcacttcctgctcttgggggcggggcatccgtgtccttgcggtgctgggcagcagaccgtccaaaccgacacgcgtggtatcctcgcggtgtccggcaagagactaccaagacagacgctatggtg

SEQ ID NO: 28605 - DNA, 2300 bp, Homo sapien
gttggagccaagttttcttcacccaactttttgccctctcccacgtgggttggtctctttctcccaggctgggccatgccccctccgctcgctgcaggccttttgccaagcaaacagaccgtgcggcaaagcaacacagctgcggggatcctaaggtttcctgagttctaacctcgggccaggctgctgggaccccgccgctgctggggttctaactaagggcccggcggttaagacccaacgccggcggatgagacggcgcaggctctaagcctccatctaacaggctagggagtgaacgcaaccctgagtctcccgcttcccggtccctcggccggcgcacgcactcaccatggctgcggttccgcgggctcagcactcctaggggagcgcagctgacgtttcagaagcactcgcgtgcaccggaaaaactcacagaagcagcagcggaaatggccccgcgcggcaggaagcgaaggtgacgctacgcgagcgagtgggccccgccctctacgggggcactggcgcggaaactggccctgtgtcgaagaaggaacgtactttggcgttcttatgagctgcctagtacaaattattggcagaaacaatgaattaaacattcaaaaagtaacccaccggccggccgcagcggcttatggctgtaatcccggcactttgggaggccgaggcgggcgcatcacctgaggacaggagttcgagaccagcctggccaacatggcgaaacctcgtccctactaaaaaatacaaaaattagccaggcgtggtggcgggcgcctgtaaccccagctacttaggaggctgaagcaggagaatcgcttgaaccccggaggtggaggctacagtaagttgagatcatgccactgcactctagcactccagctgaggcgacagagcgagactctcaaaaaaaaaaaaaaaaaggccggccgggtgcggtggctcccgcctgtaatcgcagcactttgggaggctgaggcaggcggatcactaggtcaggagatcgagaccatcctggctaacacagtgaaccgtctctactaaaaatacaaaaaattagccgggcatggtggcgggcgcctgtagtcccagctactcgggaggccgaggcaggagaatgccgtgaaccccggaggcggagcttgcagtgagccgagatcgcaccactgcacactgcactccagcctgggcaacagagtgagactccgtctcaaaaaaaagaagaaaaaaaagagggccgggtgcggtggctcacgcctgtaatcccagcactttgggaagctgaggcgggcggatcacctgaggttgggagttcgataccagcctgaccaatatggagaaacccccgtctctactaaaaatacaaaattagccgggcgtggtggcgcatgcctgtaatcccagctactcgggaggttgaggcaggagaatcgcttgaacttgggaggtggaagttgcagtgagccgagatcgcgccattgcactccagcctgggcaacaagagtggaaactcggtctcaaaaaaaaaaaaaaaaattccagccactaaacagttaaggcctggctcattataattggctgacgtccctgcctgctcagatatttaatattttgaatagaacttttgggtaaaagagtcttcagggtaacatttattttcccaccaacactgatcctaagatgggaaaagtaattcccccacaggaaatcaggatactgcaagcaacgagaaaggcatgttgagtggttaaacaagaatacatgtattcaatacagtgttcattaaatgtttgataatagaaggacaggcagatccaagtatttcataggaagaaagaaatcaagcagaccgcaggttatatcaccccatcacacattcagggaacttaatcttttcattccagaggatgggtttgtttaaaacaagttcttcctcctaattacttttgaacaattccccaatactgtccttacctgcaccaagagcatgctaaccaggcctggcaccagggtcagagttgaggctggggcatcagccccctttgtgaggtggcctcagtgacaggggtgctatgaggtggcggctatcctactgcagctggctgcatcagatgtgccaggcctgccctctagctcccaacaccatctgcctgatctaagctttgccatgttgttgtcactgctgggtgcctgtgctgtggtggggccattccatggccctgagtgggagccagtgcagggcctgctctcccagaatcacagctgcagggaccctcagtgct

SEQ ID NO: 28606 - DNA, 2300 bp, Homo sapien
ggtgactcctgggtttggggcttggccgatgctctccctgagcagcctgagtttccctctgattcatttctggtacaccaggcataaaacaaggtccttgtaacaagtgacagagacaatcatggtgctgagggaagaagggtgaaggtgtatggggcccactcaccttgatgacattccttgtgctgaagcgggtcctggtgacctggtgccaacagtgccggacctgccagaccagaaagaggcagaggacaagcaggttgccacagcactgagggtccctgcagctgtgattctgggagagcaggccctgcactggctcccactcagggccatggaatggccccaccacagcacaggcacccagcagtgacaacaacatggcaaagcttagatcaggcagatggtgttgggagctagagggcaggcctggcacatctgatgcagccagctgcagtaggatagccgccacctcatagcacccctgtcactgaggccacctcacaaagggggctgatgccccagcctcaactctgaccctggtgccaggcctggttagcatgctcttggtgcaggtaaggacagtattggggaattgttcaaaagtaattaggaggaagaacttgttttaaacaaacccatcctctggaatgaaaagattaagttccctgaatgtgtgatggggtgatataacctgcggtctgcttgatttctttcttcctatgaaatacttggatctgcctgtccttctattatcaaacatttaatgaacactgtattgaatacatgtattcttgtttaaccactcaacatgcctttctcgttgcttgcagtatcctgatttcctgtgggggaattacttttcccatcttaggatcagtgttggtgggaaaataaatgttaccctgaagactcttttacccaaaagttctattcaaaatattaaatatctgagcaggcagggacgtcagccaattataatgagccaggccttaactgtttagtggctggaatttttttttttttttttgagaccgagtttccactcttgttgcccaggctggagtgcaatggcgcgatctcggctcactgcaacttccacctcccaagttcaagcgattctcctgcctcaacctcccgagtagctgggattacaggcatgcgccaccacgcccggctaattttgtatttttagtagagacgggggtttctccatattggtcaggctggtatcgaactcccaacctcaggtgatccgcccgcctcagcttcccaaagtgctgggattacaggcgtgagccaccgcacccggccctcttttttttcttcttttttttgagacggagtctcactctgttgcccaggctggagtgcagtgtgcagtggtgcgatctcggctcactgcaagctccgcctccggggttcacggcattctcctgcctcggcctcccgagtagctgggactacaggcgcccgccaccatgcccggctaattttttgtatttttagtagagacggttcactgtgttagccaggatggtctcgatctcctgacctagtgatccgcctgcctcagcctcccaaagtgctgcgattacaggcgggagccaccgcacccggccggcctttttttttttttttttgagagtctcgctctgtcgcctcagctggagtgctagagtgcagtggcatgatctcaacttactgtagcctccacctccggggttcaagcgattctcctgcttcagcctcctaagtagctggggttacaggcgcccgccaccacgcctggctaatttttgtattttttagtagggacgaggtttcgccatgttggccaggctggtctcgaactcctgtcctcaggtgatgcgcccgcctcggcctcccaaagtgccgggattacagccataagccgctgcggccggccggtgggttactttttgaatgtttaattcattgtttctgccaataatttgtactaggcagctcataagaacgccaaagtacgttccttcttcgacacagggccagtttccgcgccagtgcccccgtagagggcggggcccactcgctcgcgtagcgtcaccttcgcttcctgccgcgcggggccatttccgctgctgcttctgtgagtttttccggtgcacgcgagtgcttctgaaacgtcagctgcgctcccctaggagtgctgagcccgcggaaccgcagccatggtgagtgcgtgcgccggccgagggaccgggaagcgggagactcagggttgcgttcactccctagcctgttagatggaggcttag

SEQ ID NO: 28607 - DNA, 2300 bp, Homo sapien
agagcctcccagtgagaacagtaggggcaggaaaatgatcaggtcaagggtctcccagctggcagagagggctcccagcagagtgaggacttcattctctagggcagaccacgcccactggaggaaggaatgtacatcctgggaggcctctaagctccccagactcaaatgccagcagctcacatactggagaagaggaagcctggaatctacagggtgcagaggggctgggcagcagccttcctgccattctgcagaacctgtcagcttcaaagggaggctccactctgcggtggcaaagctgggcctgacccttctggccaagatgtcctggtccccacagctcgccaagcgcaagcacttggcccctaacctgagcctgagggaacctgattctactctgcctcccaaagtgggtgatcctcgtgcaggggaggacagcatcggagatcacactgcttcacagagggatcttcagctgcaaggtcactgctgtactggggccacccttcctaagacagagagtccccagggccaggaggcacctgggaacccaaatggggctccacagaatacacgagcctccaaaaagtttagtattatgaagcatctgaatttttttctcttccagaatggctttaaaaagtagactcaggcccagagtcctcaggacatatcagaaaagctttgagagtgtcctgatccctgcaaagcctctaataaattggtcatttgggccctgtggtgttctgatttctctggcacattttccaagtgccccctttcggggtttgggatactttgtgggtggggtagaagccccttccactctgtggttgtggtttagggaatgtgggtcaacccagtgtcctctccgaaacacctgccccccagctcctcacagtggagtccactgaggttctatcctgctctgtctccaagctaatcctgattgaggcaggacactccaaaagcctcagctgcttatggggaggggtggtcctctgcatgggacgcttttttttttttttttgagatggagtgtaggtctgtggcccaagctggagttcagtggcttgatctccgctcactgtaacctccgcctcctgggttcaagcgattctgctgcctcagcctcccgagtagctgggattacagtcatgagccaccacacccagctaatttttgtatttttagtagaggaggggtttcgccctgttgctcaggctggtcttgaacttctttctctctgtctttggtgttttgttttgtttttttacttttattttttggtcttaagcttctgatttatttatttatttttaagatggagtcttcctctgtcacccaggctggagtgcagtggtgcgatcttggctcactgcaacctccacctcccaggttcaagtgattctcctgcctcagcctccctcccaaagtgctgtgattacaggcatgagccaactcacccagcctctaattgcttttagatgcgaatccttgggatcgcttattttcctttttttttttttttttgagatagagtcttgctctgtcgccaggctggagtgcagtggcacaatctcagctcactgcaacctccgcctcccaggttcaagtgattcccctgcctcaagcctcccaagtagctgggattacaggcacttgccaccacacccagctaattttttgtattttagtagagacggggtttcaccatgttgggtaagatggtcttgatctccagatctcgtgatccgcccacctcggcttcccaaagtgctgggattacaggcgtgagccaccatgcccggccttcatttttaaaaaacagtagaaatagcttcctttccttcctttttcaaggcaaatgccccctactttataattgcttttcaactttggatgtggtaaagacattcctgcagggttctaagcacaaaccgcttttggcttagctagacacgatccagagcacttgcgtccaccacttgccctcagtggctgctgctcgtctgagactgcagcgccctgggtccgcgcaggcgcattccacaccgacgcaggtccgtcctccaagtgcgcatgcgtgcagtctgcgcgggaaagagtgccgcctcagctgagggcaagcgaggagatggctgtgaggcaggcggcgacggcgggcactcccgggcccaggagagaggaagaggcggcgcttctattcgagagggcccattaccggcacgacccgcgctggctgctgcccgtgaccccccgcctgtgcctggcctgcgcgctggagctgctgccgg

SEQ ID NO: 28608 - DNA, 2300 bp, Homo sapien
ggaaagatcagttttggtggaagatctgtcctgatcctaattgacagaatggagcatattcactttctgtagctgtgtaacatgccctccatgcgaggcagcctggccaccctgacccttcttggcaagttggtggatgccatccctgctctggcagacgagcttgtaatggagcatggtgagtgacctgtgggaggagctgccactacccttttacctgcttttatcatactgccatttgggtgtcccattcactctgtacacctgggaagtcattactttcctgctttagccttcagtttccccgtctgcaaaatgtactgtatgtcggtcaatttgaaaaaggtcagttttttgactctattcttggactatttccattcattcttttttttttttttttttttttttttttttttttttttgagacggagtcttgctcttgttgcccaggctggagtgcaatggcgcaatctcgactcactgcaacctccacctcccgggttcaagcgattctcctacctcagcctcccgagtagctgggattacaggcatgtgccaccacgctggactaattttgtatttttggtagagacggggtttctccatgttggtcaggctggtcttgacctcccaacctcaggtgatccgcctgcctcagcctcccaaagtgctgggattacaggcgtgagccaccacgctggccttccattcattcttttttttttttttttttccctgagacgagtcttgctctgttgcccaggctggagtgcagtggcgcgatctcggctcactgcaagctctgcctcccgggttcacgccattctactgcctcagcctcccgagtagcttggactacaggcgcctgccaccatgcctggctaattttttgtatttttagtagagacggagtttcaccatgttagccaggatggtctcgatctcctgacctgctgttggacccgcctcagtctcccaaagtgctgggattacaggtgtgagccaccacgcccggctccattcattctttaacacaaattaattaagtacctactatgaaccttccttttggatggaaggaggaattctggaatatagaagcacttttttctgtcagtgaaatgcaaataaatatctcccagaggatttaccaaagggtaaataacttctttaagttggtttcccctttttaaaaaaattaataataataataataattttttgagacagaaccgggctacagcgcagtggcatgatcttggcttactgaaatctctgcctcccaggttcaagtgattttcctgcttcagcctcctgagtagctgggattataggcgtccgccacaacaccaggctaatttttgtatttttagtagaggtggggtttcgccatgttggccagactggtcttgaactcctgacttcaagtgatctgcccacctcggcctcccaaagtggtgggattacagccatgaggcaccatgcccagcctaattattattattttttagagaccagatctcactatgtagagcaggttggtctcaacctgctggtctcaagtgatcctcccaccttggcctcccaaagtgctgagatttcaggaatgagccactgcacctggctttctttttcttttttcttttctttttttttttttttgagttggagtctcgctctgttgcctaggctggagtgtggtggcatgatctcggctcactgcaacctctgcctcgtgggtttcagcgattctcctgcctcagcttctcaagtagctgggattacaggcgtgtgccagcatgcccggctaatttttgtatttttagtagatgctgggtctcgtcttgttggccaggctggtctcgaactcctgaccttaggtgatccttctgccttggccttcccaagtgctgggattacaggtgtgagttactgtgcccagtttggttttgcctttagattaagcatgcagaaagcattttttgtgggggattatagggacttaccattactaccccgttaggaataatagattggagtttcatatagcagttgacattgtgaaatttcccttggctccttggttgttttctggacaggcaacctgatggagcatctgttgagaggcttagtataccccagtgagggcatacaagcttctgtctgttacctttatgggaagctatactcctcaccagtggcagctgagatgctttcaggacacttccgtgagaagctttttcccctcttcctttccatcctggatggtgcccagacaaaggagctgcagattaact

SEQ ID NO: 28609 - DNA, 2300 bp, Homo sapien
atgtagtgtttgattatgaaactaacaggttcatcttaagaaaaaatagaaagcagtaataataaaataataagtgggtaagtttatggagtggaaagtgcctaatattcactatctgatttagttctcccaatgaccctgggagatggatgctataatttgccctaatttacagataagtttgtcatatttctgtagttataaagcaagcccataacgtgctgagattgaacctatgacttcaggtcccctagcttttcttgtgtctttaataatgagcagcagtgaatgtctgtgatccaggtgttaacaaggaacatgtatgtgtgttctgtaaaatgagagatggccactctgaagagagacttgatccttgatcctgaagagcttcattttgagctgacttgaggttgagatggtgggaagagcagggccaagagctgctgactctgggtaaccttggatgagtaacctcctgcttgaggtttgggcatcctatgagcctgtgaggagtccctgttagtcgggaaagggcaactcctaaccatttactgggaacagtaggtggcagcagggaggcacctctggctctgcaccagcgaggctctcttccttgaagaagccattgagctggagtctgcaggaggtagtggtcaggaaccctggactgtggccctgacttaacccactaacagtaagacttgggcaactcatcgcagtttactcacctgccctgccttcctcctagatttttgaagtgttagagctaaatctagaagtagatcatagaattattgtattagtccttctttctacttttctgtattttacacattttctttaatgagcatatattacttttataataataataataataaaacaaccaaacttgctctaaaaatgaaaggaaaggtgtcaacaagaacagtgcctctgaggacccagctgtttacagaaagggaactgagactcagggaagggagaaggtgactacccaagggcacactgtggtggctatgtacagagcctgaactagaaccctgtttctttttttttttttttaattcagagctgtgtttaccacataagactgcctcatgactcttgaagaattacctgaaggctggtctgagtgcaatggtatttacaactaattgatcacaaccagttacagatttatttgtttcttctccattccccctgctttacttgaccagccttaataataacgggccgggtgcggtggctcacacctgtaattccagcactttgggaggctgaggcaggtggatcacttgagatcaggagtttaagaccagcctggccaacatggcgaaaccccgtctctactaaaaatacaaaaattagccgggcgtgatggcgcatgactgtaatcccagctacctgggaggatgaggcaggagtatcgcttgaacccgagaggcagaggtttcaatgagccgagatcgcaccactgatcgccagcctgggtgacagagcaagactccgtctcaaagaataaaaaaaaccccacccccacccccccaaaaaaaacaaatatgaaggcagtttataaactatattattattattactatcgtaatagaaacatgagagtcactctgcattatggtttagaaagcagtttttacacaccagaccacatttgtttctggaagggatatcttgttattcccactttagtcttgggaacagaagcccaaagagataaagtatctagtacaatctatcaggtgatccaagccttagatgtaggtttggactttaagttccctagcttttgttgtgtctttcaagtgaaaggagttgctagatttgatgtgagttttctctgatgccttttcttcagaggctcagtccccgtgggctgtgttctctctcctggttctttgcagagacacttggagcagaccacccacccagctttgatggaagttttcctctcaattctacataacctctttgtcatcgttccccacatgaaggagaagttttccaagaagcttggtaggcagcaggcaaatgtggaggttgggagggaggcaagcaccttaggcaatgctcagagagtattcaaagagaggataagttgtgggtgcacatttactaattcattcagaatctgtatctattctttgtccagtgatgagtgaaaggaagtgtcaggcagcaatcaaaagtcattaaaggggctgggcgtggtagctcatgcctgtaatcctagtgctttgggagaccaagatgggaggatcacctgaggctaggagtttgagacc

SEQ ID NO: 28610 - DNA, 2300 bp, Homo sapien
gcatcccagaagtcaagtaagatgaagattgaaaaatgtccattggacttggcttcatggcagcttttggccacattggccggagcagcttctgtgggagtggttggaatggaagccagaccagagtgagttaaggaatgagtgcaagatgaggcagtagagacaggatacacaactattttaacaagtttggtgtgtggggaaggtgagaaatgggggtgtgagtagaggggaacatggaatcaggaaggattttttctaccccctaagattggaaacacttacctgattagctgctgataggaaggagcagtagagagactggttgttagcccatgtgagttggaattcttctcacctctcttacttgtttattgagattgtacaaattaattttcttatctccagtgtccttagctagaacatggtgataatagtgagaattaaacaagatgatgcatatagatttcctgaagactgcatccctcagccattgtgataactgatacacacttctttccttccttctaacattcttcctgcctgccatacttccggacccaagaggatctagtcttggggcgctggatgggaggcaagtgtagatctcttgggggcagtggtggggaataggggatgtagaaaaaggctgtgagatctgtagggagatctgtgtagcatgaagccaggtagcacaggatcagaggctcaacctgcaagagggaggagggaagcaggcactgccagccaggaatggtatggagacttggagtaggagggtggagaaactctggatccctgagagattgggccaagaggagcccatctggaagggaagcttggtgccccttcctgggaaagtcatgggttaaattgttgccccagagagttgctgtgaaaccctgagggattccctgtcagctgctttagccccaggataaaatacagattattcccaacccaggggctggtgaagtgggagcttctgatgtcgtctttatctaggattctgcttttacagtggcccagggaaggcagaacagaggttagtattgactgaaagccttactggggagactgggaggagccagcagcacaaaggcctgggccagggtcaacagctaaggcagaaactgctggctgggtgcagtggctcacgcctgtaatcccagcactttgggaggccaaggtgggcggatcacctgaggtccgataccagcctgaccaacatatagaaaccctgtctctactaaaaatacaaaattagctgggcgtggtggcgcgtggctgtaatcccagctactcaggaggctgaggcaggagactcgcttgaacctgcgaggcggaggttacagtgagccaagatcgtgccattgcactctagtctgggcaacaagcgtgaaactccatcttaaaaaaaaaaaaaaaaaggccaggcgcagtgggtcacacctgtaatcccagcactttgggaggccgaggtgggtggatcatgaggtcaagagatcaagaccatcctggccaacatggtgaaaccccatctctactaaaaatacaaaaattagctgggtatggtggtgcgtacctgtagtcccagttactcaggaggctgaggcaggagaatcacttgaacccgggaggtggaggttgcagtgagctgagatcatgccactgcactccagcctggcgacagagtgaggctccgtctcaggaaaaaaaaaaaaagaaaagaaactgttattggacctctgttctgagaatcaattgctttcaacagacaattcagagatgagaataaaatagtaactactgttctttctgcatctgaaactggattgttttctataaaactgaaagaagggatagaaggagcagatgtgcccttcctaggtccttgtcaaatgtaccaaattgtagtggaggatcattcagaatggaagaaaatgaacacttattgcagcacttactttgagccaagtatttgttagatgttctccatacatttatcttacttagctttacaacaccctgtgaggtacaaatatcaaaactgagtctcagagaagttaaaaaacttttccggagtgaaactactagacagtggtggagtacattttgaaccaagtctgtgtaactctgaaaccagagctttttgataccacccaggcttgggactctctgtgacaagtctggtttaaactgctctctgctttattcccacttctctgaagcttcctcatccttcatacgactgaccctggagctgaaggccaggttttgcagtggtctgaggtatgtgt

SEQ ID NO: 28611 - DNA, 2300 bp, Homo sapien
ttgaactcctggcctcaaacaatctacctgccttggactccaaagtgctaggattacaggtgtgagccaccgcacctggcctttattcaaattttaaactctgaagtcagtctttttctttcctttttttttgttttgggacagcgtcttgttctgttgcccaggctggagtgcagtggcgtgatctcggctcattgcaacctccacctcccgggttcaagcaattctcctgcgtcagcttcctgagtagctaggactacaggcacttgccaccacgcttgtctaatttttgtatttttaatagagacagggttttgccatgttggccaggctggtctcgaactcctgacctcaggtgatccacctgccttggtttcccaaagtgctggcattaccggcttgagccaccacgcctatccttctttcctgttcttttggtattaaaatattctttcttttatgaaaccgttttcgtaagaaatctagaagtctctgccctcaggatgaagtcccaattccttaagtggcatttgcttaaaggtctttcacagtccaactgcagattacatcacatagttccccagcttctgacaccccacatctattcactgactatccagtgacactgaatggaaacatggcatgtcttctcatgccttcaggcctctgaacaccttgcttccttttctcttttctcctgtcgctgcctcttttctcctcaccctccacagtttgtttctttctttctttctttttttgagacggagtctcgctctgtcgcccatgctggagtgcagtgacatgatctcggctcactgcaggctccgccttctgggttcacgccattctcctgcctcagcctcccaagtagctgggactacaggggcccgccacctcgcctggctatttttttgtatttttagtagagacgggttttcaccgtgttagccaggatggtcttgatctcgtgacctcgtgatccgccagcctcggcctcccaaagcttgctttcttttttctgagatggagtttcgcgcttgtcattcaggctggagtgcaatggtgccatctcagctcactgcaacctctgcctcccaggttcaagcgattctcccacctcagcctcccaagtagctgggattacaggcgcccgccatcatagccggctaatttttgtatttttgtagggacggggtttcactatgttggccaagctggtcttgaactcctgacctcaggtgatataccctcctcagcctcccaaagtgctgggattacagcctggcccacagtttcttcctctttgacctttccttccccatgccaggcagcctgagtcactccctcctcaatatagcgctgatcacatgtcctgcaattgcctgtctcattatgtgtctcttcccatcagctgccagttcctggaggtagggcctgggtctcacagcctgtcctgagtagtagccactcaatgaacatatgtcaaatgaatgaaagaatgaatgtttttgggaggccaaggtgggtgaatcacctgaggtcaggagtttgagaccagcctggccaacatggcaaaaccctgcctctactaaaaatacaaaaaattagctgggcgtggtggtgggtgcctgtaatcacagctacttgggaggctgaggcaggagaattgcttgaacccagaacggggaggttgcagtgagccgagatcatgccattgcactccagcatgggcaacagagcgagactctgtcaaaagaaaaacaaaacaaaaaaggaatgaacgttaatttttgagacatatccatgtccttctgcttgtgaagtttagtctttcccggtaggttgaaccttgctcaaaggaagaggagcctctgatttccttatttcccactatactgcatttacccttgctgccctgtgcagtactctgcatgtagtaggtactaatgtgctgattacctgttcttctatgttctctgtgtggctttcctctacttattccctccctagaactctctgcagtgtctgagctcctgcagcatgggctgccccagataagcagcaggagccctgaaagccttgccttcctgtctgatcgccagtacatggagggagctgctcgccagagacagtactgcatcctgctcctcttctacttggcctacatccatgaagacaggtcagtgcacagaggtgggtggctggtggtgggtcttgggaccttcatcagcagttcagttcaataaataagggcatctctccaagcctgatgctgggcactggggacacggggataagta

SEQ ID NO: 28612 - DNA, 2300 bp, Homo sapien
acacacctaggtatatgggatgacctgttactcctaggctacaaacctgtacagcatgttactgtactgaatattgtagacaaatgtaacacagtgacatttgtatatctaaacatagaaaagatacagcatgactatatcttatttatttttattttttttcttttttcttgctctgttgcccaggctagagtgcagtggcaggatcatggctcactgcagcgtcaatcttctgggctcaagtgatcctcctgccttagcctcccaagtaactagaattggctgggcgtggcagctcatgcctataatcccagtactttgggaggccgagccaggtgaatcacctgaggtcaggagttcaagaccaagtagctggaactacaagcatgtgctactgtgtctggctaatttttatattttttgtagagacagtgttttatcatgttgcccaagctggtctcaaattcctgggctccagcgatcctcccaccatggcctcccaaagtgttgggattataggcataaacgactgtacctgccattttttctttttaaatacatgaaacataggcttagagagatttgcccatggtcacaagagttggaaatcaaaatattaaaacccagatttgactccctatctatcagttgttctgtctgaggctctctttttactcagtctgtttattcttcctgggttatctcattcacacccatggctttgtttgcctcctggctgtatggtgatgactcaaatccctgcaccacccctgacctctctcctgagctcatacccatgaagtcaaccatctatttgacatttctgcctaaaatggagctcattatctcctctcccaaattccctttctcagcctgggtcttcctagaatggagaggtccctcactaactgaaggctgtgctaggccactaacttcacaggatgtaaatattaaaagaagcaaaccaaacagaaattgaatctcaggagaccaaatacttagagtctacatcccagggaagctggagtggatgccccaccatttatcctggtgacccagtccttgtccttgaatgtgcaccatccttatcacctctcctttctggaggtggtggaggtcagggcagagaggagtcttgtgtttcacttggcatagagcttaacagaaaggagctgccttcaagatgagttgttgcatagaggactaggaagatagaggctaatctgaacttcagttttctcccacagaaaatggagaaaacatgagggtagatgagatagtatgtaggaacactcttggtttgcttcacatagtgggctgtcattcactaatcattgactgcctctgaaccagataaagttcatctcagagaagctaattgaattgcccaaggtcatatagttaataagggtcatggctatgactagagcccaaagtgagtaagtttttcactaacttagatcctagagacatcaatggtaaaaaaaaaaaaaaaaaaaaagaacagcaaggaggccgggcgcggtggctcacgcctgtaatcccagcgctttgggaggctgaggcgggtgggtcacaaggtcaggagttcgagaccagcctggtcaacatggtgaaaccctgtctctactaaaaatacaaaaaattagccgggcatggtggcacgtgcctgtagtcccagccactcaggaggctgagacagaagaatcgcttgaacccaggaggcggaggttgcagtgagccaagatcgagccactgcactccagcctgggcgacagagctagacttcgtctcaaaaacacaaaacaaaacaaaagaacagcaaggaacaactttattgtctgttcatatatataattcttaccatttctccccagcttctagccagaggaaggaaaaagagtctaaaaattttgtgttgataccaatttctgttttttatatgggtaattaacagctgaaaacaaagctgttaattgccactcttatcaatgggtggtctttcatgtaggttttttagatgtgaagggacaatgacatcacagaaactctgtttgtttcctctttggccaagttacgctggtctgtcaagacccagagagttctggacagcagagactacagattgggtcatagttttgcccagagccttcccactgatccatatggtggggtcctcacgttcctcttcctccagcattcaccatagccacacaaagctgagtagccccttccttttatacctttaacattcattaactcagacttctgagggaccacctctgtggcagtggggcagt

SEQ ID NO: 28613 - DNA, 2300 bp, Homo sapien
tttctccccagcttctagccagaggaaggaaaaagagtctaaaaattttgtgttgataccaatttctgttttttatatgggtaattaacagctgaaaacaaagctgttaattgccactcttatcaatgggtggtctttcatgtaggttttttagatgtgaagggacaatgacatcacagaaactctgtttgtttcctctttggccaagttacgctggtctgtcaagacccagagagttctggacagcagagactacagattgggtcatagttttgcccagagccttcccactgatccatatggtggggtcctcacgttcctcttcctccagcattcaccatagccacacaaagctgagtagccccttccttttatacctttaacattcattaactcagacttctgagggaccacctctgtggcagtggggcagtgatgtgttggtgaaggcacaagaccaggaaactggtttgactctgggatctatgaccttgggcaaatcatgcccctcccttcccgtcgggcttcagcctcatactctgtaaagtaaaggtattggaaaaaattatctagattctctctagccctcccattctgtgacctttttcttttcagagatgttttctgagtctctacaaggtgacaaagatgaagtagacctcatcccttcccttcattaactcacagtgcagtttaatttacaactttattactttcttgatatgcaaactgattaacctgccccagttttctcatttgaaaaattggggtgacacctatatggaagagttattgtagaggtataaataatgtataaacaaatatacagctactgtataaacacaacatagtacctgacattattaggccctgagtggttgttattgatatatagttgtttttccagcaactgcggaggtttctgagagccaaacttagacatccctgtgaccccatccctctccttctgcccagtgatcagcacacctgggtttgtctggccagatgcattgtagccatatctctctgtgtgtcagtagctgtcctccctggagagggagtctgtgtgaccttggattcataaccctcagtcctaactggcccagcgcattagcctgtccaaaggaattggcttctttgagctagcaggtgccaggagctatcagtagggtagcctctggtgcagctttctgactggctttgtctttaacatatactcactaaaataactctgaaagcaaaataaaaagcatcttcccatcttccgagcctaagacctttatagcttggggcagagataaccagatgccttggtagagaacgggcctgacctggtcctcacttgcctttctgtgcactgaatctgtcctaatttatcctctgcctgcccagtgacatcatttctctttccttcttctcttctttaaggcacactcaggttccctgtcttgaaaacaacctcttgaccctaatcctaccatttgcaggagggaggcatcctggaaaatagagctttgggcttggagttaggagacttgcattcaaattctgtctgtgccactggcttatatgacctttagcaagtcatgtaatctctctgagcctgttttctcctgtttaggatggatttaataggatggacctattctttttttttttttttttgagacagagttttgctctgtcacccagtctagagtgcagtagtgcgatctcggctcactgcaagccccgcctcccgggttcatgccatcctcctgtctcagcctccggagtagctgggactacaggcacttgccaccacgcccagctaatttttttgtatttttagtaaagacggggtttcaccgtgttagccaggatggtctcaatctcctgacctcgtgatccacccgccttggcctcccaaagtgctgggattacatgcgtgagccaccatgcacggcctaggatggacctattctaagggatggttttgaggcgtcagtgcacctagaagagcctttggtacataataggtgctgagtaagtgacagattacccagtttttgtgacatcataattatgggcccttttcctgcccctctattcctcattgtcacttttccccaactgcagtaccctctgatctctggctttcttctctcctgctcaggacctcatctattccagcccagtggacacagctcacaaggtactgattagcctgaggaccttcctgaggaggaatgaggatatccaagtgggcggtcttatccgaggccacttcctgctgatcctgcagcgtctgctagtggagc

SEQ ID NO: 28614 - DNA, 2300 bp, Homo sapien
attagctgtgtgtcgtgatgcagacctatatatagtcccagcaacttgggaaggccgaggcgggaggattgcttgagcccaggacgtcaaggctgcagtgagctatgatctcaccactgcacccagcctgggcaatggagtgagacctcgtccctaaaacaaacaaatctgtatgacaggcacaagctctagagtcaggaaggcctgggtttgaatctcagcttagtcactagcaatcatctagtctctgtgagtcttaggttcctcataggtaaagtagtagtactttcctaaactagggttaagatacggaatacttatctagttgttaagataaggaatacttatctagttagatagagaatgtcacacagtgcttgacacacagtagaccttcaacagatcctattcatgcagattccttttttcctggcacaaggtcagctctccagctcatcctacaattgactcagatctgatgatccagttcacagttctccaggcttttttcttacccacaccccaaacctcctcggtttctcaactcatgatgctgccatcacttcacaggcagcacctgcaggaagatttgctgagggaaggttgaaatgaataggaaaaatgacatgtcttcagtgtttgtggaccccccagctcctgtagccacaggtgaagatggggcatcttccctgcctggagcccagtccacctcatgagaacatcagtgtcagattcaaaaaaaggccactggggacgcattgcagatggcctcagcctggtgccagtcatcaccagcctgtctgtgagatcaaggctgacactaagctaggagggggatctgtgtgtgacaaactcagccttcagaagagcctctgacagggagtaacaggctgaaacccacacatgaaatgtaataggacatttacatataatccttgagcacttctatatgacagcagagagtagaggactgtggttcggggtggaggtactggtgtgggagggagctgagacctgcttgtctgggtgagcaccgaagtcagggtgtgatgtggctgccaaaaagtgaatggagctgtaggtaggtttcatattaggatggggatagggagatgggaagtgggagttcccaagagtaaagggatatgttctatagatatctacagtgtaatgttgcactgatgaggcctgggagaatgcagaagcacatctaatcttgccttgagaggttaaggaaggcttcaagggggagatgaactttgagctgaatttttttcttttctttttttttttttttttgagacagggtctcactctgtcacccaggttgaagtataatagcatgataactgctcactgcagcctctacctctcgggctcaggcgatccttccacctcagcctctcgagtagctgggactaccagtgtgtgccaccatgcccagctaattttttgtatttttttgtggagagacggggtctcaccacattgcccaggttggtcttgaactcctgggctcaagcaatctgcctgcctctgcctcccaaagtgttgggattacaggcgtaagccactgcggaggcctgagctgaatcttgattgctgacggggacaagaggagttagctaaatgaagtgatgtgagagaggggatgtggcaagtgcagggaactgcacttcattcgactgttaaagttcccttgggaaggtggtgacgatgttcacaggatggatccctttgaaatcctaaagtctttctgtgatgtgcagctgtaggctgcttgcctgatgtttgtctagatggagggtgtgaatgtgccttaaggtttgtcactgtgtttctttccattggttgtaatatcagggatacttagtttgtgcttgctccccaagactgacatctgaaatagccagtcgcaggctaccacctatgacaagtgtgagtgttttgcgacaggccgactggggactttcatctcttgcagtaagcaagctgtgtgggaagtgcagccccactgacgtggacatcctgcagccctccttcaacttcctgtattggagccttcatcagaccacacccagcagtcagaaaagaggtgcaggggcccgggctgggacagtgaagagtgctgggcagtctgtggtcctctgtatctcaactttttcatcttaaaaaaacaaatagggttgtgtgtgtggctggtggtcataaggtcctttctggctctaataacctgagcttctgttatgaagctgggacccttagagcctcaggatgatcctctgtttgtttgtgaagcc

SEQ ID NO: 28615 - DNA, 2300 bp, Homo sapien
tctcaaaaaaaaagaaagcttgggggccgggcgcagtggctcacactgtaatcccagccaaggtgagtggatcacttgaggtcaggagttctgagacgagcctggcctacatggtaaaaccccatctctactaaaaatacaaaaattagccgggcatggtggtgcatgcctgtaatccaagctacttgggaggatgaggcaggacaatcacttgaacctgggaggtggagattgcagtgaccagagagccgagattgtgccactgcacactccagcctgggtggcagagtgagactatgtctcaaaaaaaaaaaaaaaaagcaagcttggggctgtggcagtggtcagagaccctctggtaggtggctggttgcacccagagacactgcagtccagagatactgcagtccagaggtgtgtgtgagggtagtttgcttcctctgcacccctctggctgcctccctggctctcttccttgccccttccgtgcaatagttccctgttgaatagcaactacctagcccaggtgttcaggacccaatttcagaatccatcccactattctcaggagcacttctgttcttgcctgaccattcttgactgttttgggctctggaagtgtgatgcccccatggttggccccacttctctgctgttttcctctcatgttttgctgccagctgcctgggaggggtggctgtatccctgtcccacatcagaaactgatcctcaggacttgaaggcccagaagtggagagagaatgagacctggagacaaagggcataattgttggggaaatggatgacagctgaagctattcatatggagccatatactctattgttgaaatagaataaggaaataaaatgatacactcacatacctgcgcgagctctccaaaaacactgtactaccttgtctaccaggagctggtttctcagccagttggataagggattgtttcagcaaggagactgatggcctcctcagggaaggagggacgggacaggatttgttcttgtaacagcattcaaggagtcagctgggtgcctcagctgtactcagagaacaccagtcaggccatcctggggctggcagggcagagaaaggcctaggggttggggctgctgcgattcaacagctcccagaggcacttgacctgctccctcgcctcacgtggaggtggatagaggtaaactttccaggcaaggagggtcaaattctcagctttcctatcagaacgaaactgtcccagcctcagcccttgtctggctaaagtaggtcacctctgtcccttcccgtacagccgtcatcagaactggtgtttatgcaccctcgtgggtagatcctgggaatgcatgtccagcttggtccccggcatgaggtctgcgctcgacagtgcctgccctgcgcctgttctggggagctcagcccagaccgggcctccagctcccttcccgcccggcaggggccccgggcccggagatggccacgccacgctgccttctcgggtctgactgtcctgatcctgcgcaaaagtggggctgcactcggcctaacgaacggacgaggaagcccccgccgcacttggcttattagttggtggaccggaggggcaaggaggggatgcccgaatcctgcactgagtctctgaggtccttaaagaagaacaaaagtgctagtcaccgcccactaaactcacgttgcgatctaaagtttaaaaactcggccacagacgacgacacagtttcagggagggcgcgcagaaggtcgcccggccgacaggagctgggaccccagtttgctgattcacgccttaaattgggcacagaccccacccacagatttaacttcctccaacacaagctaaatccagggccacgtacccagggcccgcaggagggacaggacgaggatggtgcccacagcgcgctggaggcacgccagagcctggaggggcaggcaggggcggtggagcggggccggaagtgaggctagcggagccccgcagtggcggctcgcgctcattggccgggagcagcgcggtgggcgggacggagctcggcggtctgcgctcggttgctagccgtttgctcccgctttcagttgctttgctgttagcctgttggaccttcgagcctagctgctcgcacaggactcggccacctgcccttcctgcaccgactggccaggtaggtggctgtaggggccgcgggctgcaggttcccgggaaggataatgagagaaccgagggcctcgaaccggctgcaggtggtggggagggagtttcgtggacctg

SEQ ID NO: 28616 - DNA, 2300 bp, Homo sapien
cctctttgtcctgcttttgtctgggatgggagccacaggcaccttgaggacctccctggacccaagcctggagatctgtatcctttggggttgtagttaatgagctgtctttgagaggtctataaatgaggttcttctactcagggattccagggataagcaggcccagctggcgggaacagggagaaaaggtgaggtgctctagccagaccttgagcaagtcaggtctctccggagcttcagcttccgcgtatggtaaatggagatgacaaggcccatctctagactgcaaaggctcagtgaggactgtgcatggcctggcaccttgtgggcaagatcctgggtggagactcaggaattctggattactggcccatctggaccctggtgaactgggccacctgctccaggccaggcctcaaggacacgaagatgaattacaacaagtcccctggctttgaggtgtccataagcccagggggagaaagtatccaaacaaatgatcatgttactctgtgaccagtgctctgatgggcacaggaggggtcagggagaaacactgtgtgatggtttttgagccaggccttgaaaggaaagaaactcctagaggagggtgaggggcatcctgggcagagagggtgcagcgcgagcagagaggtggaggctctggaacagtagaatgcttgtggagacggcaggaagaccacagcaaagggaaggcaggagccaggtctggaggcttggtttcaggcttctgggtgtggagcgccatgggaactggatgaatagtgcgttgcaggtccatgcacttgtcagtttgttcatttcctggaggcttctagccctgggtgtccatggcccttgcagatacttgctggtcaggaatgagccttctgaggcaagactgctggattgtccaggcagggctattgatgccagccccttaacttaattctgcccagacaagaagatgtttgaggtgaagcggcgggagcagctgttggcactgaagaacctggcacagctgaacgacatccaccagcagtacaagatccttgatgtcatgctcaaggggctctttaaggtgtgtgcaggcagggggcagctcatggcaggtccagtctttgatctaggcactgatgggtaaacaggagttccctaacgggttggtgttcagggacaggggaactgcgcacacgtaagacttgaagtggggtttaaataaatggggatgggagcagtctgtgatgggcactgcgaagccactcagccctggcgggattccctcaggtgctggaggactcccggacagtgctcaccgctgctgatgtgctcccagatgggcccttcccccaggacgagaagctgaaggatggtatggtctgccctgccccgccctgtcctccgcaccacccgatcttctctagctgctccttctctcctgttcttgtcactctttttttctccccggaagtgccctcttgtggcaccttctaagtggtccccttgggcagatgggcgtttcgtgagtggcctccctaattaactggctactttttagcaatagcatttctttttttttttttttttttttttttgagacagagtctcactctgtcgccaggctggagtacagtggtgtgatctcggctcactgcaacctccacttcccgcgtacaagtgattctcctgcctcagcctcccaagtagctgggactacaggcacatgccgccacacccagctagtttttgtattcttaatagagacgaggtttcaccatgttggccaggatggtctcgatctcttgacctcatgatccgcccacctcggcctcccaaagcgctgggattacaggcgagagccactgcacccggccacaatagcatttcttagattacactgagaggatgcggacagctcttatatattaaatagtagatactttacaaccatgaactcaaatctccaccataactctgggggaagacactgttctctctactttctatatgaaagaggacaagtgatttgccttggctcttccctctgaatcaggctgacttcctgagttctttgaggttcaagattattctgaagccccggggtccctgcctgacatgtctcagacccaccctggcatatctttggagtctacttatctttctgcgtggcctcttagtgctggtgagggctgcctgggccctttctgacaggctggctccaatagggactgcttagacctgtttacacagttacacttttggctaacctggatctgggggacttgctaccatgatgg

SEQ ID NO: 28617 - DNA, 2300 bp, Homo sapien
cacctagaatacccttccctttcctcatgccgttggtttggcaaactcctgcttatcttccaacacccactcagcagttctcccaaacccatttcctgtctccgtgtctggggcagggcctgtgtccagggaaccttcctattcccacaccccgctggtggcctagctcagagcaggctctttgctgccacagactaaatcagactgctcttctcttcccttcagttcattcccagcactgaccctttccagaaggccctgagagaagaagagaaacgccgaaagaaagaggagaagcggaaggagatccgaaaaggcccaaggatctccagatcccagtctgagttatagccctggagcagctcagggctcagggggccacaaggaggcaggtcgggaggaagaagaggtggaggtgtggttgtggtggagagcaccagctagccccttccagaaggggaggccacatttgcccggccccctggagctgggtctgagccccagctgaagggactgagcctcagatggctggattttctctcaggggcctcctgctgaaggggccttcagaggattttatgctggaaatatgaccctgtgcagactgctgggggaggcaggaggatgcctgcctggaccctgttggtggctgaagacctctggccagctggcttccgcccttggtggggaagcagcagaactaggttctgagccacgggtcagggtgccaccctgctgctggccccactgtgtcacagagctgcctggcacaggtcccagcccctctgcagagacacaataaaagccagcagaccctttggaccgaccaaggctggtggggacactgtgaggggaccagggcccctcagggatgtagaaacagcttggaggatgcctctgccccaccaggaggggccccaggccctggcagggcagagaaggaaggggcttggcttgggcctcctggtcctacgccatcactgcccttgacaaatgattggtgttgggaaaggacctggaagtgccctgggacctgggaaacatttagctcaagaagaccttggagcaacatgatccctgtcctcagatgtctggggacagtcattgagcaagcacagggaagtcagcttgttctctctggcagcgctggaagacagtcaacctgtgggtggggggctgcagggggacaggccgcagccctgcaggaggccgtgctccgcaatggctgccctaagctgcatgggtcagacagcttcccgtctcgggaggccacagggcagggaagctgcagagggcatgtggccctgggtagggcagctgcccttcactcatgcccctcccaagcagaggagggaagggctttagtgagaattctagctctgcctctttgaccttgccaagtcaggatctgcctcttaaaggagcagagaaaaccatcccagatcccctcgacacccagccccctaccactgacagagcacaagtgagatctgagtgttagcccttcagatttgctgactggccttggcccacccctccctgtgctgcagcttcattggcaaaatgaatttgatggtatctgtatcccctgcccagccctaacctgtttctctgaggctggcctccctacggggctgcagcagcaaagggaagccaagccttagagaagcctcatggaagggcccagaacatcctgcacccatcagttactcggaagtaaggggacaagaagcagctggaagagagctgggtgtgggggctgggaggagtgctggagaaatttccccatcagaaggcccctcactgggcagtggaggcagggcagtgtggtgggactgactcaacagacatagtttcatctccaccctgcccttctcaggttgtgtgaccccagccacatggacacccgagtctgtgaactaaagggctggtccatggcattaacagtggagggtgtccaggttcttgatgtcttgaacaaagaattgggcaaaatgcacaaagcaaggaaggaatgaagggttttactgagaatgaaagtatactccacagcatgggagagggcctgagcatagggactcaaggggcccgttacagaatttttgggagtaaatacccactagaggattccattggttacttgaggtacaccctatgtaaatggaaaggatgaagtaaatttacaaattcatttacagcatataccctatggggaggatattccctgttatagctgaagcgtgaattggccttatgttccctgcctccagaccctattttcctgcatcaacgggaaaggg

SEQ ID NO: 28618 - DNA, 2300 bp, Homo sapien
cagcttcctgagtagctgggattacaggcatgcaccatcacgcctggctaatttttgtatttttagtagagacggggtttcaccaagctggccaagctggtctcgaactcccgacctcaggcaatccgcccacctcagcctcccaaagtgctgggattacaggcgtgagccaccttgcccggactctctttgtattttttctttcttttttttgagacagagtcttgctctgtctcccaggctggagtgcagcgacatgatctcagctcactgcagcctctatctcccaggttccggcagttctcctaccggttagctgggattacaggcatgcgccaccacacccggctaatttttgtatttttagtagagacggggtttcaccatgttggtcaggctggtctccaactcctgacctcaaatgatctgcacacctcggcctcctaaagtgctggaattaccggtgtgagccaccgcgcctggccagatccttattttttcaattgcaatacagcagtatgcaaggcacttactgtatgccaaagcttatgccgagagctggctgccagcagctcctcctgcctcgaggcctttgtccatgtcatcatttcccctttggctgtaacagctgcagttctctcataattttaggtttcatcttaaatgtcacttcttcagaggcttcttgacagcacaagtcagggcccttgttagtttcatcacatccattacctttccttgatcacttgtaccatcatctgtaatttatttttatgtttaatacgggtgtgggatttctgatttttttttttgctagactggaagctctcagagggcaggaaccatttgtttccctgccacagagatgttcaataaatattgtcaattgaatgtgcaaataatctcacttaaccacagctatgagggatgctattttatccccattttagagatgactaaactgaggcttagaacaattaacccaaggtcacagtgaattagtggatccatgtgtctgcctccacacagcctgtgtgttcttaattattgatcactaagcaacagctgcctctcacaaactggcaggaaacttcaacttttcccttttatcaatatattgtgaacgccttttcttgctaataaatatacatttgtgtgcgtaatttttaatgatcccatggtattccatcgtgtggatgtaatttacatattcatttccttattctcacttcttcctagttacagcacttctttaagcacttgtaatttttattcctttggataaattcctagaagtttacaacacgaccagctgcaagatggggcagtgaggtgcttgaaggagtgggtgggctgcacttcagaatcccggtggaactttttcaaaaaactcgtgcccggggcccccctctcaggaggccgtcggtgggcctgggcactggcgtggttttcaggtcctcagtggttccgaggtgccagagattgaggaccactggagtaagcgcgaggtcacggcgggtgcaaagcagaagacgtaaaatcctgaccgccctgggacaatctgcaaccttgtcaagcctccgtgcccgcctttgtaaggaggctgggagaagcgggacttggatgacccggactcccgtcccgagcgctggggtccaggtttgactccgctggctttctcaggcgggcagggcgggggtaggcagctgggaagatgacgtaatgtgctcccagccaggcctggaggcggccagcggtcgcaggtggagggtggcctgttaacccttcactcccaggccagtggacggacttgcgtgtggcgcagatccaacggagaaggcagcggctcctttaaacaaggcggagaaggttaagatgatgaccggacggctactccaggcattcgctccgaggccgcggggggagggacctcactatgcaaatctgagctgctgatcgatgacgcgccatcaccccacgcaccgcttcgctcgcccattggctgagatgagcctggtcccattgacaacaaacaggggggcgcgcggcctggaggcggggccgcagggggcgcgggctggggcgggggaatcccgccccgccctttctgtgcggcgcccgggcgcaacgcaaacatggcggcgggtggcacccgtcggtgaggcggtgccgggcgggggttgtcgggtgtcatgggcggtggcgacggcaccgcccccgcgtctccctgagcgggacggcagggggggcttctgcgctgagccgggcgatggacgacagcggcgagctgggtggtctgg

SEQ ID NO: 28619 - DNA, 2300 bp, Homo sapien
cctagaagcatccaggctggctatttccttgatctaatccaactccaaaccatgtccaagacaattagtatcctgcccagcccaagatcactggatcactcaggcattccacaaatatttaatgggcactctcactgtgccaggcactgttctaggttcaaagaatttagtgggaatgaaacgaaggtctctgcctcaaggagctaacattcagtaatgggaacacaggggtgagaatcaagggataattttatcttcagaccactgaccttcagcatgcccaactctttttgtcctccaaggcccaggtcaagagccacctctttggtgtggtcttcctgctaagccagcctttaccaagctaccctcactgctgacttttacttgttgtgctgtgcaattttaagctgttccatactggcactagagtttctcatctcaagctccatgaagccataaaattctatgctatctttcacgattccttacagctcagaaaccacagccagcacttgaatacttgttgatcaactgaagacatggaaccacttttcccaaacctggcccctaggtctcctgtgacacaacagccacacctcttccttgtgcggtatataactattttgagaaaaagccttatgcactgttataaaccaggtcttctggaaggacagagaaatggaatcttcttccactgggatcaaacctaatggacctatgaagccactgaaccactgtggtagtttccagagggtggtagtttccattttattcagaaatctgtggggataaagacagtattaaccactaggtaatttaaactcattacaaattaagacagggtcgggtacagtggctcatgccagtaatcccagcactttgggaggccaagacaggaggactgcatgtgcctggaagttgaagactagcctgggcaacacagtgagactggctctaccatatatatataaattagctaggtgtggtggcacatgccttagtcctaactactcgggaagctgagctgggaggattgcttaagcccaagagttcaaggctgcagtgagctatgattgtgccactgcactccagcctgggcaacagccagacactgtctctaaaaaaaattaggtggctcggccaggcacggtggctcggccaggtacagtggctcatgcctgtaatctcagcactttaggaggccaaggtgggcggatcacctgaggttgggagttggagaccagcccgaccaacatggagaaaccctgtctctactaaaaatacaaaattagccgggcgtggtggcgcatgcctgtaatcccagctactcgggaggctgagacaggagaatcgcctgaactcgggaggtggaggttgcggtgagccgagatcgcgccattgcactccagcctgggcaacaatagcgaaactccatctcaaaaaaaaaaaaaaaaaatttaggtggctcacacctgtaatcctagcactttgggaggccaaggcaggaggatcatttgagcctaagagtttgtgctatgattgtgccactgcattccagcctgggtgacagaatgagaccctgtctcaaaaaataactaaataaataaaaatttaaatttaaaaatcagataaacaaaataagacaaataggaattgatcatggaataggaatgcaaaatgcacatgaatttctttctgtgcccttgcaggtaggcagctatagacatacagtactttctactggctgtgtaatcttcagtaaattaatgaaccaccctgggcctcactttcaggatcagtgagagggagatgacaagtataacagttctctctacctgacagggttgttaggaagattgagaacattaacgtgtataactgtttaacaccgtctggcacagaagttctcaaaacatgttagctgcccttgctatgttcccaacccccacctaccccatcccccatttgttaacccatttctgtatttagaagcacttagcaaagagtctgtggttagaactggggcttcaattaagggtcttatcacactgcccacatgaccaaaatggaaatcaaggacaaaccaaggggagaaatattacaaaagcaaaatgggaaaatggcaaacagatccttttcaattagctgctgcatttatctcttcccccaaaagagaatcttctgctgcttctgcttcttcatctgcacaacggggatgtagccatcatacatgcctgcaaggctgtagtgagatcctggacatgaaagcattctgaaaactgaaaagtacaatgcacctg

SEQ ID NO: 28620 - DNA, 2300 bp, Homo sapien
tactcaggtctctgatcaggctgtgtcctccttgctgccaaattctggagaattccagctgagaagctttacgtcactcattccttccatactcactggcattccctgtgtgaggcactgaggggacagaggtaactacagtatggttgccacactgccctctcacctcccttcctgtgtctcctgcaggaggaacacctgaggccagtacagaatggagtgtggaggctgagatctccctaggctgataaaaagacagggaggcaaggcagcccaggagggggaacacagggctggatgagcacgggaagcctggctttgccactgtctgcaccttgacatgggcacttcctcccctgaggcaaggagactgcttgcccttgtagtgaggaccaaagccagcaacagtatgaaagcctcacgagagctgtgatgggcccttgtgcctgtgcaaggatactttgttccctgattaggggatcagccccagatgggccactgtgcacctctcataggggagggtgtggtaagccttcctggcctcccacccactaacccaacatgtgttcagctgtccttgctcagtttacgtcacttccccctcaaacgggtatgtgtttgtgtattgtgaaggcgggtttttttttggcttttttgggggacagagtctcgctctgttgcccaggctggagtgcagtggtgcgatctcagctcactgcaacctccgcatcgcaggctcaagcaattcttctgcctcagccttccaagtagctgcaattacaggcgtgtgccaccacgtccagctaattttttctatttttagtagagatggggtttcactgtgtttgccaggctggtctcgaactcctgatcttaagtgatccgccggccttggcctcccaaagtgctgggattacaggtgtgagccactggcacccagccacattgtgaaggttttttaatgaaaataaattcaaatcagttcatctaaaaaaaatttcattacctctgttgaatgtttggaaacacacagtgtggctgtgctgctgacattgttatgttgcactgtgcgcctctgagtcctatacaacaacctgcaattgtgacagctctgggtgtgacagaaatgggtgccatgttcccagctaccctgtgaggtagacaggaacacacagccagtatatcacagagcctggcatcccatcctgtgatcaggcctgtctgatcacaaagttcacctcgcttctcccctggttcctctcttactttgatcgtgctggagagagcaggaaaaagtttggttttggggctccatcaacaatagtgtctgtttctgcccaccctagggaagcttcctgcaggatccgcctgttccgatgtacacatggcgttgtgtgccgtgaacctggctgaatgtgcagaggagaagatcccaccgagcacactggttgagatccatctgactgctgccatggggctcaagacccggtgtggaggcaagctgggcttcctggccgtgagtacccttcggttcccttctgtaaacctcccctgagcacttacctagccaggagttaagatgcagaagcagttatgaacccccttccccatcaggtgctgcccacctggaggggtaggcaggcattcattcagtcgctcatttcaccaggactcccagcaaccgataaaacagaccaaaattcctccccttgtggccttaataccataagccttgtaggcaggacattttggtcccctgaggtaatatgaggtaatatgaagattggttcagcaatagcagagctactgtacttgggggttaatatgcaacttttctgttcttcaagtggtcataaaaattcttagaatcccctggttatgtctcatggttctttcatttactcagaaggtatttattgggcatcttgtattgatcacagcactgtgaatccagaaataaaagccagtgcctttgccaagctacagagttaaagaaaagaaaaatgaaatgaataaaagtaaaagaaaacctgtgcctgtctacaaggagctcaggtcagacgagggcagggattgtggctatcaagcacctcccatatgcctagctaggagccaggcttgggaactctcaaatgggtaattcccggtccttgttatcagctagctcacaacatgctgacctcaggctttctcttactctagcagaaacaggtatgttttactttgtgtcccactatggatagactgctgaatacatcaggtatgttcaagcattaccacatctctatttgtttccgtat

SEQ ID NO: 28621 - DNA, 2300 bp, Homo sapien
ccgctgcatcatcccctgccctgggccacctgccctggacgtgggccacagtgccagagagagggacccttgcaggtacagctcagaatctccctcctacccagacacccccaggttctgtactgccccgggactggtgccctgcccatccgcagcccggatgctccctcctccctcccagcatcccctgtggcagtggccatgcctgcccccagagcagctcaggctcccctttcatctctccaagccttagcccctgcagccctccgcctggagtgtttgcctccccctcgctgctgctcagggtctccctctgcccccaggctccctccccagcccctgagtttctcctctcactgtgcttccccagccctgagtgcttaggggtctgggtggcatgtgtggcatttaaccccatgctctctgctgagccctgagctcccagagttccctccagccctggccctggggagggggtagcatgtgaccaggagggcggaggggcttgtgtgtgtttctgagacgcagtctgagagagacacgggtgacagacagttggggaccccaaacactggggagcagagatagacaggaggggcccgcagtgagacacagaggtgagcaggagaggacacatagccctggagaaaaggagcaggtgtgggcgggcttccctccactgcagtcacagttccctcactcataggcagatcttcctgggtcctccctgcacaaagccccagtggctccctcgtgtcccccagccacagtccaagctccctaatgtgctagataaggccccagtccagcctttcggtcccagcactccctggacttcctgtttgggcctccaagcctttgctcccctttggccttcacccccatctgctccctagacctcagtccatctggcaaacacttcaccatcgccctctccatgaagccttccggcccaccttccaggatgacgtgagctggtgcccttgctgcgaggctgtcttcccccatcagcacaagtgtgagattccctcagggcagacccacatgctacttgggcctggtacaagtgtctgatgtcaggctgggcactgtggcttcacacctataatcccagcactttgggaggccgaggagggcggatcacctgaggtcaggagttcgagaccagcctggccaaatggtgaaaccccacctctactaaaaatacaaaaattagccgggcatggtggtgcatgcctgtaatcccagttactcgggaggctgaggcaggagaatcgcttgaatctgggaggcagaggttgcagtgagccgagattgcaccactgcacagagccagactctttttcaaaaaaaaaaaaaaaaaaagcaggtgtctgatatccccaaccagctctgtccaggaagggcaggaagagaggaggagacaggtgggttgggggagatggcaggggagcactcggggtcatggagaggctttggctagacggagcagaggaaccactcagggtctgtgtcctggctgcggggtccatccccctccctacccaagaggaggctctggtctgcccccagacacctcccagcacccagcagagggcccacccaggcggtgctggttgaggggctgaattggggaaccacaggtagaaagagaggccaggccgggtgcggtggctcacgcctgtaatcctagcactttgggaggccgaggcaggtggatcacgaggtcaggagttcaaaaccagtctgaccaagatggtgaaaccccgtctctactaaaaatacaaaaattagccgggcgtggcagtgggcgcctacaatctcagctactcgggaggctgaggcagagaattgtttgaacccgggaggcagagcttgcagtgagccgagatagcgccattgcactccagcctgggcgacagagcgagactccgtctcaaaaaaaaaaaaagaaaagaaaggggggccccaggcgagctcggtcccacccagcaggcgggggcggggcagggcagagtgctccccccgccccccgcttcctccccgagggccccggagcccagctcagcctcagtccccgcagcttgtgcggcggcgtcggcaccatgaggcgagggccccggagcctgcggggcagggacgcgccagcccccacgccctgcgtcccggccgagtgcttcgacctgctggtccgccactgcgtggcctgcgggctcctgcgcacgccgcggccgaaaccgggtaagggggacccacggggcgcgcggcgccggcagctgcggggagaacggggccccgat

SEQ ID NO: 28622 - DNA, 2300 bp, Homo sapien
ttttttttgagatggagtctcacatgtcacccaggctggagtgcagtggtgcgatctcagctcactgcaacctccgcctcccaggttcaagtgattctcctgcctcagcctcccgagtaggtggtattacaggcgcccgccaccgccaccatacctggctaatttgtttgtttgttttttgtttttgtgatggagtttcgctcttgttgcccaggccagagtacactggcataatctcagctcactgcaacctctgcctcccaagttcaagcgattctcctaccacagcctcccaagtagctgggattacaggcatgcaccaccacgcccagctaattttgtatttttagtagtacagacagggtttctccatgctggtcaggctggtctcaaactcctgatgtcaggtgatccgcccgcctcggcctcccaaaatgctgggattacatgcgtgaaccaccatgcccaccctgctcagctaatttaaaaatttttttgtagagatgaggtctcactatattgcctaggctggcctcaaactcccggcctcaagtgattcacccgcctcggtctcccaaagtgctgggttataggcatgagccacggcgttcagcttactttattttcttgtcatagtgcctactactgcttgactttcaggaagtcctctccacaccccatgccatgaggaatgaaagccgtatctgtgctgagggcagtggctctatggggccatttacgtcctgatctttctgagcaagacacagttagtttagtctgcagtaagaaggatttaggctagacagtgtctctgctctcccagttattacaacaatgaacacactgttatcattgtctatcccacccccatcaaactaagttaatcaataatgtctgattcaactgacttcctagggtagggcattgggtctgggcataggaaatgatgaatgaatgactgctgagaatgaatggatgaatgtaatccatccattcactcaacaaatatttattaactacgatgtaccagggacttttagagtgctggacatacaaagtgacaaagtctctaacctcttgtttcttacattttagatgtagagacagtgaacaagttattatataactgttggcagaaccagtttgctatgggccctgagcgtccctgcatgttcttgctgggtatgtcaagaaagcaagaccctgacagctctgtactcaggctgtgtttgcagcaaggaaccttgaaagatgaggtaaagtctcccattggacaaagaacagcatgcttaccactcactgtaaaagcagtcaattggcagggcctgctggtgtgcagcggtagtcccagctactcaggaggctgaagcaggagggctgcttgaggccaggagtttacgacccacctgggcaacatggccagatccccatggtggcacttgcctgtagttccagctactcaggaggctaagccaggaagatgacttgagcccaggagtttgaagctgtagtgagctatgatcgtgtcactatagtccagcctgggcaacaaagtgacgctccaaaaaaaaaaaaaaaaaaagggccaggcacggtggctcacgtctgtaatctcagcactcactttgggaggccgaggcgggatcacttgaggccaggagtttgagaccggcctgggcaacttggagaaaccccgtctctactaaaaataaaaaaataagtcgggcgtggtgacgcgcgcccgtagtcccagctccttgggaggctgaggcaggagaatcgcttaaactcgggaggcagaagttgcagtgagccgagattgcgcgcattgcactccagcctgggccacaaagcgagactctgtctcaaaaaaaaaaaaaaaaagtactgtgtatgagcatgaatgaatgaaagtgaacaaaggaatcactaaaaacctgcttactgtggagcgtggaaccaaaggcctgtccaccacgtgttccacgggtagcgctggaacgcccctcagaaaaggagataaaggttcggttcctttaagaggccccgtcccgtcccgcgaagccccgcctataaggaggcacgtgcccccaggccgcgctctaggggctggactcagggcggtttgaaagatcggcgcgcaccgcaggagcaacggttggtcctgcggctgtgatgtcggtgttgaggcccctggacaagctgcccggcctgaacacggccaccatcttggtaggtgcaggcggccctgcttcccccgccggtttttcctcctgggcggtgcttcagccactaggtca

SEQ ID NO: 28623 - DNA, 2300 bp, Homo sapien
attgaaccgaagcaacctccactttatctctgttatgtattgagcttcccataagcttttgtatgaataaggaatcagtggctaaaacaatgccgacaggccatggatcacatactttacagatttattgaggcataagggacacgtataatcaactacacttatttcaagggtacaatttgataagtttgacatatgtatatacttaagaagccaccatcaccattaagagcctgaacataccttcaccccaaaaagtttactcctgcccctttgtgattcttcccccaactcctctgctctcccaccccaaaatgttaaaaagcactttggccaggtggtggctcacgcctgtaatcccagtactttgggaggctgaggcaggaggatagcttgaggccagaagttcaagaccggcttgggcaatatggcaaaatcttgtctctacaaaaagtacaaaaatcagctgggcatagtggcatgcatttgtggtccaagctactcgggaggctgaggtgggaggatcacctgagcccaggaggcagaggttgcagtgagccatgatcacaccactgtgctccagcctgagtgaaagagcaagaccttgtcttaaaaaacaaagcaaaaggccaggcgcagtggctcacgcctgtaatcccagcactttgggaggccgaggtgggcagatcatgaggtcagtagatcgagaccatcctggccaatatcgtaaacccgcctctactaaaatacaaaaaattagccgggcatggtggtgcccacctgtagtcccagctcctcggaaggctgaggcaggggaatcgcttgaacccgggaggtagaggttgcagtgagccgagattgcgccactgcactccagcctggcgaacacagcgagactccgtctcaaaaaaaacaaaccctctgtgaactcacagtcaccccccagtcccacatatgctggaaaggacctgtcatacctgaagagcccctagatggcgcagaggtgtctgtggtgggggacctaggtcctgaagccacctcacccagaggctttccccctgcccatccccaggtttctgggaacggattccctagggaggtggttcctggaagccttttcccagccacgccccgtgggccctagggggctgctctctccctcctgagaatagccctcaacacgtggcagataccttgtctatggcatagggggagggggaggatccatgcttgggaaggtggaccccacccccaacgtcagctcttggctttgaattccagctcagtcactgagaagctgagggctctgggagaaggagaaggccagcagcatcacctctctgcctcatcccaaaatggggtctcaacaccaatccagctgggaggactgcaggaagtgatgttggggccagctggaagatgggagtgctcaatgcctgtgctggctgtacaccagccaggggtgctgtggggtagatgaggcagaatggggagggggagccatttgcaagggtcctgaaagccaggctagggctctgaccctggcattgctactttcttgctgtgtgaccatgaataagaattaattgagttaatataatcaaagcgttgaaaacagtgtctggtgcataggaaatgttacattgagccaatgtgtctgaactctcagactcagtcttggtttttccttgtataacatatgacccccttgagctctactggtcactgattctctgtccccacccgcttgccatttaccccagcatctccctgctccccaaatggcagaccatcaaaccttagagttatcagccacggtcctctcctctctaggcccaccaggcttggggtcctgcagcctgctgggtgattccccctccccgcactcccccaatcctgccgctctgtcatctgctgtaccacgtgcacagtaccagggatccagaagagaaggctggttgccagggcaacggaagataaagcccttgctctgccaggctgctgattggctgagacaggtcccacctcctgccatcctgagagtgggggctagggggaagggtctctgatgggcagggagagataccagggtgctgagccagtccaggactgccccctcctggcccactcagagcccctgggtgtgagaagctcgtctcccgtgggttgcattggctctgccctatctctgcctccagcacccagggcggccgcagatggcagtgtctctggggacagcagctgcgaatgagtccacgggccaatgctgagctgctcaggctgaggcggtgtgctcagca

SEQ ID NO: 28624 - DNA, 2300 bp, Homo sapien
ccccgtctctactaaaaaatacaaaaaattagccaggtgtgtaggctgagacagagaattgcttgaacccgggaggcggaggttgcagtgagctgagattgcgtcactgcactccagcctgagcgacagagcgagactctgtctcaaaaagaaaaaaaaaaaaaaaaaaaaaaaaaaaagcaagcctcctacctcctacgtgaaaatactgactagcgctttaggaagttgtgatttgtctaataggtagtctctgcagcctcctctggatgtgagataatgacctcactcgagactttccaaatccatttacgctcagccttttaggaaggtatctgttgcttaaaagttgtcttacctgaatgtctctttcttggtcccccacccccagccctttaatcctgaaaggtaagttggagccttgtatatatggaagtcctacacagaactctaaaatagggcaacacaagggctggacattcatttggtcttagaaagcctgtgacatgcctaaagtcacaccaaagctggctggtggcagtaagctgattggaatccagattgttaaaatctctactttgggcagcctcattcccaacatttcaagggctcagagtttttgggtctggaaaggtgcctagaaggcatccagtctaatgccttaattgagtcgttagattgtcagacccctttccctccaccccacacactcagtctgggcacctcacctaaattctggtcttcacttctccctacgagatctcagctctccctccatctgcagcccagccctgtctcctgaagtgcagatgtgggcagccagcagcctgctaggcttatctacccggatgtctcccgggcatgtccagaggtagcccttttcttcttgaactgactcctgcctccctgatctcactctctcagctgtaggcattgcctaccttttattaggtgcctagaaacccgggtatcctcttcttcctcatctctctcttgccatctcatccagtctacttcccaccttgttggtttacctcctcagtactcaactatctggctggctgtcccctcctctccatccttctgcccctgtgaggccacctcccacccaccagcttgttccctgtccacacacaactgctgcaacgactcccacattgaatggcagcactttcggcttaatattcgtcagtgactcaccattaccttccattaaaatccagcttccaaggctgcgtgcggacttctccagcctcttatttagctctacacacctgtctggaattttctctgcttcagcgacaccaaggactctgggctgtccaccagcaccacgcagctctcacctctggagaccctcacctctgctgtcctctctttgcagaatacctctccctttccattcttcccttccactcccatttgcctttccatctggccctcatctcctccaagaagtcttccaagccccctctccccagggtgcccacctgcctgcaccctcagttccctgtgtgcaccccggcccctgcattaggacattccatcttcctgtctcctccactagacccagaaccttcgaggggagggatggttgtcctcacccctgtgaggcaatatgctgtccattagtatccactgaatgcgtgaaatttttttctaatgggcaaactgaggctcagagaagttcctgtctggctcaaggttattggttcatcattctggagcagggcctggaacccgggcccctgactcggctctacaggcacccgcgcaacaccccagcccccgcgtgactcacgcgcgctcacggccgcccgcagctgccactggtcccctgcgcccctccgcccgtccccgccgcagcccagtgggtaaggggcggggagcaggtccagcggggagagacgggactgggatgcaggcacctttccgggcctggcacctggagcccgcgggggcggctcctggaccgcccgcagcgtggacccgggaccagttcccgcttgcgggcgcgggcgccgcgggaaggggaggggccctcggcggggccgacgggcgcgcggtcacgtggtgcgggtggcagcggcggcggctggcggcggcggcaacggtgcgcgcggacaggggcggcgcggcgccgagcgagccgaggcgaggtcccggggagggcgcggcggcgcggggcgcaggggcggcgcggcggggccgcgggccgggcgggtgggaggagagcgcgaaggggcgaggcccgtttgcaggggccgctcggcccggggaagcccgcgccccgctcagcc

SEQ ID NO: 28625 - DNA, 2300 bp, Homo sapien
cacctgtcaggacagaacagcagcagcgctacagcccagaggttatacatttcaacagaacagggatccttggctactgtagaagcagtcctgtatggagaccttggaccagcaggggaagatctatgggcatgggaggtgggcgttggaaaggctgagtaggaatggtgcctggcacccctgaaccatgatctgagcctccctggagaaggtattttatatgtctgctgccagctgctggtctccacaccctcaaccgttctcaacccccctgcagggagaaggcctcctgggcactgtccttccacctgtgccagccaccccctgccccactgctgaatgaaggccatttcaagcgctgcttctcactccattcctctcagctgttattgctgcagggccaagccctttttagtgctgtgctcgtccagctcaccaccacagcccctctcagccctcagtaggtgggaggggccagctgcctctttaggccagttgcatcctccatttatccaaaccactcctctcctcccagtggagtggggttctgccagtacagccctactgcatcatctgcgtcagccggtcctagcccatctgcagggtgaaagaactcatcaagagctccttctgcccttgtaagcccatcccagctacttgtaaccatctctaagggcaatggcattgctccctacccattcatctgcatgagctactcttggcttccttaaagggtcaagaaagcaatttttctgcttactagattcattgagatcagctgtgtgagccccaaagtgggacaagggtgtctccttcattacttaaagatattcatgagggtgggtcactacagatgttggggagcaagggctaggatcactttttaaaaaatcaccacttgtggctgtcccagagtgcggttgtacatcctccccacctcataacgcagccactgaggaagagtggttttcctaagaagacattgctggagttgactttcttctgtccaaacaaacaaacaaaaactaaacacacacacaaacccccagaaacccacaatatgtacacgctaaggaaaaactagcacccttctgtccactcagcaataagagggatctcttcccacctaccctacctactcctacccccaacccccttccccattaatgtgagtaatgaattagcctgaccacaggtggtcactgtaggctaatggaaaatacccaagggagggcaaagccccccatcagatgcatgaatgtttgcgaatgttgactgccactgccccacacactgtgtctttatagaattcccctttgcccaccctcttcctgtctccacctggacacaacttgctcaaaggctggtgacttgtgggccattcatctacaaccaagtcctgatggagcaagaggcccacgcctaggggatgcaagaacaacccgtttcttaaatgttaccagtcccagccaatcttacggtgacattacagttaaatttcccaattgaaaacaagcaaacagacactcaaactggtcctgtaattgttgctagactttatgtgttgtacaactaaacattgctgtttgaacagtaactgcctggcctgtcttatttgtgctccttgaccaaatcagccattatgtcatctcacccatgtgtggagggtgagactctcttggtaagaaatagccacagatattagagatgaaaacactttgtgaggtcagttcatcttcagttggcgtcaggtcgggcctcagtcattattttctagtgtttcataaccaaagtgagtaatggatgggaggttgaggtgggaagatggcttgagcatgggaggttggaggtgcagtgagctgagatcattcctgacaggaccaacccaagtccatacctaaaggcagggggctaagggggcaggtgaggtcgggaggccactcacctatcactcaccccttcgcgctcgagccaattctcagggcccgcctctttctcccctttctcggcgggggcctctaccctgactccgccccgctccccgggcactgccccaccacgtgacccggtctcgctcctcctcctcctcctccttacgtcataatctccgccctccccttcagaaccgcgccccacagctcggcgcaggtcccgcccctttccatctacggggcggcaggaggcccgaagcaagatggcggtgaatcagagccacaccgagaaccgccgcggagccctcatccctaacggtgaaaggtgcctgaggggaagcacggcgtgctgtcggaggagaggagacg

SEQ ID NO: 28626 - DNA, 2300 bp, Homo sapien
ggagcctgctgccactatccaggcgagatgtcacaaacgcggcaagagcggggagggagaggcagccagaattagaatggctgttgaaggtagagaacacaggatttgctgaggagttggatgtggggagtgagggaaagagcaggcaggactgcacagttttggcttgagcacctaggagagttgtcattatctgagatgtggaaagtggccggtgcttggtctgggttatgtttgagacacccagtggccatctgagtgaaggtgctgttggggctcagaaagcgatgcctaaaaatatggcacttgggcatgctgagtactttgaaccaaaggacactggaagagcctcagaagcaaagtatctctctgaccttctcctgccccccttctttctcctgtttttctcctgcaaggcaggccatagaaactaaaaatcctcctccctaaggtgagttatagcaactacaaatattggctgggcacagtggctcatgcctgtaatcccagcactttgggaggctgaggtgggcggatcacgaggtcaagagatcaagaccatcctggccaacatggtgaaaccccatctctactaaaaatacaaaaattagctgggcatggtggcgtgcgcctgtagtcccaactacttgggaggctgaggcaggagaatcgcttgaacctgggcggcggaggttgcagtgagcagagatcgcgccactgcactccagcctggtgacagagggagactctgtctcaaaagaaaaaaaaaaagaaaaaaaagtaactacaaatattactggaaacatcccccacctttctgtgtcgggcctggccataaaggaattctctgatctaccttgcctgatactaggtcataagactctcattccagaaggggtcctgccctcctcccagcaggagggaatgccacacagagagaacaagaagaatccgaatctgaacagacattgctgggtttccacactcagctattaacattaaatcattcccttttgtctaatcgcgtttatacacagttgtccattccttattcctttttttttttttctgttgcccgggctggagtacagtgacacaatcacagctcactgcaacctcgacctcctggactcaagcaatcctcccacctcagcctcccgagtagctgggaccacaggcacctgcctggctttttaattttttgtagagacagggtctcactatgttgcccagactgtccttaaatgtctggcctcaagcgatccccctgcctcagccttccaaagtgctgggattacaggcatgagccaccagacccggccagggctgtccattcttcatcaaaccgagacataaaaataaagatttccctgagtatttgtgtcttcattcctgaaggctctcaagtcacataaaacattgagtaaatcaatctattatgcttttctcttgctaacctatattttatttgtaggagtgtccgctgtgacctttgggatgagtaagggaaaatatcacacctttctgcccctacaatgcccagaacaaagcatttggcacttagcagtttctcaataaatacttgatgaatgaatgaagaaggaagtagcccagtctgtgcgagtagtccctgagcgtcaggcggggaaggagagccggctgcctttgcgggagctgtgaccgcctgctttggtgcctcccacgcaccctccttgtagagacgattaatcccagacttccattttcctagcagctcactaggcgggccttgcttcagagcagtctctcatttcctctgcacaaagccctcaaccgtcctctgcacggccgcttactgagcgcccacggtgagcctggcacgatccttgccctcttggtccccacagaggtggaaggacaggcctcgcggggtccgggccacgaaggacagccccgagtccgttctgccaatgcctgcctcgctagcacgcagggcgggagcccagtggggaagggcttagggaggctgggaggccggacccatatgggcggggcacagcgttgctaggggggattctgataggttgcgcgaagggttgccttcgtgaggccccgccctcactggaacgcttcggacttatcaggttaccggattcgagtcagaagcggcggcaggtctgaacgcttcggtaggataagtgcggtgggagggggctctgcggttttggggagcccagggcgggaacccggacccggctggaagtccggagcctggccgcagccccgcccctccgctctttcttggtgaccttaagccagtg

SEQ ID NO: 28627 - DNA, 2300 bp, Homo sapien
ttttttttctttttttttttcttttgagacagagtctccctctgtcaccaggctggagtgcagtggcgcgatctctgctcactgcaacctccgccgcccaggttcaagcgattctcctgcctcagcctcccaagtagttgggactacaggcgcacgccaccatgcccagctaatttttgtatttttagtagagatggggtttcaccatgttggccaggatggtcttgatctcttgacctcgtgatccgcccacctcagcctcccaaagtgctgggattacaggcatgagccactgtgcccagccaatatttgtagttgctataactcaccttagggaggaggatttttagtttctatggcctgccttgcaggagaaaaacaggagaaagaaggggggcaggagaaggtcagagagatactttgcttctgaggctcttccagtgtcctttggttcaaagtactcagcatgcccaagtgccatatttttaggcatcgctttctgagccccaacagcaccttcactcagatggccactgggtgtctcaaacataacccagaccaagcaccggccactttccacatctcagataatgacaactctcctaggtgctcaagccaaaactgtgcagtcctgcctgctctttccctcactccccacatccaactcctcagcaaatcctgtgttctctaccttcaacagccattctaattctggctgcctctccctccccgctcttgccgcgtttgtgacatctcgcctggatagtggcagcaggctcctcactggtctccagcctccactgacattgattctcaccacagaagccagagtatgccttgaaatcgctcaggtccctcctcacagccctgtctagagtaacagccctcccagatttacagagccccatcccaccccttctacccccacctcctactgtctgcccctccccaggcctcccagcctcactggccttcttgcaggtcctcaagcacaacaggcctgagggccactgcgctgactgttccctctgcctggaattggcatggctggctccctcatttccttcaagtatttgtccaatgttactttctcagtgaggcctaccctgaccactctatttgcaattgcaacctccctactcccacaatttcccatctcccttaccctcctctgtttttccatgccacttattatcttctaacacatttattatggtgtacagtattaactgaataaaatttagtaggggagacaggcaataaacaagaaaataaaagcatgagcataggaaagtttactctagcagtgagtgctctgatggaaataacaccccagggatgggacagagactgcagggcaggttgctttacaatggtcccagaggagaccactgagcagagactcaaatctgtgtccagaggcgtcctgaggagtggagctgcggttgggggtgggaaggaaggccattctaggctgcaggaactgcaagggcaaaggctctgaggcgggagccaggttcatgggcagatgtttgaggacacctccggcttccagggccttccagaagttccagtctcttgggtttggttgtgcattcctgcgaccttcaccgcaggcctcctcctccacccactagtgcagagcctgggggctgccggtgggtttcaggccagggaagcagaaatgggtaatttccagaggcagaaatcagccgaccccggtggcccggtgggtggccaacaaagcttggctggccctcgcgggctgtgtaggagcccaccctagggaggtacccagagacatccctggtttggctctgccgggaaagtgggccgagcagggagagggggaccagagaggaagagatggacagagttttccggacggtgggctgggtccgaggcccgcggaccgtccgaggggggcctctgggttcgaggccgcccgcaccgaccagtgctgtggctcgggcagttcaccgccctctcgggcctcagtttcccgccctggcagacctcgaggcggcctcggagatcccgggcctggcgaatactgggcggggaggggcgttaactccagcctcccgggcggggtctcccggctcccgcggccacgttgcagcccaggcggaggcgcgggatctcgagctgggatcgccctcttgggcttcggtgcgatcggcggcgggaggtgagagtgggcccggcgggctccgggaggaggtggccccagggaaggtgtggccgcggggaagtggcggcgaacagccccgacgcgaggacggggaaaccaaggcggc

SEQ ID NO: 28628 - DNA, 2300 bp, Homo sapien
tggccgcagaagggccggcggcccaggaggcctgggtgaaggtgctgtcccgggcaagctttggctacatgcgcctggtggtacgcgagttggagagccagttgcaggacgcacgccagagcctggctttgcaacgccgctcatcctggaagtctgttgccagccgctgtaagccccaggctcctaaccaccgagctgcgggcctggagaatggccactgcctctccaaggacagcagccctgtgggcttggttgaagaagcgggcagcaggtctgcagggtgggggttggctgagtgggagctgcagggccctgccagcctcctcctaggcaaggggcagagccctgtgtcccctgagacctcctgcttctctaccctgcatgactggtatggccaggagatcgtggagctgcggcagtgttggcagaagagggcccaggggagccactcaaaatgtgaggaacaggataggccctaagtctgggccctttgagtcaggaaaccagggccagttctttttcaggagttaaatgtttacccatttccaaggttgcgttttgggaggggacatgggttctctccttcctgctatttaggcattctccaggttcgagatccacccgtgtgtctggaagggactgcgggaccattccttccatcctctttatttcctgaggtccagagaaggaaggagacttagcagccacagagcaagaccccaatctcctgactgcactggcctgactgccccctcccaggggatgttaatgaaatgaaggaagtggggaatgtcacccgagactgtcacaggcttgccatacctttggcctacacaccgggctctagagccataatttccaacctggggagtctcctgtgcacttaaatccgaggtaggctgcagtatcggcttgaagctctgacactgtcagagaaagtggatttattgtgtcataggagtttctgggacccagctcttcctgagaggggtgggaagattggggatgggatcctcactcagcagtctgggtagggccctttgaggcagagggtcttcggccagtgaagagagatttattctgctcagagtgctggggtcccatcctttctccctggctgccctgttaacagatggtgctggaccttgccccggaaggggcttgtagcttttttacgtcaacgaaatgccctcctgtactctgtcttcagcagccaactcctggagctgccaagtgaggggttaaagaagaggtggggaggcagtgtggctccctgggaaaagtctgttgctttggttctcagtcctgggtattctaggagcttggacacgggattgcgtttcctgtgctaaaattctctctcctggctgggctccggtaaactgaagctgctcgagaaatcacctgggaactctcatagccgtttgtcacccagggtgtacttgccaggacctctccttgctactcttcccaaagtcgggaggcaaagcggctgggtcaccagagcctgaccatactgacgctccagggggaagacgcagaggccgggaagagacaccccctcccaaacacataaaacttgccccttcctagcctcggctcccctcactggggccttgggcaggaccgacccgcatccaactaggcctaaggggtaggctctgagcctcttacccctaagaggcggagatgcgcccaaggcgggcgcccggcctgttccccagccctgcctggaagccccgcagccactgcattttgtttaaacacagatagcacgggcctttctcttattgctacagtgttttgtacacggttaaaacactagtaaagctttttcgttattactccttccgctccctgggtttatttccacaaccggccgctgaggcctgttctgacggccgggcggacccaagaccgcggccacgcccagcaggacgcggactgagggagccggggctgcgccgccactctcgtgacgccaccatgccggccagtgacaaacacctccctcccgccgccccaggagccgccggcactgcgcgagtgggagggctgggcttctcgtgtactcctcaaactctcgcgaggcttcgggcggctttcttcccgagggcggcacgagggctgggcggtggggtgcgggtgcccgggtgaggggcggagctgggggcatggcgtccggagcggctcgctggctagtattggcacccgtcaggtccggggctctccggagcgggcctagcttgaggaaagatggcgatgtctccgccgcatggagcggctcaggccggagcctg

SEQ ID NO: 28629 - DNA, 2300 bp, Homo sapien
ctattacttattccccttccttgatttgattcctcagctggagtcctgatgatggataccataaaacccgtgtggcacaggtttgagtaactggccagctacagatcactgatcttccccatagggatgcatactccttgaccccttcttttctctcctcttcccttgctttctaggctcctgtagccctctgccttcttttcctcctctcaagacccttctgactttgggactttcttcccaaaacagaatttgagggaaggtcttgggaggggtcggtttagaaagagctggatcctcagagtcaggatacctgggttctgtcttctacttggccactgatttacccttcacaagccaccctttttgaatgtggtcctccttcccccagcaccttcctcctgcaaccagagagggttctgggtactcctagaagtattctgccaggcaaacattatgttttcaaactgctgaatttgaatgcaccaccccgaaacacacacacacacacacacacacacactgctacagtcactccccacacacatcttttatctgcctgcccctgaaggcatctgaatttgcagtccctgaaccagcagatcactcaagtttctccttctctagtatcgcgtgggtttaagttctggtcagtagcaatttttccaaaagtcagcttgaagacagggactctgtggagcagacacagttctcatatgtcaaagaaccgggttctgcttggaagctgctgctaaggaaagccctataaataacaaaaataacaacaaaaacaacggcagcagctaatatttaatgagttaaatatgcatcaagtcctgttctaagcactctagatattttaacttaatacagtaaccttctgaagaaggaattattattcccattttaaagatgaagaaactgaggaatagatgaaataactggcccaaggtcacacagctagttgagggcagcgcctgaagaaaagtccgtgctcctaaccaccacattctaccgccttttcacacacacaagcagggactcgacagccctgaggagtggcaccgtgctccagctcactcaaaaacacctctttctcgcactttgggaggccgagacgggcggatcacgaggtcaggagatcgagaccattctggctaacacggtgaaatcccgtctctactaaaaatacaaaaaaaaatggccggcgtggtggcgggcgcctgtaatcccagctattcgggaggctgaggctgaggcaggagaatgacgtgaatccgggaggcggagcttgcagtgagccgagatcgcaccactgcactccagcctgagcgacacagcgagactctgtcacaaacaaaaaaatccaacgggcatctataattacactctgcaactctagactttgggttctgggtacaacagtggctcggcctgggccctgggcacatcacttcacctctcggtgcctccgctgcctcacccacaaagtgagtgtgtcactgacagtcatcgtcctcccgccaattgcgaaggacaaaagagaccaaagctccgatagcacgtacgaatgctaggcacggccggtctgaccaccgcgccgccgccaggtccggcccatggtaggctcgggtgaccctcttcccctgaagcacccgcagtcgcctctgcccaagttggtgacctcagctgggcccatgagaaaccccggccgggccggctacgaccttgagcggcggcctccgggtccccacgtaagccgctacctctcaccagtgttcggcacctcccgataccaggcgcggtagagctcgcgcaccctccgcttggcctcgttcatgtcccgactgaaaatgggcttcacgaaggtgctggcggtagaagtagcttggcggacgccgctccccgccatcttgccaaagcatccactccacaaccccacccctttgcaagcagcgcgtgcggaccgcgggcgaatgtcttttcccattggctaaggaggaacgccccgcctgtatgctgggtgggcgggaggatgactctgaggctctcggattggctgggaagcctctctctggctgagcgaacggtgggtgctgcgcatgctcatctacagaaacgccgcttggcctttggactacaccatctgtcgctcgctctaacgagccggcgttgccgccaggggacgctcgggccgcaggaggtcgctgggtcgtgagctggcgccggggacgccgagcgactgcggggtttccctcagcgtcctgctatccggctgcccgccgcgctccttggtagtg

SEQ ID NO: 28630 - DNA, 2300 bp, Homo sapien
gatacaagtcccttatggaacatgtgatttgcaaaaattttctcccagtttgtgggttgtttagaggtcttttttttcttttccttttgagacagggtctcactctgtcgcccagactggagtccagcggcgcaatcttggctcaccgcaacctccacctcgcgggctcaagcgatcctcctgcctcagcctcccgagtagctgagattacaggtgcccaccaccatgccggctaatttttgtatttttagtagagacgggggtttcaccatgttggccaggctggtctcgaactcctgacatcaggtgatacacctgccttggcctcccaaagtgttgggattacaggagtgagccactgcgccccattttttttttgaatgttgaacacaatgaatttatcatgatagtgggtacttctgaaggaggcaggggtatacacaaggttagaatcatacaggtagatatcatggtataggtgctgcgagagtcagaaaactgactctggcaccagctgcctgggcttcaaccccaatgctgtaaagtaacttagtctctttgtgcctcagttttctcatctataaaatgagtatatcagccgggggcagtggctcacacctgtaatcccagcactttgggaggctgaggtgggtggatcacctgaagtcaggagtttgagaccagcctggccaacatagcaaaaccccgtctctactaaaatacaagcattagccatgcatggtggtgcgcacctgtaatcccagcgattcggaaagctgaggcaggagaatggcttgaacatgagaggcggaggttgcagtgagccgagattgcaccattgcagtccagcctaggtgagtctcactctgtctcaaaaaaaaaaaaaaaaaagggtatatcaacacaatctcactggtgtgttgtgaagcctagccaagttaatgtacctagagaactagagaacagtggctactaaggacatctaaggacactttatacaaaccttaactgtgttacaacttcttaagtcagtactgaggttcaaaagcttccattttattattatgctttataatttatatatgttacgtgctttcttttgtatagctcacttgaatatatatatacattttagaagataataaggaagaaaaaaagtatatctggttttttaacccttcgaaatgggaaagtttggagtagatgctcagccccggcccctggcccttccccaatactcacaggctcctgtcaactacaccttcagaaaaagacggagcctcttaggcagcagtcaggcaggtgggggcgatctgtcaggtgacctagactctgggccatctcagtttcctcacctgtaaaatggggatgctgaggtacctacctgacctatgagagcggagaacactgagatatcttgcccatggcctgccctgtggttagctgtcgttttttccttgacacttgtaggctcctcttcatgtttacataacctcagtgggaaaacgccagcgaagagagacactcagaatggacgatctaaagttccttccagcttccaaattctgggctggttttcagagatccagggctcgggatgcgaatgtccctgtctacgatggggctgccgttacagccttcctcccggggctctggagacgcgccagctctttgacacctctcctgcgctaaggaagagttggtttacagaaaagtaagtatatcctggccctgcagaaagccgccaggcggcaggacaagccccaccgcagcccaggcgccattatctgcctcagcagttacctcggggtcccgccacgaggaggttcttcaaggcctgcgcgcccacggacactaccaaggagcgcggcgggcagccggatagcaggacgctgagggaaaccccgcagtcgctcggcgtccccggcgccagctcacgacccagcgacctcctgcggcccgagcgtcccctggcggcaacgccggctcgttagagcgagcgacagatggtgtagtccaaaggccaagcggcgtttctgtagatgagcatgcgcagcacccaccgttcgctcagccagagagaggcttcccagccaatccgagagcctcagagtcatcctcccgcccacccagcatacaggcggggcgttcctccttagccaatgggaaaagacattcgcccgcggtccgcacgcgctgcttgcaaaggggtggggttgtggagtggatgctttggcaagatggcggggagcggcgtccgccaagctacttctaccgccagcaccttcgtgaagcccatt

SEQ ID NO: 28631 - DNA, 2300 bp, Homo sapien
ctcgggaggatcagcctcaacctatccatgcagcagggcctccacctgtccctctccgtagtcccacacctggaacccagagccatctgcctcttcccagatcatggccgacagcactccaccggactgctgctggagcaggcacaggattcacttattgagggctgtggcctggcacagatcatagcctatacccagggacagttgtgtcacttctgccaccaccacatccgccttctgcagccacatcaagtaccactcatggatgagcccgtcacccccagcggacttatcaaccccgcgtccagctccacagccgccacgtgctcggtgagcactggctccaagcatggcagctgccatacaatccacctgtagagggcccggtcctcctgtcctcagtggatgatcccatagaagtccagagctcggcagctgccctcccacaaaagacaggattttgaaagcagcaagagagaagagacgtatcaggtagtcacagtggctcaggcctgtaatcccagcactttgggaggcccaggtgggaggatcgcttcaccccaggaattcaagaccagcctggacaacttggaagaaccgggtctctacaaaaaatacaaaattagctgggattgggtgcggtggctcatgcctataatcccagcactttgggagcctgaggtgggtggatcacctgaagtcaggagttcaagactagcctggccaacatggtgaaaccctatctctactgaaaatacaaaaagctagacgtggtggcacacacctgtaatcccagctacttaggaggctgaggcaggagaattgcttgaagcctagaggtgaaggttgtagtgagccgagattgcatcattgcacaatggaggggagccaccagcctgggcaacaagaggaaatctccgtctccaaaaaaaaaaaaaaaaaaaaaaaaaaaggattaggctgggtggtgcctgtagtcccagctacttgggaggcagggggtccacttgatgtcgagactgcagtgagccatgatcctgccactgcactccggcctgggcaacagagtgagaccctgtctaaagaaaaaaaaaataaagcaacatatcctgaacaaaggatcctccataacgttcccaccagatttctaatcagaaacatggaggccagaaagcagtggaggaggacgaccctcaggcagcccgggaggatgttgtcacaggctggggcaagggccttccggctaccaactgggagctctgggaacagccctgttgcaaacaagaagccatagcccggccagagcccaggaatgtgggctgggctgggagcagcctctggacaggagtggtcccatccaggaaacctccggcatggctgggaagtggggtacttggtgccgggtctgtatgtgtgtgtgactggtgtgtgtgagagagaatgtgtgctctaagtgtcagtgtgagtctgtgtatgtgtgaatattgtctttgtgtgggtgattttctgcatgtgtaatcgtgtccctgcaagtgtgaacaagtggacaagtgtctgggagtggacaagagatctgtgcaccatcaggtgtgtgcatagcgtctgtgcatgtcaagagtgcaaggtgaagtgaagggaccaggcccatgatgccactcatcatcaggagctctaaggccccaggtaagtgccagtgacagataagggtgctgaaggtcactctggagtgggcaggtgggggtagggaaagggcaaggccatgttctggaggaggggttgtgactacattagggtgtatgagcctagctgggaggtggatggccgggtccactgaaaccctggttatcccagaaggctttgcaggcttcaggagcttggagtggggagagggggtgacttctccgaccaggcccctccaccggcctaccctgggtaagggcctggagcaggaagcaggggcaagaacctctggagcagcccatacccgccctggcctgactctgccactggcagcacagtcaacacagcaggttcactcacagcagagggcaaaggccatcatcagctccctttataagggaagggtcacgcgctcggtgtgctgagagtgtcctgcctggtcctctgtgcctggtggggtgggggtgccaggtgtgtccagaggagcccatttggtagtgaggcaggtatggggctagaagcactggtgcccctggccgtgatagtggccatcttcctgctcctggtggacctgatgcaccggcgccaacgctgggctgcacgctacccaccaggccccc

SEQ ID NO: 28632 - DNA, 2300 bp, Homo sapien
tttaacaaattatgagacatggaaaggaaaccgaaaggacgacccagacacgggaaaagtcaccaatgggaccagcccgatgctgcaattgctagacaaagacgttcagtcagctcatttaaatatgttcaaagacctaaaacatgctgcatctgaggctgcaccggctggaacctgctgatctcggaagctaagcatggtcaggcctggctagtacttcaaagggagaaaccacgtgtaggcctggtgcagtggctcacacctataatcctagcactctgggaagctgaggcccgtggattgcttgagcccaggagtttgagagcagcttgggaaatgtggtgagacccccatctctacaaaaaatttaaaaaattagctggctgcctatggtcccagcctctcaggatgctgaggtaggaggatcacttcagcccaggaagttgaggctgcagtgagccatgactgcatcactgcactccagcttgggcgacagagagaccctctcccaagaaaaagaaaagaaccatgtcaaaagaactaacgaaagtgtgggaacaatgtctcaccaattagagaatatcaataatgggatgaaccttataaaaaggggctgggcatggtggctcatgcctataatcccagcactttgggaggctgaggcgggcatatcatgaggtcaagagattgagaccagcctggccaacatggtgaaaccccgtctctacttaaaatacaaaaattagccgggcgtggtggcacgtgcctgtaatcccagctactcgggaggctgaggcaggagaatcgcttgaacccgagaggcagagattgcagtgagccgagattgcaccactgcactacagcctgggtgacagagcgatactccaaaaaacaaaacaaaacaaaaaacaaaaaaaaagttgaaaaaggaaccaaataaaaattctggagttgtagggtaaaataaatgaaaattcatcccaggggcccaagagcagattggaacaattggaagaaagagcctgtgactatggagagaggccacctgaggtagtcccctctgaggaacaggaacaagcatgaagagcaatgcacagagatccagagacctggagacgccgtcaagctttccgacatacacgcaatgggagtcccaggaaagaagacagggagaaaggagtaaaggaatagttgaagaattaatggctgaaaaacctcccaaatctgatgaaaaatattaatctgtacatccaaaaagctcatcaaactccaagtagggtaaactcaaagagatcttcagccatacgcatcatcataatcactgtcaaaagacagatttttctttttttagaattttaaatgtaccttttaatttgctcctggggcaaagagccaggactggtactagagcagtgtctgggatgagaagaatttaataaaatgggattaggtccaatggttgggttaggggaggcaacctgctcgggaggatcagcctcaacctatccatgcagcagggcctccacctgtccctctccgtagtcccacacctggaacccagagccatctgcctcttcccagatcatggccgacagcactccaccggactgctgctggagcaggcacaggattcacttattgagggctgtggcctggcacagatcatagcctatacccagggacagttgtgtcacttctgccaccaccacatccgccttctgcagccacatcaagtaccactcatggatgagcccgtcacccccagcggacttatcaaccccgcgtccagctccacagccgccacgtgctcggtgagcactggctccaagcatggcagctgccatacaatccacctgtagagggcccggtcctcctgtcctcagtggatgatcccatagaagtccagagctcggcagctgccctcccacaaaagacaggattttgaaagcagcaagagagaagagacgtatcaggtagtcacagtggctcaggcctgtaatcccagcactttgggaggcccaggtgggaggatcgcttcaccccaggaattcaagaccagcctggacaacttggaagaaccgggtctctacaaaaaatacaaaattagctgggattgggtgcggtggctcatgcctataatcccagcactttgggagcctgaggtgggtggatcacctgaagtcaggagttcaagactagcctggccaacatggtgaaaccctatctctactgaaaatacaaaaagctagacgtggtggcacacacctgtaatcccagctacttaggaggctgaggcagga

SEQ ID NO: 28633 - DNA, 2300 bp, Homo sapien
tgcctcagcctcctgggtagcaggcgcccaccaccatgcccagctaaattttttgtatttttagtagagatggggtttcaccatgttggccaggcttgtctcgaactcctgccctcaggtgatccacccacctcagccttacaaagtgctgggattacctgcgtgagccaccgggtccggcctctttatgtcttactgtactgtctgtcttgaaaagtacttattatttttgattggttcatcatttagtctaattaaaataagagtagtttacacaccacaattacagtattataatactctgtttttctgtgtgcttactattaccagtgagttttgtacctttagatgatttcttcttgctcattaatatccttttttttttcagattgaaaaactccctttagcatttcttgtgggatataggtctggtgttgatgaaatctcgcagcttttgtttgtctgggaaggtctttatttctccttcctgttggaaggatatttttgccagatacgttattctaggctaaaagttttttttccttcagcactttaaatatgtcatgccactcccccctggcctgtaaggtttccactggaaaggtggctgccccatgtcatgtattggagctctactgcatgttatttgtttcttttctcttgctgcttttaggatcctttctttatccttgacctttcggagtttaattatcagatgccttgaggtcgtcttctttgggttaaatctgcttggtgttctataaacttcttgtacaaaaaatcagccaggcatggtggtgggcacctgtaatcccagctacttgggaggctgaggcaggagaatcgcttgaaccctggaggtggaggttgcagtgagccgagatcgcatcattgcactcccacctgggcgacagagcaaaactccgtctcaaaaaaaaaattatttgggctcggtggtgcctgtagtcccagctacttgggaggcaggaggtccacttgatgttgagattgcagtgagccatgatcctgccactgcactccggcccgggcaacagagtgagaccctgtctaaagaaaaaataaaaataaaaaagcaacatatcctaaataaaggatcctccataatgtttccaccagatttctaatcagaaacatggaggccaggaagcagtggagaatgacgaccctcaggcagccctggaggatgctgtcacaggctggggcaagggccttcaggctaccaactgggagctctgggaacagccctgttgcaaacaggaagtcatggcccggccagagcccagaatgtgggctgagctgggatccacgtgacagctttgaggctcaccgggagcagcctctggacaggagaggtcccatccaggaaacctcgggcatggctgggaagtggggtacttggtgccgggtctgtatgtgtgtgtgactggtgtgtgtgagagagaatgtgtgccctgagtgtcagtgtgagtctgtgtatgtgtgaatattgtctttgtgtgggtgattttctgcatgtgtaatcgtgtccctgcaagtgtgaacaagtggacaagtgtctgggagtggacaagagatctgtgcaccatcaggtgtgtgcatagcgtctgtgcatgtcaagagtgcaaggtgaagtgaagggaccaggcccatgatgccactcatcatcaggagctctaaggccccaggtaagtgccagtgacagataagggtgctgaaggtcactctggagtgggcaggtgggggtagggaaagggcaaggtcatgttctggaggaggggttgtgactacattagggtgtatgagcctagctgggaggtggatggccgggtccactgagaccctggttatcccagaagcctgtgtgggcttggggagcttggagtggggagagggggtgacttctccgaccaggcctttctaccaccctaccctgggtaagggcctggagcaggaagcagcggcaaggacctctggagcagcccatacctgccctggcctgactctgccactggcagcacagtcaacacagcaggttcactcacagcagagggcgaaggccatcatcagctccctttataagggaagggtcacgcgctcggtgtgctgagagtgtcctgcctggtcctctgtgcctggtggggtgggggtgccaggtgtgtccagaggagcccagttggtagtgaggcagccatggggctagaagcactggtgcccctggccatgatagtggccatcttcctgctcctggtggacctgatgcaccggcaccaacgctgggc

SEQ ID NO: 28634 - DNA, 2300 bp, Homo sapien
cagtcagtttctgccctttaaggagtttacattttagtcagaggagagacagacagtaaacaagtagcatatatgtgtctgtttggagtaagtatggggccaggcaggggataaaacaggggagggagttacagccagggaaaaggtgtggagctggctgtttttactagaatgaccagggaatgagtgacacttgcccaaagactggaaggagagcaagctatctggctctgggagaagaacgtgcaggtgagaacagagttcctatgtagatatgtggtaggcctgttccaggaacaaggcaactgtggggctagagcagagagtgataggggaggagctcagagaggtcaagggggtgggagcaggggcctttgagaccagtttcccaaagaatgaggtgggagccactccagggattggagaggataaatctgacttacctttaaaaaggttgttgactttcctgcaggcaactccattttcagctccccttcaggggaactaggaaactagcttcataaaccattgtaactaaactaaactgtctattacacctcactttaccctatatgtattttggaacttgtttttttaagtaattggttctaaagtcacttggagcaatttggccttgtccctttcatctctgactctgaggagacaggcccaggtgaaaggggaaaaaatcagcttgattgattaagagggattataataggtaatacaaagtggtggctcagtcagataactttgaaagagtctgggtcctaggcttgatgaattcctattttcctctctgttttttgctgtcctccaagatgattgcttctaattctttcatagtaatggccagtaataactgtgaatttaaaaaactggcaaatacaaataccacatggcgggtaaaggtgctggaacttcttggaaacctcccaaaataatctggaagaatagtcactgctattcactggcttaagtctagccctttgtacctgggaattgaaggagagtggtggagagaggggtgctgtagacacagtcatatgccaagaagaggttgactccaaagtttgtgtggaacccatatgggctgagtgtcctggagtcaccagtcatcacaggtagttggcaattatagtaaagctgcaaaaatttgcacttggacataaggaattggctgcagttctctggccaggtctgtttctcagtgttggggagtggcgatcagcagccagtgttaaaacccgcagttcagtgatcaccctaatacatgaaagcagagaaatgaaagtagtggcttatgcctgtagtcccaaaactttgagaggccgaggcaggaggatcatttgaagccaggtgtttgatgctgcagtgaactacgactgtgcccctgcacactccagcctgggcaagagtgagaccttgtctcaaaaaaaaaaaaaaaaaaaaaaaaaaaaggatttggtttttcttaccccacaccccctcccccgcataactgggaggcttattgaaaaattgctgtttttcattgacagtaataacacagccccatattttaatctggttgagtttgggggctcatttgtctaataaggcattattagatatatgagacatacatgtttttgctgtattgggtttgtatgcactcagagtgctgcttttcattctactacagattcttgcctcactctttaggccatttctctgcatatgtgcattttcagaagtggataggataaaatataaaagatgaaattcaaggtcaggcgtggtggctcatgcctgtaattccagcactttgggaggccgaggtgggcggatcacgaggtcaggagttcgagaccagcctggccagcacagtgaaaccctgtctctactaaaaatacaaaaaattagccgagcctggtggccatgcgcctgtagtcccagctactcgggaggctgaggcaagagaattgcttgaaccctgcaggcagaagttgcattgagctgagatcgtgcaattgcactccagcctgggtgacagagtgagactcttgtctcaaaaaaccaaaaaaaaaaaatagaaattcaaaccagtcagcttcatctgggcctctgattcatctttattccctccatcatctagacttgattttatttgtaccaaggagatgcgtgtctaatgtttttctttcttctatttctaggagggctgttggcctgctgctgtgctgctgaacagtatgcagtcctttcgggagcaaagcagttaccacggaaaccagcaaagctacccacaggaggtacac

SEQ ID NO: 28635 - DNA, 2300 bp, Homo sapien
atagtgccactgcactccagcctggcaacagagagagactctgtctcaaaaaaacaaacaaaaaagtgtttacttgtgtgataggcctgatggtaacatacaagaaaattactaccaaactgtctccgaagtcaataattataagcactctgcccctatgctgggatccttttggaaactgttcaaagagactgaatcaaaaagtgatctagcccaggcgcagtggttcacacctgtaatcccagcactttgggaagtcaaggcaggcggatcacctgaggtcaggagttcaagaccagcctggctaacatggcgaaatgttgtctctacttaaaatacaaaaattagccgggtgtggtagtgtatgcctctaatcccagctactcgggaggctgacgcaggagaatcacctgaaactgggaggtagaggctgcagtgagctgagatcgtgccactgcactccagcctggacaacagaacaacactgtgtcaaaataaataagtaaataaaaggggatttaattttaaaaattaaataatatataaaaataaaaagtgatctgagaaagacatattgtaacatattgggctcatatccggcccagcagcacagttctagaaatttaagacaaattctgaggttggtatagaaatacttaccagtcaaaagcacagcctaaggccttcacacaccataaaatcagtgaaactaattgcggttcttcagcatctgcggagcactggctaccagtaaggagaaagttggggatgcagataatcagtgcaccctgaggtgacagttaattccactagcataccatttcacaggagatgttatggcattctacttcatccccctactctgagaatgctgaaactggctggaaatttcaacagttagccaaatgtcaaatgtcctttgaagaactttaataaaatctggatcctccaaaatcccctgcgtagaaagatcttggaactcctctgagccaacatacacagacccaatcacatgttatccacacattttccaagtagacaaatattctctgaaacattttctgataacttctttcacaaagacaaaaaatatgttaaggtgcattccacctaggtcagaataatacactttctgatctgaagcacagaacagcaagtgggatttcaaaaaagagcgtaccctgaccaacttttatgctctgttgaaggcagaggctggaagcttaaagacaggcttttaaaagccagctaaggtacagtctgcatttctcagaaaagttgcctatggctaaaacagagcacaaaatgagagataaaaaagcaaaaccacaaacccctgtaccgtctgacccgggagtcctcacttaacagatgagaaaattaccagggaaagtaacttgccctgggctgcagtttatttggcgtcaaagctgtaagcagattcctggtctcccaggtcggaattcagtgtagcttccccatccacctaactgccaccccacggaagatgctgtataaaactcttcactcttcactgaggctgttaacataagggtccaattatcattcaaagatcagcctgttagataatagctcgaaaattccatccattttacagcagttaccagagacatctaatcttcgaggaaaaaaaagcaaaaaggaaaagggggaaatcctaattttgacctgacccctaaggtcaaactaaaggattgaatacagaccagcagaccgtattggtatccgcaaccacaaaaacagacaataatcccacccacaagcagaggaagacggccgctcctcggcaccgccccccaactcactaaattccactcccattccggcgtccagaggacagtgcacctcccgccgtagcctgagagggatcggcccgattggccacgctccttcaaaccaccactttcccccgaaaaagggacgaaagcctcaggtccccaaacgagcgctccctcgcccagagaccccggcttgcacaccccgccctgttccccgcggcgcgggaggagaggccgccccacacaggaagtgtgtcctgcgccgggaccttgcgcccaacccgccggtacctgccctccgcccccaacaggcgagaagcagccgcgtccacatggcttcaggtgttcacatggcagtaaacgggcccctgctctcctgggcgccccagcgcggcgccctcccgcccacatcccggcccagccccgctggcctcgcctccagcccgtagccaagaggcgagcgcggccggtgcccccggggctgccaggggccccgaagca

SEQ ID NO: 28636 - DNA, 2300 bp, Homo sapien
atctggctgcctatgggagacaggctctcagcatttttctagttgattaacccttctctgcccaactccgggagaagcttctacaccttcctttgtcagaggaagccctctcccccatcccatctcatacatcatctctcaatcaaaaggacctacttgggggggcatcccaaggaccccctctccatcagagaacagcagccgggaagtcagtctgcttcacggtgctccccatgacttccacaggaaaatccaccccaaatgccccaaactgtcagagtgggcaatgcagcatggtttgagcagagtgcttccaacttcccctgtgatgggggtgcagaggggggttcaggggatggattcccaggaagggaaagagcccagcaggttaccaggaatttaacatggaagcagaggctgtgtcattcatactgccaagcacagtgctgggtatagcatgttcaagcatgttcatttaaatgacactttttttttttgagacagagtttcgctcttatcacccaggctggagtgccagtggcatgacctcagctcactacaacctctgcctcctgggttcaagtgattctcctgccccagcctcccgagtagctgggattacaggtgcccaccagcatgctcagctaatttttgtattttttagtagagatggggtttcatgatgttggccaggctggtctcgaactcctgacctcaggtgatccacccacctcggcttcccaaagtgctgggattacaggcgtgagccactgtgcccggccgaagtaagtttttttgtttttgtttttgttttgttttgagatggagtctcactctgtcacccaggctggaatgcagtggtgccatctcggcttactgcaagctccgcctcccgggttcacgccattctcttgcctcagcttcccgagtagctagctgggactacaggtgcccaccaccacgccaggctaattttttgtatttttagtagagacgggtttttttttttttctgtcacccaggctggagtgcaagtggtacaatcataacactgcagcttccaactcctgggctcaagtgatcctcccacctcagcctcccaagtagctgggagtacaggtgcacaccaccatgcccagaaaacttcttaattttttttttgtagagacggggtttcgccatgttgcccaggctggtttcgaactcctgggcgcaagcgcttctcccaccctggcctcccaaagtgctagaattataggcgtgagccacaggacctggcagtaataacccatcttctaacctatcttgtgctctaacacaacactcttgatagacgggaaactgagctctgacactgcacagggcatcactgtgtagaggatccgagatccagtaatgtaagcatgtcccagcatcagctcagccattcatccccacgtgaccgaatttcgctgcacctcggtttcctcatcctcgggagagaatagtaatatctcctagggatgttgccaacattaaagatagctctaaacacctgtatgcatattttccacgaattcattcaactaaccgttttgagcacgtactgtgtgctaggccctggggagacagtggtgagcagcacgaaccccatgtccctatctccaggtgctgtttggtagagaaggacaaggaaatgcaggtagcgttatgatagggaccacggaagcagagaggaaaaggccgcagagttcaggaaggtccgaaagagcagcggccaccgccggagcgaaaaggcaaagaatgaaatccacaaacccccacccctacggccttagtcccttctttgtctcagccaatcagacgtcagcagtgctggccgaccgaccaatcaagagctggaacaggagccctagtctcaggcccggtttccgcggggagggcggccggaaccagcgcgccccgcccctgccccgaccacgccccgcccgccccggtccggcccctccccagaccacgccccgctgcagccagcttcgcccgcccagagccccgtggccagcggccggccgcggggcctttttgtcctgagggccagagaaagggagaagggggtggggggacagccacgtggccgcaggaggatttacaacattttctttcgccatcgatgttatcgcaaaatgtgtgagagaagcggctgcgcagcccggacgggagcgtgagggtgcgggccaggtaagcagccccggcggtttcgccgcatacgggactgcggggcgaccgcgggcaccagccacgcgcagcggctccgcggggtc

SEQ ID NO: 28637 - DNA, 2300 bp, Homo sapien
cccgtaccttgttccagagcagcagggccgtgcccactacactcaggacactcaggaggccggtgaagccaaagagcaggagcttctgtggactctgcgggggctctcggtaccctgcgtctaggaggaagcgcaggggagcagaggggtcagtgacccaggagaaagcggggcacacacacctgatgttctccctcactcaggaccctgttttcaatgctaccccgccaacacgctccacaccccactaggccccctgggagccagggttcgggccttcattgtcccctcactccttttcatgctcactgccttgcttctctgtaaggacaggggccatttgctcttccggtgcccctgcccccgtgacctggctcccctgtgggctgcttgtagggccctgagcgagatgtctcccctctcggggcctcttcttttccctgtgtgaggtggtgataatacgggtggatgtggctagggctgaaggaggcggatttatcctgggactgacagggggctgcacccaggctaggtgaggcccagccctcctaccccatgccatccccagtccctcctgctggcatccagtcctccttcccctcaccccatccatccatccgactggcaaaaacacacggagtgccaaccacatgccaggcacatgagcatgatttccccagcactgcctattgtcagccaccagcccatatgggcaccatctccttcaacctcatccaagtccttggaaggcagaggatcgccatgaagaccaggcccaagatcacatcgggcaagcagcaggacagaggttcaaacccaggtctatgggattccgaagcccccagctccttccaggggatcgcagaggtaggtcagagaatcagggctttggtgatgggctcactcataacttttgggatcatcactcctttgagaatgtgatgaaaactggctgggtgtgctggctcatgcctgtaatcccaacactcttggaggctgaggtgggcggatcacttgaggtcaggattcgagaccagcctggccaacatggcgaaatcttgtctctattaaaaatacaaaaagtagccaggtgtggtggtggacatctgtaatcccaggtacttgggaggctgaggcatgagaatcgcttgaacccaggaggcagagattgcagtgagccaagattgggccagtgcacttcagcctgggtgacagagcgagactctgtctcaaaaaaaaaaaaaaagagagagcatgatgaaaactaaagatctgtctctggaaaggtgtattatacatgagccaagtgctcacatacacgaggcccccacaaatacatacatgcacatacctagttctgcagaagttcccccaccatgatgcccatggcacactgagaccaagggcccaagggagctcttttaggtcacctgccagcggcgttcaggagcagatctgcatgcccggccctgccctttccacacccagatggagccctggcacagccgtaggccggggctccctgaagtgggtctgcctgctttgccaatgctggtagacaaggcaaaccattctctatttcttttcttttcttttttttttttttttttttttgagatggagttttgctcttgtcacccaggctggagtgcaatggtgcgatctaggctcactgcaacttcccatcctgggttcaagaaattcttatgcctcagcctcctgagtagctgggattacaggcacctgccaccatgcccagctaatttttgtgtttttagtagagacggggtttcaccatgttggccaggctggtctcgaatccctgacctcaggtgatccacccgcctcagcctcccaaagtgctgggatgtgtgagccactgcgcctggccccattctctatttccgatccaaagtcccaaactgccatttgaaacctctgtgtcctttgccctggaagagccacagaggaagccttacctctgaccaggatgaaggtgccgctgcctctcaccgtggagtgtggccagtggacagagcagtagtaggtgccagtggccgatgctcccggcagcacaagggtgacctggcagtccagggtgtggctctggttctctgtgcccagtccagggtggcagtttgttggcttcttagggctcctctgtccctggagatcttcatgaaagtagctgactgtgaaaaccttgaattggggagtgtatggataggtgatcctgcagctgaaggagatagctgtgttggccagggaggccatgatgggcaggccggtgtgggtcactg

SEQ ID NO: 28638 - DNA, 2300 bp, Homo sapien
gccaggctggtctcgaactccaggcctcaagcaatccacccgcctcggcctcccaaagtgctaggattacaggcatgagccaccctgcccagcctgggggtgtctctttagtggctcaacaggaagctcaaaatatcagcattgccagaattttgagggattaactgacgcacagggccaactccatctctgttcccgcatcttccagaaggctggcctccctttgggacccccttcccagagctctggctcagagctgaactgaagagacctgggaagagatgagcctggcctccctccagccccacaccacaggcagggcccacacctctctttccccaataaaataaatcttgcggctcctctgagcatctcaaagacacgatcttctcccgattaacaatccggcctgcatgttcttggctgctggctgccgacctcaatttagaactgtctgctgctcagctgctggagaaggaggggcctggagaacccaggagcgctaaagccgaggggcctgtgcagctgaagtctggggcagggggcggctgctgcccccagcccaggatccaaacagcatctcagaggcctgcagcaggggttagagccccccaggcagggctgctgctttgggaattttcaaactgttttctgaggtgcctctgatgagtggggggaggggtggctcctacaaaactggctttgtcatggtcattgacatcatgatcacagccgaaatggccccacgtggagcacctctgcgttgttggaaaaactgctctcaggatgttgcctgttatactgtaaaaaacctgacaaatcctctccgagcccagagtccgggagaggtttgtgtctcccgctgcctgaatgcctccttactttggcacggggagaactgtgggcagacctgcctccctctctgtctaccgccaggaaacgcttgggtttctttattttgttttcctgcctccttctttatttctcatccatcaccagctttctctcttctcaggcctgtgctttgatcccaggtggcctcttggcctttgggaagaagaggggttgggagcgcaggctctggtgttccccagccctggatggggttgtagctccactctctacctgctgaggaatctggagctaagtgcttcaactccctgaccctcagactcttcttcttcataaaacaggggctctcactttgccttggggtatattaggagaggtagagtggtgtgcgtaatatgcttggcacaactccggcacacagcaagtgcaggagaggtaggggctgcacctgcagaggtaagctcacacgatgcacgagacttgtctttcttttttttttttctgagacggactcttgctcttgtcgcccaggctagagtgcagtggcatgatctctgctcactgcaacctcagcctcccaggttcaagcgattctcctgcgtcagtctcccgagtagctgggattacaggcatacactaccacacctggctaatctttgtatttttaatagagacaggttttgccatgttggccaggctggtctcaaactcctgacctcaggtgatcggcccaccttagcctcccaaagtgctggggttatgggcataaaaaagttagcctggctaatttttgtatttttagtagagacggggtttcaccatgttggccaggctagtcttgaactcctgacctccagtgatccgcctgcctcggcctcccaaagtgttggaattacaggtgtgagccaccgcacccggtcgtgagccttaacaggcaagtgggtgggactgaggcagcctcaagtgacctgttgctctctccctttgcttcccctccaggaggacagtcagtgacccacaccggcctgcccatcatggcctccctggccaacacagctatctccttcagctgcaggatcacctatccatacactccccaattcaaggttttcacagtcagctactttcatgaagatctccagggacagaggagccctaagaagccaacaaactgccaccctggactgggcacagagaaccagagccacaccctggactgccaggtcacccttgtgctgccgggagcatcggccactggcacctactactgctctgtccactggccacactccacggtgagaggcagcggcaccttcatcctggtcagaggtaaggcttcctctgtggctcttccagggcaaaggacacagaggtttcaaatggcagtttgggactttggatcggaaatagagaatggggccaggcgcagtggctcacacatcccagca

SEQ ID NO: 28639 - DNA, 2300 bp, Homo sapien
tggctgcagagcgtctcagaaactgggcaatgagctgggaccctcagctgcttcttgtccagtcatgtctgcgctccacagcccagggcctgcctggggagtatgcacgcctcctcccaccctgcctcccagaggctaccccttcccttgaggcctcttgtgcaccagcgtggtgttgggcacctgccttcatatcaagcctggaggaaggcttctccctgccttatgctcacccatccgtccattcctgcaccccctgggccaggctcaagaaggagaggggaggaagacaggcagctcaggcaggcaagcgtggaaaccaggtgtgcagcaggctagacccagactcagaggcggcagaactcccgggagtccgaggtacagagttggggtgtggggggcaccgtgacaggctgagaggtagggtcagtgagctggcacaggggcaggagcggaggcggcaccagggctggaagagcaggctcccttgttccgaggcagtttggcattcagctgcctcccagtgccaagtcgtaatgagacttgtagaggcacagaccgatgcttttccaatgctccccgtgtaccctgaggcattgacacgaggtctatcaccatggcatcaaggtgcttagacaacctgctactcccaggagccaggaatagcgtgaagcagcgggtctgcatctcactgtgacatatgtgagcatgtatcactgtgatggatcaacagtcaataacactggggtccccgcctgccccctgcgcggtaggaaacttctcctgttcatatgtcttcctcccctggtgggcggcccctgctcttgccagcctcccagtgctcgtggcattggtggaaacgtctttaggctttcactgttcatgtttggagcagcccagggaaaagcatgtgtgcaaagaactgaaatggatctcatgatgccgtcaccgggggctgcagctggacacacctgagcaggcagtagcagggtgggagaaggctcggacatcataccactggcagttcaaatgcccgccccacagacctgccctgatcctaggcatgttgttttgcctcctggggccgaggtcttctcttttgtacaactgggatcatcacatttatctggtgagtgaagggacacctgcagagaagggaggtaagcgctcagcatgcgctgaaactcagccaccttcccgcctgcgtcttccatgtaccaggtgcctccagctccaccagccatcaccacaccccagcccctttcctctgccactccagacacgcaggcagatgtgtgggtgccaagggtgaggggctcccagtctgctggggaagggggtcccggcagcaaacaattcctgtccccggctgatgctgctagaagtgagagcaggggctgtgacctgcagccaatggggaagcagttcgagggtctcacagttgggaggccgagtgagctaagctttagggcagccacagggaggagctgacgttagagatggaccagagaggaggcgtctcctgggcctctgcaggggacccacagaggttctcgctgggtgaatgatgggcagcctgcctttcacctgccctgggtgtttggccctctctagggctgggaacatgaggctcctgcccttcaccccagcctccctaccacccctcaccaaaaaacctacctttggtaaacacattattaagggattctcagaatattttagagaagtttgtgtgaacatgcttgtggtcgttttaaaagtgtttcagaagtgagaggctaaaccaaggcccgaagtcactcatggaaatcccatgatccctctgcacagttaccagtgtctcctggacggggcccctgctggaaaggggccgagacagggtgaagcccaccaggggttggagtggggaggcttgggtcccgtctccagctcttcttctggttgtgtggcctggaccagtctcagtgccaggttcctcatctggcggccaccctgctgggctgttccagctttgcttctgagcggaaggtcaggggctgccagggaggagcttcgtggggaaagcaaaggggaagctgtcagcgccggccgtcccctcctgtgaactaaagagtcgccgcagacaagcaggcccccagatggagaaccagcctgtgaggtggcgggccctgccaggcctcccacgccctcctgggctccccgcagccccctggctcctccttggcgtgctgctgctgcccgggaccctgcgactggcaggtagtgtctgtcttcctccttctctctactctctcgctcca

SEQ ID NO: 28640 - DNA, 2300 bp, Homo sapien
ggggtaggttagtgagggatttagggtcatttgattatgaggtgagatggtcacatggggatgaagcaattctttaacataacatttgtatgtagaagtacagtacatttgtatgtagaagtatagtatacagagataagaatttacaacatagtgtgtgcgtcagtaatttctaacagagccttaaaacagaaacacagtctttccataacctatgattagcaagattttaatcagtagtaaaaactgcaacaaaagctggttacaaacaatccatggaaacaggaagctagacaaccggttagaccagaaattctcagaagggagtatgccttaaccctaaagaggcctagaagagccacggcaagatgagggcgtttatagccctatcttatccatatggacaggcaccccctatgcgtccatttataggctctccacaagggtcgcattccattcccagagctatgaacatctgctttgctgggatacgaatcttggtgatgtgaaacttccctgactgcaagtccattcataggctctctgcagggggaagcacatcacgtgctattggctcattctggcagtccaacctggcattgtctttacacaatcctgcatgcaattttgtatttacaataatcaggagcatttcatcttttattccatagcaatagtttcagggggtctccctacaatgaagttgcgccacatcggccaggctggtctcgaactcctgacctcaagccacccacctgccttggcctcccaaagtgctgagactacaagcctgagccaccgtccctggccaaaaaacaaaaaacaaaacacacacacacacacacacacacacacacacacacactttaaagatatgcccacaccattttctccccctatttatagctgtactttgtctatgttgttggcgaatgtaaccattacactccatcctctcctttttactcctcatcttctcttggttctccatgtaaatatatctttaatgttcacaccaggctaatgtcaatgtctttttagtctcgttggttgtctgaagcttattttctagtaattcctcaggaaaggctttgggaacaatattctctgggttcctgcacattggtgagaatctgctattttttttttctttttaactcactctgtcacccaggctggagtgcactgccgcgatctgggcccactgcaacctccatcccccaagttcgagcgattctcctgcctcagcctcctgagtagctgaaattgcaagcgtgcaccaccacgcccagctgtttttctattttcagtagagacgcagtttagccattttgaccaggctggtcttgaactcctgacctcaagtgatctgcctgctttggccttccaaagtgttggaattacaggcgtgagccactgcgtccggcctgacaatctgctatttttatacttaaaagttagtttgaccaggccgggttgggtggctcacacctgtaatcccagcattttgggaggccgaggcgggctcaccaccggatgttgagagttcgagaccagcctgaccaacatggagaaaccctgtctctactaaaaatacaaaattagtcgggcgtggtcgcgcgtgactataattacaggactgcccagtggtcgggaccctgctaggttccagccagtgggagcggatggggtagtgggaaggcggggcctggcgggtgagggcggggcctggcaggtggggcggaggccttccgggggtggagccggggccttcctggggtggagccagcggccctgggcacagggcccgccggggctctggcagggcggtgggaaggcggggccttctgaatgggggcggggacggctggagttgcggggactgctggagttgcggggcttgcctggggtggggcggggcggcctaggggtggggcggggcggcctaggggtggggccgcctaggggtggggccggcggccctcgggatgggtcctgccagggcgcagagatggcggtggaaaggcggggcgaaggcggggcgtgaggcgtggaggtgtggcctgactggggcggggcggggcggggcggaacagcctagaagcagggcctggaactgcaggatacactcccctcctgctacctaggcaggcgtgagggtgtgacggccgcgcattcgccagacgagagcgatggctgagaacgccgcaccaggtcgccttagactcaccaggtcgccttagacttagatgggacggggaggcctcgcgcgagcgccccattgcccacccacctggttg

SEQ ID NO: 28641 - DNA, 2300 bp, Homo sapien
gcatgtgtgcctggaagggccccagtggcaagtgtccagctcgctgcatcccagagacagaacatagctgtgtagtcagcgcccaggtggagacacagcagcacatcccagaacccccgctgcctccaccacagacaaccaccatcccaactgtcatagcatagggtcactactgctgattcaggtagtaaaacttgtcataggaaatcagaataacagcaagaatgtccccacctgtctccagtgagagagcaggaatatgccgggcacagtggctcacgcctgtaatcccagcattttgggaggccgaggcgggcggatcacctgaggtcaggagttcaagaccagcctggccaacgtggcagaaccctgtctcttctcaaaatacaaaaattagccacgtgtggtggtggtgggcgcttgtaatcccagctgctcgggagactgaggcatgagaatcacttgcaacccgaaggtggaggttgcaggactccagcctgggctacagagcaatactccaactcaaaaaaaaaaaagagcaggaatatcaacctccatattgtccctggggaacaggtcggaggccatggtgcccacagtctcccggcttgggcagatgtggctgtggctgagtccttcagcggcgctggacccctggcagcgccacccatggtgcagggaggctttgggatggccctgcggatgctcacacttggcttccctctccctgcggcaggagagcctgtcccgcctcctgtccacctgtggcctcgtccagtctgtagagttgcaggagaagccggacctggctgagagcccaaaggagtcaaggtcgaagttttttcatcccaagccagttccggtgagccgccaagcccggggttccactagagtgaggggggtggggcactgtccccagtgtgttgggggagctggcagtgggacatcagagcattctctggtcctgagcccatcctcaccgtgtgtggtgtaagagactgtctgggtgacaaagcctgcgattctttgccagatttgccacatccttgcacttcctgcctggctttttctgtcccgtgttaaagctcacggaccgtctctgctggccacctgcagggccttccccggctcccctcctgcttccccactgagggagctccttccccaggcttgggggccgggtctccaggagcactgttgttcacagctttcccagtggccctggagcccacacctcctccccacacagtggcatctggcatggtgtgtgcgcccaggcctggcttccaaaaacctgccctggcccagggcgacccctgtgtttcaccgcatccctcccgtgactggaagaaaagaagcctctgtatcccctcttcctggggaggagttgggaacagccgtcacttcccgcagaagcaggattactggaagtgtggctgcctctgacctggattatgggatggcctgtggttctcttcatggctcaggaatagcctagcaccatctcccctggtgtagctaccacctaggctgagggcaggcctggagaccttgtgccagacgtgggaaggagcccccaacctctgacatctctctctcttcagggtttccaggtagcctatgtggtgttccagaagccaagtggggtgtcagcggccttggccctgaagggccccctgctggtgtccacagagagccaccctgtgaagagtggcattcacagttagtactgcgggaggggtctggcgcctcctttctgggctccgggttggcaggacactctatggggacagtgtctgaatgtcacaagccaagtccatgctccctgagagcagcatgtggaggcctgggcaggaggaccatggggctgtgtctgggtccccagggagtcattagcctgagcccctggcacagagcggcacaggcatactgggcaggcagagcgagggcgcagcttgcagcccctgggatctccttagcacctgtgccccgggccctgtgggaaaaggtcccaatttgcctggcaggccctggggtggggcccaaatgccaggcctgaggaagccccgtttccctggctcccttttcctcagagtggatcagtgactacgcagactctgtgcccgaccctgaggccctgagggtggaagtggacacgttcatggaggcatatgaccagaagatcgctgaggtagaggccccgcggggtcggccgagccccgcatcgcccgtgtggctgtgggaaggtggcgccccagagggagggcagtggtggcctgtccttggccactctgtagagg

SEQ ID NO: 28642 - DNA, 2300 bp, Homo sapien
caatcaagttctctgaaaagcaacaggcttctcactacctctatgtgagagcacacggcgttcgacaaggcaccaagtccacctggcctcagaagaggactctttttgtcctcaatgtgcccccatactgcacagaggtgagctagtgtctgtctgggaggagacctgtgggctcaaggtgggggctcccatggcctccaccaagtccttggtggtgagacggacacagctaatgggagccccagaggagagtgtcaggagggctaccgtgatctccagtcaggaaactggctttttaaagatgtctttaaaagtataatcctgccaggcacggtggctcatgcctgtaatcccagcactttgggaggctgaggcgggcggatcacctgaagggaggagttccagaccagcctagccaacatggtgaaatcccgtctctactaaaaaataaaaaatgagccaggcatgatggcatgtgtgggtagtcctggctactagggaagctgaggcatgagaatcccttgaacccgggaggtgtaggttgcagtgagccaagatcgcgccactgcactccagcctgggcaacagagtgagactctgactcaaaaaaaagagaaaaaagtacaatcctaagtagcccaaggcatttttacatattacccaaagttgtctgaattacgtgttttcttccagattgtacatgtccataatttaaaagtaggaaagtataagaaaataaaaagtgcctctaattctatccaaacacaactgttaattttttttttttttttttttttttacaaaaactaagctaagggaattgctggatttatttatttatttatttatttaatttatttatttattttgagacagagtctccctctgttgctcaggctggagcacagcgttcacaactcactgcaacctccgcttcccgggttcaagtgattctcctgccgcagcctcccaagcagctggaattacaggcgcccaccaccatgcccggctcatttttgtattgttagtatagacaaggtttcaccatgttggccaggctggtctcgaactgctgacctgaagtaatccgcccccttcagcctcccaacgtgctgggattacatgcgtgagccaccgcccctggccaagggaattgctggatttgttttcaaaaaagaaaccctaatttgtaaaagattcctctaaacttagagaaaaaaagaagcatgtagaagagggggtgtgagttctgaccttttttgaagtgcagcatgtgtgcctggaagggccccagtggcaagtgtccagctcgctgcatcccagagacagaacatagctgtgtagtcagcgcccaggtggagacacagcagcacatcccagaacccccgctgcctccaccacagacaaccaccatcccaactgtcatagcatagggtcactactgctgattcaggtagtaaaacttgtcataggaaatcagaataacagcaagaatgtccccacctgtctccagtgagagagcaggaatatgccgggcacagtggctcacgcctgtaatcccagcattttgggaggccgaggcgggcggatcacctgaggtcaggagttcaagaccagcctggccaacgtggcagaaccctgtctcttctcaaaatacaaaaattagccacgtgtggtggtggtgggcgcttgtaatcccagctgctcgggagactgaggcatgagaatcacttgcaacccgaaggtggaggttgcaggactccagcctgggctacagagcaatactccaactcaaaaaaaaaaaagagcaggaatatcaacctccatattgtccctggggaacaggtcggaggccatggtgcccacagtctcccggcttgggcagatgtggctgtggctgagtccttcagcggcgctggacccctggcagcgccacccatggtgcagggaggctttgggatggccctgcggatgctcacacttggcttccctctccctgcggcaggagagcctgtcccgcctcctgtccacctgtggcctcgtccagtctgtagagttgcaggagaagccggacctggctgagagcccaaaggagtcaaggtcgaagttttttcatcccaagccagttccggtgagccgccaagcccggggttccactagagtgaggggggtggggcactgtccccagtgtgttgggggagctggcagtgggacatcagagcattctctggtcctgagcccatcctcaccgtgtgtggtgtaagagactgtctgggtgacaaagcctgcgattctttgcc

SEQ ID NO: 28643 - DNA, 2300 bp, Homo sapien
ctttaatgttgcttcctcaaagaggccatccgtgatggcctatggaaagaagacctctgccaccccatcaccctgtaatgtttctttcacaattgatacaagtttgctgtatgcttgttaattgtcttctccgttattgcaactgagcttcctgagttcagggaccgcagctctacgccaaccggtactgtgacggaggtgtgagaaaaatagaagcagttcctagctttatgaggattacagtcatgggtgtgccagcgattaaccaaagaatctcatcaatatagcctccagactgttaagagaagctgtgaaggcacaggcagtgggatctgagctggcaggaggggcggaggtgatgctaaggctctcctgaggaagcgaggtttgagctaaacctgaggtgagcgggagggaagagggtgacacgccaggtagagaggccagcatgtgtgaggccctggtgtacccgggggaacagagaatccaaggtgctgggggaagatggtacgagaagaggtcacagtgacaggcagggtctcacggggcttccagccatggttaggattttggcgttgactccaagagccgcagggttcgagcttccctctcattgcgcccccatctgtaatcattgcccatttatcttctctctccctgcaccgccttgggaggccctcctgggcagactcttagagcccgcacaggctttgccaaagagtagggtaaggggggttggtgaagggatggatggatcgatgaacagataggactagacagggatgtggagaaaggaagttgtgtgagtgtctcgctggcctcagctcagggtagcctggccatccctcccctcccatttcctttccagctattccaatcaagttctctgaaaagcaacaggcttctcactacctctatgtgagagcacacggcgttcgacaaggcaccaagtccacctggcctcagaagaggactctttttgtcctcaatgtgcccccatactgcacagaggtgagctagtgtctgtctgggaggagacctgtgggctcaaggtgggggctcccatggcctccaccaagtccttggtggtgagacggacacagctaatgggagccccagaggagagtgtcaggagggctaccgtgatctccagtcaggaaactggctttttaaagatgtctttaaaagtataatcctgccaggcacggtggctcatgcctgtaatcccagcactttgggaggctgaggcgggcggatcacctgaagggaggagttccagaccagcctagccaacatggtgaaatcccgtctctactaaaaaataaaaaatgagccaggcatgatggcatgtgtgggtagtcctggctactagggaagctgaggcatgagaatcccttgaacccgggaggtgtaggttgcagtgagccaagatcgcgccactgcactccagcctgggcaacagagtgagactctgactcaaaaaaaagagaaaaaagtacaatcctaagtagcccaaggcatttttacatattacccaaagttgtctgaattacgtgttttcttccagattgtacatgtccataatttaaaagtaggaaagtataagaaaataaaaagtgcctctaattctatccaaacacaactgttaattttttttttttttttttttttttacaaaaactaagctaagggaattgctggatttatttatttatttatttatttaatttatttatttattttgagacagagtctccctctgttgctcaggctggagcacagcgttcacaactcactgcaacctccgcttcccgggttcaagtgattctcctgccgcagcctcccaagcagctggaattacaggcgcccaccaccatgcccggctcatttttgtattgttagtatagacaaggtttcaccatgttggccaggctggtctcgaactgctgacctgaagtaatccgcccccttcagcctcccaacgtgctgggattacatgcgtgagccaccgcccctggccaagggaattgctggatttgttttcaaaaaagaaaccctaatttgtaaaagattcctctaaacttagagaaaaaaagaagcatgtagaagagggggtgtgagttctgaccttttttgaagtgcagcatgtgtgcctggaagggccccagtggcaagtgtccagctcgctgcatcccagagacagaacatagctgtgtagtcagcgcccaggtggagacacagcagcacatcccagaacccccgctgcctccaccacagacaaccaccatcccaactgtcat

SEQ ID NO: 28644 - DNA, 2300 bp, Homo sapien
ggcaggagaattgcttgaacccgggaggtggaggttgcagtaagctgagatggcagcactgcactccagcctgggtgtcagcagagtgagactccgtctcaaaaaaaaaaaaaaaaaaaaaaaaaaaaggcttatgcctgtaatcccagcactttgggaagccgaggtgggcggatcacaaggccaagagatcgagactatcctggccaatatggcgaagctctgtgtctatcaaaaataagaaatttagctggtcatggtggtgcacacctgtaatcccagctactcaggaggctgatgcaggagaattgcttgaacccaggaggcggaggttgcagtgagcggagatcgcgccactgcactccagcctggcgacacagcgagactccatctcaaaaaaaaaaaaaaaaaagtgatgttgtgtggccagtcctgatatccatcgagatggctccttgaagcgtggaagcaatacatgagagggagataacagaacgatggtggcagggcactgagaaggagccaaaggcctcggggagggggatgtgcaggcacagatttattatgcaacatctgagaagccagatgaccgtatttctggagggttcaccagagactgctttgactagtggggggtctaggcatcaatgggcaatcggcatggccgtcctctgaggccagggtagaagagggcaaataggactggagccgggctcggaaaggtcagcaggagataggattccagagagcagaggttcggttgatgtgactgtcagaacaggagcaaggccagagtggctgccagggatcctgggcgcacaggagtctctggtgaatgctagtagaccacggtattcccaggggccacggaagccccaacactgcttgactgcgctaagcaaagaaagatcaaaaacaaaaaacgagcgaacaggacagtaatggcagctgctgatggaaaatcccaacccctcatccagtttccaggcctaagctaggcctcagaaccagaggtcactgactgaaagggaggctgggtcccctccagaccacaaatatttgcagtagtaggctcctaatctttccccaaaggggccgacagcatttccaagaagcaactgtacactgggaaaagagaaatagtagatacatcaagggctggcgggtacacagtctgagaggccctttggagtccagaaaagtggagtccttggacttcatttctcccctatctacacttgctcccttggcgatcacaccctctcataactttctttttttttctctttcttttttttttgagacagagtctcgctctgttgcccaggctggattgcagtggggcgatcttggctaactgcaatctccgcctcctgggttcaagcgattctcctgcctcagcctcccgagtagctggaattacaggcatgcactaccacgcccggctactttttgtacctagtagacacggggtttcaccatgttggccaggctggtctggaactcctgacctcaagtgatccgcccccctcggcctcccaaattgctgggattacaggcatgaatcaccgcacccggctcctctcgtaactgtcaataacctatccatggccagtcccgtgtgtattgctccaggcctgacatctctgatgttcagtctgttcagtctcatatctaagtgcccacctgacatgtcccctgagtggcctaatgggcatctcaccacggctcacagagaactgatctactccattttcacccccaagcaggcccctctcctgcagtcttcccatctcagtcaatggcaacaccatcctcttagttgctcagactgaaaacctagcagccatcctggatttctctcacactgcctattcaacgtgtgaatgcatgagtggaaagctgagttcgcactcgtgactggccggggtcaactctgacattcgctcccactttcgcgcgctgatttatctctgagcggatgaaggttgggccatggcgggcggggccggggaggcgggcttggagtgagggggcggggcaggcgccacgaaaacgcgctcgcgccggcgccgaaccgcaactcccggcggcccccgcgctcccgggtggcaagatggtggcgcgcaggaggaagtgcgccgcgcgggacccggaggaccgtatccccagcccactgggctacgcaggtgaggggctccgggacgcgagaccgggggcggtcaggcatcgccgggaggtgtttgggggttggcgacggccgggggtccccaggagcggccgcacggttgggtgtgagc

SEQ ID NO: 28645 - DNA, 2300 bp, Homo sapien
agataagttcacgtgggtcacatgtccatgggacagggggcccttccccgcctggcacccaaggcagagagagaggagagagagacagcttacaccattatttctgcatatcagagacttttagtactttcactaatttgctactgctatctagagggcagagccaggtgtacagagtggaacatgaaagtgaaacaggagtgtgaccgctgaagcacagcatcacagggagacggttaggcctccggataactgtgggcaatcagtcaggccctccacaagaggtgtggagcagagtcttctctaaactaccccggggaaagggagactccctttcccggtctgctaagtagcaggtgtttctccttggcactgatgctaccgctagaccacggtccgcttggcaacgggcgtcttcccagacgctggcattaccgctagaccaaggagccctctggtggccctgtctgggcataacagaaggctcgcactcctgtcttccggtcacttctcgctatgtcccctcagctcctatccctgtatggcctgatttttcctaggttatgattgtagagtgaggattattataatattggaataaagagtaattgctacaaactaatgattaatgatattcatatataatcatatctatgatctatatctagtataactattcttattttatatattttattatactggtacggctcgtgccctcggtctcttgccttggcacctgggtggcttgccgcccacagactgagccctacttctggtaggaaaaatttgaatcttatcaaaatggatgccaaggcaacataaaattataagaaatcactatcagtacttggccaggcgtggtggctcacgcctataatcccagcactttgggaggccgaggcggagggatcacgaggtcaggagatcgagaccatcctggctaacacggtgaaactccgtctctactaaaaaaaatacaagaaaaattagccgggtgtggtggtgggtgcccgtagtcccagctactcgggaggctgaggcaggagaatggcgtgaatccgggaggcggaggtttaagtgagccgagatcgcgctacggcactccagcctgggctacaaagcgagactctgtttcaaaaaaaaaaaaaaaaaaaaaaaagagaattcactaccagtacttgttcttatttgtcctagacttgccactgtttcagactcaaagggtgcactttccctctttcattgtaggatttagtgcatgaatctgctcaccccaaacatcctcttcataacttggggttttcgatcctttccaggcagatattgtttataatccctcacctggagggttcctccacgtccccaatttatacattcatttgttcacctgtacaatttttttttttttgagacggactctcgctgtcgcccaggctggagtgcagtggtgcgatctcggctcactgctggctccgctcccccgggttcacgccattctccggcctcagcctccagagtagctgggactacaggcgcccaccacctcgcccggctaatttttcgtatttttagtagagacggggtttcaccatgttaaccaggatggtctcgatctcctgaccttgtgatccgcccaccttggcctcccaaaatgctgggattacaggcgtgagccaccgcgcccggcctgtacaacaattattaagactggcttgtgccaggctctgctgagaatcccaggacacggtggggacacggtggacgcaggctgtccgtcaagggggctagtaagccactaaacaaagggtagccttcagccctgcggcgcgggccagcgagcattcagaggcccaactcgctgtggttgctccccgggtctggtcccgcgcggacgtgggggcggccatcaggactgcccgggggttggcgccctgctgggttccaagccggtgggcgcggacagtgtggcgggaaggccgggcctggcgggtgggggcgcggcctggcggtgggggtggaccttcctggggtggagcccgcggctgtgggagcagggcccgccggggctcgggcagggcggtgggaaggcggggccttctgagtgggggcggggactgctggagttgcggggcctgcctggggtagggcggggcaggacagcttggagatagggcccggaattgcgggcgtcactctgctcctgcgacctagccaggcgtgagggagtgacagcagcgcattcgcgggacgagagcgatgagtgagaacgccgcaccaggtctgacggggaggccttg

SEQ ID NO: 28646 - DNA, 2300 bp, Homo sapien
ttaagtgagccgagatcgcgctacggcactccagcctgggctacaaagcgagactctgtttcaaaaaaaaaaaaaaaaaaaaaaaagagaattcactaccagtacttgttcttatttgtcctagacttgccactgtttcagactcaaagggtgcactttccctctttcattgtaggatttagtgcatgaatctgctcaccccaaacatcctcttcataacttggggttttcgatcctttccaggcagatattgtttataatccctcacctggagggttcctccacgtccccaatttatacattcatttgttcacctgtacaatttttttttttttgagacggactctcgctgtcgcccaggctggagtgcagtggtgcgatctcggctcactgctggctccgctcccccgggttcacgccattctccggcctcagcctccagagtagctgggactacaggcgcccaccacctcgcccggctaatttttcgtatttttagtagagacggggtttcaccatgttaaccaggatggtctcgatctcctgaccttgtgatccgcccaccttggcctcccaaaatgctgggattacaggcgtgagccaccgcgcccggcctgtacaacaattattaagactggcttgtgccaggctctgctgagaatcccaggacacggtggggacacggtggacgcaggctgtccgtcaagggggctagtaagccactaaacaaagggtagccttcagccctgcggcgcgggccagcgagcattcagaggcccaactcgctgtggttgctccccgggtctggtcccgcgcggacgtgggggcggccatcaggactgcccgggggttggcgccctgctgggttccaagccggtgggcgcggacagtgtggcgggaaggccgggcctggcgggtgggggcgcggcctggcggtgggggtggaccttcctggggtggagcccgcggctgtgggagcagggcccgccggggctcgggcagggcggtgggaaggcggggccttctgagtgggggcggggactgctggagttgcggggcctgcctggggtagggcggggcaggacagcttggagatagggcccggaattgcgggcgtcactctgctcctgcgacctagccaggcgtgagggagtgacagcagcgcattcgcgggacgagagcgatgagtgagaacgccgcaccaggtctgacggggaggccttgtgcgagcgtcccactgcccacccacctggttgggacagtagaagagggcgggatggagtggagggttcgccgaccgcgtcgccctcctgggtgtcgcagctccttcctcggcagtcccggggcatgagagcgcgaccggccaggagttgggggacccgggacacggccgcacgtggcctcccagggttccaggagcccctgagttagccgagcgtgcgcgtgggtgtcgggggtgcgcaagtctccagccttgcagagacggaggaggctgccagatgtgggggcggtgggggttcctggagtcccaccgcctgccctaaatttccactccgcccttgtcgcccagtgtgaccttgggcatgtactgcagctcccagtgcctcagtttcctgctctgtggagggagagtgacagtggtcccacctgctgcgtgtatgagggtttggcacccctctggcctttgggaaaggcttaggaaacgggctgtttctttactccggttttacaggaaaggaaacaggctcaagacgttttagtaacttctccaaggttacccagccagcaagtgatggggtccaggcctgaccagcgcccccgccccagcacattctagaaggttctgccccagtttaaatggggtgcatgctctgaggcctgtcacagctttttccggcttaacttctctgtccctcctctgggagtctccactcccatgtctgactctctccccataaccttctggggcagctaagggtctgagtccctctggacatgagcccctggctcaagcacatcaggcagagataaggggctcagggagcaccagcttcatgggtgaatgaatgaaggaatgaaagacccggctgtgtctttcaggtctgatctcagagctgaagctggctgtgccctggggccacatcgcagccaaagcctggggctccctgcagggccctccagttctctgcctgcacggctggctggacaatgccagctccttcgacagactcatccctcttctcccgcaaggtgtgaggctggggctgaagggaaggccagggggaaagtgggcaggaagg

SEQ ID NO: 28647 - DNA, 2300 bp, Homo sapien
agtataatcctgccaggcatggtggctcatgcctgtaatcccagcactttgggaggatgaggcgggcggatcacctgaagggaggagttccagaccagcctggccaacatggtgaaatcccgtctctactaaaaaataaaaaatgagccaggcatgatggtgtgtgcaggtagtcctggctactcgggaagctgaggcatgagaatcccttgaacccggaaggcagaggttgcagtgagccgagattgcgacattgcactccagcctgggcaacagagtgagactccatctcaaaagaacccaaaaaaccccaaaaattagccggacgtggtggcgcacgcctgtaatcccaactagttgggagactgaggcacaagaattgcttaaacctggtaggcggaagttgcagtgagcgaagatcatgccactgcactccagcctgggcaacagagtgagactccatctcaaaagaacccaaaaaaccccaaaaattagccggacgtggtggcgcacgcctgtaatcccaactagttgggagactgaggcacaagaattgcttaaacctggtaggcggaagttgcagtgagcgaagatcgtgccactgcactccagcctgggcaacagagtgagactctcaaaagaaaaaaaaaagtataatcctaagtagcccaaggcttttttgcatattacccaaagttgtttgaattacatgttttcttccagattgtacatgtccataatttaaaagtaggaaagtataagaaaataaaagtgcctctaattctatccaaacacaactgttaatttttcttttctttttttttttttttacagaaactaaagggaattgctggattttcttttcttttttctttgttctttttttttttttttttttttttttgagacagagtctctctcttgctcaggctggagcacagcgatcacgactcactgcaacctccacttcctgggttcaagcgattctcctgccacagcatcccgagcagctggaattacaggcgcccaccaccatgcccggctcgtttttgtattgttagtatagacaaggtttcaccatgttggccaggctggtctcgaactcctgacctgaagtaatccgcccccttcagcctcccaacgtgctgggattacatgcgtgagccaccgcccctggccaagggaattgctggatttgttttcaaaaaagaaaccctaatttgtaaaagattcctctaaacttagagaaaaaaagaagcatatagaagagggggtgtgagttctgaccttttttgaagtgcagcatgtgtgccgggaagggccccagtcgcaagtgtccagctcgctgcatcccagagacagaacatagctgtgtagtcagcacccaggtggagacacagcagcacatcccagaacccccgaacccccactgcctccaccagagacaaccaccatcccaactgtcacagcatagggtcgctactgctgattcaggtagtaaaacttgtcataggaaatcagaataacagcaagaatgtccccacctgtctccaatgagagagagcaggaatgtgccgggcacagtggctcacgcctgtaatcccagcattttgggaggccgaggcgggcagatcacctgaggtcaggagttcaagaccagcctggccaacatggcagaaccctgtctctactcaaaatacaaaaattagctgggtatggtggtgggtgcctgtaatcctggctgctcgggagactgaggcacgagaatcacttgaaacctggagatggaggttgcagtgagccgagatcactctatagcactctagccagggttacagagcaatactccaactcaaaaaaattaaaaaaaaagagcaggaatatcgacctccatattgtccctggggaacaggtcggaggccatggtgcccacagtctcccggcttgggcagatgtggctgtggctctgagtccttcagcggcgctggatccctggcagcgccacccatggtggagggaggctttgggatggccctgcggatgctcacacttggcttccctctccctgcagcaggagagcctgtcctgcctccagtccacctgtggccttgtccagtctgtagagttgaaggagaagctggagctggctgggagtcaaggtcgaagttttttcatccaaagccagttccggtgagccgccaagcactgggttccactagagtgaggggggtggtggggcactgtccccagtgtggtaggggagctggcagtgggacgtcagagcattctctggtcctgag

SEQ ID NO: 28648 - DNA, 2300 bp, Homo sapien
gacctggtttttcaggtactgggagccgggggctcactgcttgcactgtgcttagggtagggatggtaaatatcctccctgcatggctttatcctccctctcatcccaaagcaggtatcttctggttgtcacagagtttcattgagtccagctgcagccacgtggccatctggagctggtgctataggtgaccatctggtacattgaggggacctgtttgcctcctccactctataagcagtcatcttgggagaccgggaggagaaggtggtgggctagtcctgtgtcctcctccacttcccatgcctctatgttacccatctgtgtctcctgtgcagaaggagaggaaggggcattaagagatgaagggtgattatgtattacttatccatttctgaataaacatttgttattcctacctttgagttatcttttttttttttttttttttttttttgagacaaagtctcactctgttgccaaggctggagtgcagtggcactatctcagctcactgcaacctccgcagccagactcaagtaatcctcccacctcagcctcccaattagctgggactgcaggcgtgcatcaccatgtctggctaatttttgtagagatgaggtttcaccatgttgcacaagctggtcttgaaatcctgacctcaggtggtctgcctgcctcggcctcccaaagttggaattaacaggcgtgagccaccacgcccagccaagggttttaatcttgcagggatttcaacatttggggtggaacttaattatttaaaaaatagagacagattcttgctatgatacccaggatggtcttgaactcctgggcacaagtgatcctcctgcttcagcctctcaaagtgttggagttacaggcatgagccactgctccccaccagggatgcaaattacttgatactcctctccagaaggtggggtcctgtgcccctcctgaacccaagtgtgctctgttactactttgaccagatgtgactctgccatttctgtgcctaggcttttaaagatggtcacttctccatttcctgtgcctggaacattctctgggagccttgacaccacatttgaagttgcctattggggccagcatggtggctcacgcctgtaatcccagcacttcagaaggccgaggcaggcagatcgcatgaaatcaggagtttgagaccagcctaaccaacgtggtaaaaccctgtctctactaaaaattacaaaaattagaggggcgcggtggtgggcgcttgtaatcccagctattcaggaggctgaggcaggagaatcacttgaacccgggaggcggagtttgcagtgaggtgaaatcacgccactgcactccagcctgtgcaacagagcgaggctctgtctcaaaagaaaaaaaatagttgactgtcggtttggcatggtggctcatgcctcttgtcccagcactttgggatgctgaggcaggaagattactggagctcaggagttcgagaccagcttgggcaatatagtgaagccctatctttacaaaaaacgaaaaattagctcagctactcaggagcctgaaatggaggatcatttgtgcccaggaggcagaggtcgcagtgagctgtgatcatgccactatactccatcctgggcaacacagtgagacggcagaaaaaaaaaaatagttgactattgagtctcatatctgattgcccacctgacatctcccctgagtggcctaatgggcatctcaccacggcccacagagaactgatctactcgattttccctaagctggcccctctcctgcagtctacccatgtcagtcaatggcaacaccatcctcttagttgctcagactgaaaagctagcagccatcctggatttctctcacactgcctattcaacgtgtgaatgcatgagtggaaagctgagttcgcactcgtgactggccggggtcgactctgacattcactcccactttggcgcgctgatttgcctctgagcggatgaaggttgagccatggcgggcggggccggggaggcgggcttggagcgagggggcggggcaggcgccacaaaaacgcgctcgcgccggcgccgaaccgcaactcccggcgacccccgcgctcccgggtggcaagatggtggcgcgcaggacgaagctcgcggcgcgggacccggaggacggtatcccgagcccaccgtgctacgcaggtgaggggatccggaacgcgagaccgggggcggccagcatcgccgggaggtgtttgggggctggcggcggccgggggtccccaggagcgg

SEQ ID NO: 28649 - DNA, 2300 bp, Homo sapien
aggtgacccaccctcctcggcctcccaaagtgctgggatcacaggtgtgagccaccatgcctggccaacacctttaaaataacagttgtaacgggccctttacgctgcagaattcacaggcagtatcacctacctatacgaagaattttaaaaatcaacacagctctaaatgagttgtaaaagaacaagaaaggaggccgggtgctgtgtctcatgcttgtaatcccagcactttgggaggccgaagcaggtggatcacctgaggtcaggagttcgagaccagcctggccaacattgtgaaacccccgtctctactaaaaatacaaaaattagccgggcgtggtggcgtgcgcctgtaatcccagctactcgggtggctgagacaggagaatcgcttgaacccgggaggcggaggctgtggtgagctgagattgtgccactgcactccagcctgggcgacagagcgagacaccgtctcaaaaataaaaataaaattgtcctccgcatctgccctacactgcccagctgaccccactggccagcctgtcctcctcccacctcttgcgcgttcctcctggcacgcctggaagggaggaaaggcttaatggtcccgttctatgggtgaggaaaagaggtctgggaaggagcccggcgtggtggggcgggcctgtaatcccagctactcaggaggctgaggcaggaggattgcaggatcgctcttacccagtttctttctttctttcttttttttttttttttgaaacggagtcttgctctgtcgcctaggctggagtgcaatggcgcgatctcggctcaccgcaacctccgcctcccgagttcaagcgattcttctgcctcaggctcctgagtaggtgggatttcaggccgtgccaccgcgcccggctaatttttttctttctttttttttttttcagtagagacggggtttctccgtgttggccaggctggtctcgacctcctgacttcaggtgatccacccgcctcagcctcccaaagtgctgagattacagacatgagccaccgctcctggcctcttacccagtttctgcacggagctcctgatgcctgatggccaagaggacataaccccacctgttctaagggcatggagtgtatttttagagtgattggacaaaatatgtgccgaacacctacgtcaggtctggcgcatgctggaggctggggttatatcaatgcaaaagccattccctgtatttaacacgtaaatgaattagtctctttaactctcccaacgccctataaattatttgctccattttacatattaaacgctgtcacgaactgagctgctgtgtgaggccggggccggacttatctttctgaagcacagagaagcggttatacgcagaagtttgggagaactgggtaaggccgcacacatggaaattgccagtttcgtgggtcccaacgtcaatactgtgggcaaccttagaccggctcaaagcgcagctggggacggtgatgaagtgcagagcgtccacagccagcgacaagactgccaagcaactggcagcctgagtaacggagaaaacaacgaaaaaaacgcattcaccacctaccaacaagaaacaaaaaacacgaccaccccacagtcagtctactttttaggcgtgaataaggtcgggcagatcgcaactcccaggcatcccgcaaagtaggcgggtcaccttgagggcgacctttacccgctcaaaaattcgtctcacattagcagtgaggattcgggcgtcaccccgaatcgttattttccttactcataagtttaaggcataaggacgtttttagtttatttcctaggtaatgaattctattctcattaggcgtatgatgactatcgtagttgactgttgaggtcatgatccagttccattgaagtttgtctcacttgttaataatgtattttgttgcttttcatttaattttttccctcgaggaaaataaataattcataatgtgccgaacttccgtatgcagatgagcagccagcaccgcgaaggctcacggggaacgtccccgccccttccggttcttgcctgctttgagctggctgtcgcgagagttggtccgcggacgccggaagtagttcgtcgctccctagcggccgaaggggcgggctcgcggggtctcgactgctttcggcttgctcggcggagcaagatggcggacatctccctggacgaactcatcaggaagcgcggggcggcggcgaaaggacggtgagaggcctttcctttcttcggggtttagggtcctcggcc

SEQ ID NO: 28650 - DNA, 2300 bp, Homo sapien
ggccgacatggtgaaaccccatctctactaacaatacgaaaattaggccaggcgtggtggctcacacctgtaatctcagcactttgggaggccgaggagggcagatcatgaggtcaggagatcgagaccatcctggctaacacggtgaaactctgtctctactaaaaatacaaaaaattggccgggcgtggctgggctcacacctgtaatcccagcactttgggaggctgagacaggcggatcacaaggtcaggagattgagaccatcccggtaacacggtgaaaccctatctctactaaaaatacaaaaaattagccaggcgtggtggcaggcacctgtagtcccagccgctggcgaggctgaggcaggagaatgacgtgaacctgggaggcggagcttgcagtgagccgagattgcgccactgcactccagcctgggtgacagcaagactccgtctcaaaaaaaaaaaaaaaaaattagctgggcgtggtggcaggcacctgtagtcccagctactccagaggctgaagcaggagaatggcgtgaacctgggaggtggagcttgcagtgagccgagatcgtgtcactgcactccagcctgggctacagagcaagacgctgtctcaatcaatcaatcaatcaatcaatatgaaaattagccgggcgtggtggcagatgcctgtaatcccagctactccagaggctgaagcaggagaatggcgtgaacctgggaggtggagcttgcagtgagccgagatcgtgccactgcactccagcctgggctacagagcaagacgctgtctcaatcaatcaatcaatcaatcaatatgaaaattagccgggcgtggtggcagatgcctgtaatcccagctacttgagaggctgaggcaggagaatcgcttgaacctgggaggcagaggttgcagtgagccaagatcacaccattgcactccagcctgggtgacaagagcgaaactctgtttcaaaaaaataaaaaataaaaagcaaaaaaaagtaaatcaccacctcccagatgagaccacacttaaccttgcgatatgattttttgtttgtttgtttgtttttgagatggagttttgctctcgttgcccaggctatagtgcaatggtgtgatctcggctcactgcaacctctgcctcccaggttcaagcggttctcctgcctcagcttcccaagtagctaggattacaggtgcccaccaccacgccctgctaattttttttttttttgtatttttagtagagtcagggtttcaacatgttggccaggctggtctcgaactcctgacctcaggtgatccacccgacttggcctctcaaagtgctcgaattacaggcgtgagccaccgtgcctggccctgtgatatgttttatacttatgtaagcaggcacacatgtttttttcttacccaaatgaaataataacattttgaaacctgttttttaacggtattttcccttgttattgttattggtgggttgttttgtttttgtttgtgtttttttagaacaaggtctcgctctgtcacccaggctgctttctgcaacctcaaactcctgggcacaagccttctgagtagctgggaccatgtgcatgcaccactatgcctggctctgttactgtcgttcctttttgttgttgttgagatggactttcgctcttgttgcccaggctggagtgcaatggcacaatctcgactcaccgcaacctccacttcccaggttcaagtgattcttctgcctcagcctcccaggtagctgggattataggcatgcgacaccatgcccagctaattttgtatttttagtagagatggggtttctccatgttggtcaggctggtctcgaacttcgacctcaggtgatccgcccgcctcgacctcccaaagtgctgggattacgggcatgagccaccacgtctgaccctactgtttcttaattccagaaataatgtatgatttatatgtgctcacagcaaaaactctgtaaggtatgacctccacccctgccccattgccgcatcccagggccccgtgcagagggcccaggtcacagctcagcgtgagcctgccagaccctatgtgggtatcacgttcatacacgggtgtgtggaggtgcgggtgtgtgcacactcagtttctttttttgataacctggttttgtagccagccatacaacatggatccttttagtatttcatcatagggatgttacacaagggagcatgtggcagatgtcctaggattgcagctttgccccctcattgtgcccatggtggc

SEQ ID NO: 28651 - DNA, 2300 bp, Homo sapien
ctttgggaggctgaggcgggcggatcacgaggtcaggagatcgagaccatcctggctaacgcagtgaaaccccgtctctactaaaaataccaaaaattaactgggcttggtggcgaacgcctgtagtcccagctactcgggaggctgaggcaggagaatggtgtgaacccaggaggcagagcttgcagtgagctgagatcgtgccactgcactccagcctgggcaacagagcgagactccatctcaaaaaaaataataatttcaaagttactgtaaaagaacatttatgggctggacgcaggggcttatacctgcaatcctagaacttggaaggctgaggctggctgttggcttgagctcagaagtttgagattagcctgggcaacatggtgaaaccgcatctctacaaaaaatacaaaaaaattaccaaggcctggtggtacgtgcctgtagccccagttacttcggggactgggctgggaggattgcttgggtacaagaggtcaaggctatagtgagctgagatcacgccactgcattccagcctgggtgatagagtgaaaccctgtctcaaaaaaaaaaaaagagctcttatgtactcttcacccagatgtacctaatgttattatttgctacatttgctttatttctctctatacagtatatatctaatgtatgttaaatatattagatactacatgtgtgcatatccatacagtggacccttgaatggtatgggggttaggggctgacctgtatagttgacagtccacgtataggctgggtgcagtggctcatgcctgtaatcccagtactgtgggaggctgaggcgggtggatcacttgaggtcaggagttcgatgagaccagcctggccaatgagaaaaaaccccggctctactaaaaatacaaaaattggccaggcgctgtggctcatgtctgtaatcccagcactttgggaggccaaggcaggcagatcacctgaggtcagaagttcgagaccagcctggccaacatgatgaaaactcgtctctactaatgatacaaaaattaactgggtgtggtggtgggcgcctgtaatcccacccacttgggatgctgaggcaggagaatcgattgaacccgggaggtggaggttgctgtgagttgagatctcaccactgcactccagcctgggtgacagagccagactccatctcaaaaaaacaaaacaaaacagaaaataaaaattagccaagtgtggtggcgtgcgcctgtaatcccagctacttgggaggttgaggcaggagaatcgctggagcccagaaggcggaggttggagtgagacaagatcgcgccactgcattccagcctgggccagatctgtcttaaataaaagaaaaaaaaaagaaaatccatgtataacttctggttcccccaaaactttcctactaatatactattgactagaagccttaccaataacatatttgtatattgtatgtattatatactatatttttacagtaaagtaagctagagaaaactgttattttaaaaatcataaggggccgggcgtggtggctcacgcctgtaaccccagcactttgggaggccgaggcaggaggatcaccaggtcaggacttcaagaccagcctggccaacatggtgaaaccctgtctctactaaaaatacaaaaatgagccaggagtggtgacgtgcgcctgtgatcccagctactcgggaggctgagacagaagaattgcttcaacctgggagttggaggttgcagtgagctgagaccgtgccactgcactccagcctgggtgacagcaagactccgtctcaaaaaataaataaagagaaaaaaaaatcataaggaagagaaaacatatttactattcattaagaggaagtggatcatcataaaggtcttcatccttgttctcacgttgagaaggctgaggaggaggcagggggtagtcttgctgtctcgggtgacagaagaggaagaagatccttgtataagtgaaccactcagggtcctggccgggcacagtggctcacgcctgtaatcccagcactttgggaggccgaggtgggtggatcatgaggtcaggagttcaagaccagcctggccaacatggcgaaacattgtctctactaaaagtacaaaaattagccagacgtggtggtgctcacctgtaatcccagctactcgggaggctgaggcaggaaaatcacttgaacccgggaggcggaggtcacagttagccaagatcacaccactgtactccagcctgggtgatagagtgagactcc

SEQ ID NO: 28652 - DNA, 2300 bp, Homo sapien
ctgaacgtgtgtgtgtgtgcgatgtcactatgtcagagggttttgcacgtttagcaacaaggaacagaacccggatgacacgggggcatcctcccaatgctcagtgggccaggctcccatcaaggccaggctcccactgaccctgcaagctgtgctggggacctcacactttgcggtgtcagtgctgtttgccccatttcacagatggggaaatgcaaactagtcttggccaccgtcccacaacgctgccgccggaaggagcctgctccatggggtttcaaagtccactctgctgctgtcactcctgggctggcctagagccaccttcccttccccccaggccacctcctctccccagtttctcaaaagttgaccatggtgaggctggaggcttgagtctgtgtggacatgtggaggctgcggctgcagagggcagctctcctgtcaactgtgacccgctaggcgtggggaggctggcacaggaggaatcagcccagtgctcctccacctccacctctacctctatgcctggcatctgccacttggagggcacctgggtcctccctccttggggaggacctggagtctcctccttggggatccaggcaaaaggcctcttggcttgggtggttgctaaggaaagtgtggcccaacccagaacttcgggatgttcagaccccaggcaaccttggccagggtgaacctgtgggcatcaccccaacctccatgcaacacccggcccatttttccccagaaagcatctgcctcctttattgttgaaatgtcctgcctgtgtctctaaagcttcccctggtctccacccaacccttccctgctgtttttggtggtgttccataccttccagctggtggttggatttatggccacgtcccctgcacctggctgctccatacatttcttttttcttttttcttttttgagaagagtctctcacccagacagtagtgcagtggcgcgatcatagctcactgcagcctcaacctcttgggcacaagtgatccttctacctcagtgtcctgagtacaggcacgtgccaatatgcctggctaagttttttttttttgagatggagtctctctctgtcacccaggttggagtgcagtggcatgatctcagctcactgcaacctccacttcctgggctccagcaattctcctgcctcagcctcccaagtagctgggattacaggcactcgccatcacacctgggcttcgccatcttggccaagctggtcccgaactcctgacctcagatgatccacctgcctcagcctcccaaagtgctgggattacaggagtgagccactgtgcctggcctaattttttgtatttttaatggagacaatgtcttgctatgttgcccaggctggccacaaactgagctcaagtgatcctcccatcccagctcctcaaagtgctgggattacaggtgtgaacgccgttcttggcctcattccatatatttctgttgaatggctgagcagtcctctgtaaggggcagagcactgcctgggagtcgggagacctccaccaaccctcccccgcccagccccatctctccaagggtgggtggggattaccctttgtgggtgctgctgggatcctcgcttggcccagaatgtctccagcacattctgagccaggcctcctggcttacgggctccccacagtctggaggaggctggctgggggcctggtgctctaggtgtcttatctaagacatgcaggccccatgggaggcctctcccaacactttgtgggatccaggccaggggttggccctggagtctgccagccacactgggaaaacattggagcttggtctgccatcctgaactgtggttcccctgcctcccagcccggctgtgagtgctcagcgaccctgacaggctgacaggtacagtctgccgggctttcctactgtccctggcagccccatgcttactctgcggcccagatcccagctctgtgtccacctgttccttctcctgggttcccttcccccacagttcccagccaagccagagccccccactgcagaacttcctccactccctcccacttcctcccggttagaacaggaccaggagggaggtgccgctcagattctggcaggaccgctggcgggcaggcaggggacaggtaagcaagtcacccgactggcttgtctaagctccagggcagggagctggcacctggggaggaccgggcctgccaggtcgggggccctggcagctctctctgcccacccctaacctggcctgggcagagtggaggcca

SEQ ID NO: 28653 - DNA, 2300 bp, Homo sapien
tgaccgctacttacgccctggcagtctgcagcggggacccagccctcctgcccggggggcgcgccagagcccagcacccgggggcacctgggccctgccctggccgccgtggggccttggctgctggagggacccgtggttgtgagcgtgtgtgccgctgagtgtgagtgtgtgagcgagcgtgtgaatggcttgagagtgaatgtgtgtgtgagtgtgaccgtgggtgtgaagggcgggcatggaaacgtgtgatggggtgtgtgtgtgtgtacgggagtatgtgaatgggcgatgtcactgactgcgactgaacgtgtgtgtgtgtgcgatgtcactatgtcagagggttttgcacgtttagcaacaaggaacagaacccggatgacacgggggcatcctcccaatgctcagtgggccaggctcccatcaaggccaggctcccactgaccctgcaagctgtgctggggacctcacactttgcggtgtcagtgctgtttgccccatttcacagatggggaaatgcaaactagtcttggccaccgtcccacaacgctgccgccggaaggagcctgctccatggggtttcaaagtccactctgctgctgtcactcctgggctggcctagagccaccttcccttccccccaggccacctcctctccccagtttctcaaaagttgaccatggtgaggctggaggcttgagtctgtgtggacatgtggaggctgcggctgcagagggcagctctcctgtcaactgtgacccgctaggcgtggggaggctggcacaggaggaatcagcccagtgctcctccacctccacctctacctctatgcctggcatctgccacttggagggcacctgggtcctccctccttggggaggacctggagtctcctccttggggatccaggcaaaaggcctcttggcttgggtggttgctaaggaaagtgtggcccaacccagaacttcgggatgttcagaccccaggcaaccttggccagggtgaacctgtgggcatcaccccaacctccatgcaacacccggcccatttttccccagaaagcatctgcctcctttattgttgaaatgtcctgcctgtgtctctaaagcttcccctggtctccacccaacccttccctgctgtttttggtggtgttccataccttccagctggtggttggatttatggccacgtcccctgcacctggctgctccatacatttcttttttcttttttcttttttgagaagagtctctcacccagacagtagtgcagtggcgcgatcatagctcactgcagcctcaacctcttgggcacaagtgatccttctacctcagtgtcctgagtacaggcacgtgccaatatgcctggctaagttttttttttttgagatggagtctctctctgtcacccaggttggagtgcagtggcatgatctcagctcactgcaacctccacttcctgggctccagcaattctcctgcctcagcctcccaagtagctgggattacaggcactcgccatcacacctgggcttcgccatcttggccaagctggtcccgaactcctgacctcagatgatccacctgcctcagcctcccaaagtgctgggattacaggagtgagccactgtgcctggcctaattttttgtatttttaatggagacaatgtcttgctatgttgcccaggctggccacaaactgagctcaagtgatcctcccatcccagctcctcaaagtgctgggattacaggtgtgaacgccgttcttggcctcattccatatatttctgttgaatggctgagcagtcctctgtaaggggcagagcactgcctgggagtcgggagacctccaccaaccctcccccgcccagccccatctctccaagggtgggtggggattaccctttgtgggtgctgctgggatcctcgcttggcccagaatgtctccagcacattctgagccaggcctcctggcttacgggctccccacagtctggaggaggctggctgggggcctggtgctctaggtgtcttatctaagacatgcaggccccatgggaggcctctcccaacactttgtgggatccaggccaggggttggccctggagtctgccagccacactgggaaaacattggagcttggtctgccatcctgaactgtggttcccctgcctcccagcccggctgtgagtgctcagcgaccctgacaggctgacaggtacagtctgccgggctttcctactgtccctggcagccccatgcttactctgcggcccagatcccagctctgt

SEQ ID NO: 28654 - DNA, 2300 bp, Homo sapien
gggtaggcagacgggcatggtggctcatgcctgtaatcccagtgctccgggaggctgtggtgggaggatggcttgagctgcagtgagctgtgactgcatcactacactccagcctgggcatcagagcgagatctcttctctgggtaaataaacccagtgagtcactccctcagctacctagatcctgcagggctccccattctccttgacattccagttctttccacccggggctccacattgcctccccaacgtcacatcacaccccagctcggctgtatcagcccctctaaccttgcccatcaggcctctgttcacctgtctccacctccaggccctgccagcaaggcgcttctccctttctctgcctggtctgtgccacgttgcctgaacacacagcccaccccatcccctcagagcaccaggagctcacatctgggtccaagaccctaccaggagagcaaggcaagagaatgacgctaaggcccagcatgagcctacacagagaaggtgcccactgtctgtcaaattcatccattcaacaagtatttaggctgctcatcgtggctcacgcttataatcccagcactttgggaggccaaggtgggaggatggcttgaacccaggagttccggaccagcctgggcaacatagtgaaacccgtctctacaaaaaaatgcaaaaatggccgggcgcggtagttcccacctgtaatcccggcactttgggaagccgaggcaggtggatcacctgaggtcggaagttcgagaccagcctcaccaacatgttgaaacaccgtctctactaaaaatacaaaattaggccgggcgcggtggctcacgcctgtaatcccagcactttgggaggccgaggcgggcggatcacgaggtcaggagatcgagaccatcctcgctaacacggtgaaaccccgtccctactgaaaatacaaaaaattagccgggcgcggtggggtgcctgtagtgccagctactcgggaggctgagaatggcgtgaaccctggaggcggagcttgcattgagccgaaatggcgccactgcattccagcctgggggacagggcgagactctgtctcaaaaaaaaaaaaaaaaaaaaaaaaaaaaagattagctggttagccagatgtggtggcacatgcctgtaatttcgggaggctgaggcaggaggatctgttgaaccctggaggcggagtttgcggtgagccgagatcgcgtcaatgcataccagcctgggcaacaagagcgaaactgcgtctcaaaaaaaaaaacaattagccggacgtggtggcatgtgcccagctactcaggaggttgaggcaggaggaacacttgagcctgggaggttgaggctaaagtgagctgtgatcaggctcctgcattccagtctgggcaagagtgagaccctgctttaccaaaaaaaaaaaaaaaaaaaaaggtatttattgagcacctactatatgctaggctctgtgtggctaggctctggggatgtacgggacttcaaaccagatagggccttgccctccgggagcgcacagtccactgggatggggtgggagtgggggaaacacgcaggaggccttcagctaagtgggacaaagatcactccacagtgggacaatggcgtggggagcggaggcgccgccggcgaggaggctccgggcgggccgtgctgagaccgcagcatttaacccggcccgaggcagctgggaacagtgctgcccagggaactacaaattcaaaggcccggggaagggccgcgctgagcagctgcaggcacaggcccaggccaggccaggcaggaccggcccctgcagtctcggaggccgggggaagattccgcctcttattctcgctcccatccggggggcgccatcttgcttcctttatggcggcgaacgaggcccagagaggccaccgtcccgcgcggggcagcacagcggcgggagagctcggagcgcagagggccgcatccccagttcccagtctccatccccggcagaagcaggcggagcgacccggtccccgcccccgcgcccgccccgccccgcgcgcccgcctggcccctcggccccgcccctgctccggagtgacgcgggcccgggcgcgacggtctcggcggcggcggcggcggcgacagagcgagcgcggcgcggggccaccatgggggcccagctcagcacggtaggcggggagggggcgccggggccgcggggcgtcgcgagggactgggacccggcggcgagggggcgggctggcctgcgggaggtgacgcgggacccg

SEQ ID NO: 28655 - DNA, 2300 bp, Homo sapien
aaaacatacctatcctcatggggttatgttctagacagacaaccaaagcaaataagtaggatgtaccgtgtgttagaataaatgcaaggatgaggaaacgagggggctctgaggtgatggggggagttggaatttcagggggcccagggaggacctggtgggaaggggacttttgagtgggcatctgagagaagaaccctccaagcagaagaacagcaggtgccaaggccctagcagccgtttgaggcctgaaaaacaggcggccaggtgtggctggggcacaggtggcggggagagaagcagaacgtgaggtcagggggacacatggggcccagtggatcagggcctcatgtcattcagggtctgagctgagaatgacgtggctgatatacttgtaaagcatcctgctggctgttgagtgaatgggtcagagtgagccattttcccatgtgcctgctgcgtgctgggaacctagctgggtgccggggagagaagatgcaggtgaaccctagatgcttattcccatggtgcttgcagaggtctggagccaccactgtctcctccatctgacctgctcatccttggtgcttaaccatgtgtcacctccccaagggagtcaccatctttgtctgtttccttttttctttttttttttttttcctttttgaaactgagttttgctcttgatgtccaggctggagtgcagtggtgcaatctcggcgcactgcaacctccgcctcctggattcaagcaattctcctgcctcagcctcctgagtagctgggattacaggcatgcgccaccatgcccggctaattttgtatttttagtagagacagggtttctccatgttggtcaggctgttctcgaattcccgacctcaagtgatctgcccaccttggcctcccaaagtgctgggattacaggcgtgagctaccgcgcctggcttttttttttttttttttgagatagagtctggctctgtcacccacgctggagtgcagtggcacaacttggctcactgcaacctccgcctccctggttcaagcgattctcctgcctcagtcacctgagtagctgggattacaggcgcacaccaccgcgcctggctaatttttgtatttttagtagagacgaggtttcaccatgttggccaggctggtctcgaactcctgatctcaagtgagccaccacgcctggcctctttgtctgtttctaaatgatgcccccaccagactgagaactcctttagggaaaggctgtgtctgattctccccttctcctgggtaccagtgcagggcctgcccctattccctgagtgtcccctgagaggtggagcgagtgaatgaatcagtgaacacatgagccccaggcctgacctgcctgtgtggccagggggacgaggcctctgagagccagcgacctgtttcactctcttcttgccatcttttgcagatggatttgcagccgctgcaagtgtgtggaagggccgtgttcgtgttggcaaagaaggtcggctgctgagccagggcgtgtctcccggaggcctgtgggctgccaggatccccacctctctgcaatgggctgcccaggctggtcagttaccagccagtgacatcagcgaggttccctgctctctaccctgggaagggcccagcctaagttaccaagccccaggctcccagtaccaccctcagcctatgtggattgccaccccaccttctgcctgtccttgggaggggaccgactcttagctccccttagcaatcaggttgcacccagtcccttgactttatgcccaggtttcctggcacctaaagtagaaacgatgcaactgcccctcgggcttgctgagggtcaaagggggtgtgactttgtcatggagcgtagaagtcagagtcgatggtgatcccgctggctgttaacatcgatacagttcaggtcagcatgcaccaagttcctccaacacaccaggtacattggctagccacctctcccaggcagggcggtgcagtggtgagagcagggaccccagccaggtggcctgggtcctaaccccctgcactgtcattgctggctgtgggactctgcacaaggtactgcacttctgtgcctcaatttcctcatctgtagggtgggggtggtgattgccaccccatagggtggttataaggggccacacatgttcctatgtgtgagatgctgagaaagtcacctggcatggacaggatggacagccagtatttatcgaactatgaatgaatgaatgttaccctttagtgggttccagcgtcctatcc

SEQ ID NO: 28656 - DNA, 2300 bp, Homo sapien
ggcgcgatctcggctcactgcaagctccgcctcccgggttcacgccattctcctgcctcagcctcctgagtagctgggactacaggtgcccgccaccacgcctggctgatttttttgtatttttagtagagacggggtttcaccttgttagccaggatggtctcgatctcctgcccttgtgatctgcccgcctcggtctcccaaagtgctgggatgaatcttccttttaacaaggagagggcaggaggaactcagctcttggaggggcaacaggacctacccgggctttataacattgttttagttttatttttactgttgccttctagtctctgagatactggtgttccatttagggtagcaatacaaagtttctctgaaaaatacatttgtgatcatggaaaagccaacataaagcaaaagcattaaaagtattacaagtgggccaggtgccgtggctcacatctgtaatcaccacactgtgggaggctgaggcgggtgaatcacttgaggtcaggagttcaagaccagcctggccaacatggtgaaaccctgtctctactaaaaatacaaaaattagccatggttgtgcatgcctgtagtcccagctactcaggaggctgaggcaggagaatcacttgaaaccaggagacagaggtttcagtgagccgagatggtgtcactgcactccagcctaggtaacagagtgagtctcttctcaaaaaaaaaaaaaaaaaaaaaaaaaaatgagtattaccagtggagaaagggtccgcattcattctttttttttttttttttttttttttttttgagacagagtctggctcttgtcacccaggctggagtgcagtggcatgatctaggctcactgcaacctccacctcctgggttcaagtgagcatgtccagctaatttttgtattttgtagagatggagtttcaccatgttggccaggctggtcttgaacttctgatctcaggtgacctgcttgctttggcctcccaaagtgctgggattacaggcgtgagtgcttgcctggcctcttgtttccgttttaagatgggagaagtaacagcctgtgatgggaatgacccagggagaatggagagagggcagggtttcgggatcagtgttggcgtgaagggtcgggatcttctggagggggtggtcgtggccaggagctggacgggttcagcccggtcccaagagggaagggactgggtgctacctcagcgggtgggtgggggagctggtgggaattttctactgattccttcattcgaagtgtatttattgggcacccattgagtgccaggctctttctcagggctaggatagaggttccattttctcagtggcttgggcactgggtcatcagctgagtgagaggatgggcgtcagcactcaagaagtcacccaatggtttcattttttgcagtctttgttgtcccagaggagtaagaactaaaagcaccaggactgtgacatgctggaaacatggcatgttccaaagagaataaaatacagttttatgatacacgaattgtgtgtgatacattccaatttctcacattgaacaaattaccaatagcaatatgtgtgaagatggggcgaggtgagagtgaggaggaggagtagagaaaggacggggcggcgttaaggatacagcaaataactggaattccgcaaacactggggtgatgcaggcaatgcccttagcacggtcccggcaggaggcggtgggatcaggccgacccgggtcccaggggtgacagcgtcccttctccactgcagaatatcgaggtactcaaccctctgaacctcagttttctcatcagttcaatggggaaaacgggatggtaacccgtaatactggcggcgcggaggccggggagcgctccctacctgttggccggcggactggggactgtccgcacccgccccggggagcagcgagggcgcgcgggcggggtcgcggggaccccgcaagggctctggggaccgggacccgcagggtaggtcgggacgggcggggcggggcggcctgaccccgccccgggccggaggggcggtgctgcctcccgccgggccccaggcactgccctccggccgccgcgccgcccgcccgccggggccccgctgtccgccgcccgccgccgctggagctagaggtacgaggggccgcgccgatgttgcgggggacgggggctccagggggatcctgcggctcgcagtggggaggaggcgcctcgggaaggcaggggcaggggcggaggggctgggccgccgccctagcc

SEQ ID NO: 28657 - DNA, 2300 bp, Homo sapien
ctgcaatctccgcctcctgggttcaagcgattctcttgcctcagcctcccgagtagctgggacaacaggtgcacgccaccacacctggctaatttttgtatttgtagtagagacgaggtttcaccatattggctaggctggtctcgaactcctgacctcaggtgatacccccgccttggccacccaaagttctgggattataggtgtgagccaccataccccaccacagatgccctattcttttacagaaaaagtctggagggagctcccatcccttctacttatgtcctatgagctggaatttagttgcatgtcttatctagctgctagggagaactgagaatttattactagtagtgtgccacagttcagttcagagctctgaaactgactaaaaatgaaaacatttttaataggggtttcattctcagtgccccagttttgctgtttatgtagtattatctcaaagctattggatgagttaatgcaggtaaaagtacttagtacctggcacaaagtaagccttcagtaagtgctctaaatatcactatcttcatctttgtgacctgatagcaacagtgacagcaatccatagtacttctgtggcctctcctcagatcacttagatctagggaaagtaaagcctaaaaggcgacaatatttactatttggccctttcttttctttcttcctttctttttttttttttttaaagacggagttttccctcttgtttcccaggctgtagcgcaatggcgcgatctcggctcactgcaacatccacctcccgggttcaagcgattctcctgcctcagcctcccaactagctgggattataggcatgtgccaccacacctggctaattttgtatttttagtggagacggggtttcgccatgttggtcaggcttgtctcaaactcctgacctcaggtgatccacctgcttcggcctcctaaagtgctgggattataggcatgagccaccacaccgggcctactatttagccctttaaggtaacgtgtgcctacctctgtcttggaccatcatatgttctgccagctactctagctcctcccagtcccactgggtaaggagcacgatttgttgaactcttgctcaatctattctttaattttctttttttctttcgttttttttttttttgagatggagtcttactcttctgtcacccacgttggagtgcactggcacaatcttggctcactgcagcctctgcctcccaggttcaggtgattctcctgcctcagcctcccaagtagttgggattacaggcccacaccaccacgcctggctaattttttttgtaattttagtagagacagggtttcaccatattggccagtctggtctcgaactcctgacctcaggtgatctgcctgccgcagcctcccaaaatgctgggattacagatgtgagccactgtgcccagcttattccttaattttcaatttaaaactatgtaaagttgtacacaggttgttaaagcttgttttttgggttttttttttttttttgctattataatttgcacatacttattagcattgtcacagtcaatagttaccaaaaatggttatcaagaaagaggagaacaggccaggcatgttggctcatgcctgtaatctcagcagtttgggaggccgaggtgggaggatagcttgagcccaggcgtttgagacgagcctgggcagcatagtgagactccttctctacaaaaaatttaaactttagctgggcgtggtggcacatgcctgcaatctcagctactcaggaggctgaggtggaagcactgcttgagcctgggaggtcaaggctccagtgagctgtgattgtgcttctgcactctagcctgggcaacagagcaagaccctgtttctaaaaaaaaaagaaagcaagaaaaaagtagatatgccttcctttccattaacagggactcagaatgtggctgtttaaattgttaggtttttcccgtgctttgatgtgttttttatggctgttttcttgctttgtctgctaatgacttttctcgccttgtttcaggtgagtgacacagcgtgggcatcagcaatagcagaaccatcttctttaacatcaaggcctgtggaaaccactttggaaaataatgaaggtggagtccttagaactgtcatgtaatactattctatggttcagtggcatgctatgaaactattaaaaattaagatgggccaggcacagtggctcatgcctgtaatcccagcactttgcgaggctgaggcggggggatcgcctgagccca

SEQ ID NO: 28658 - DNA, 2300 bp, Homo sapien
gactacaggcaagtaccaccacgcacaacaagttttttacatttttagtagagacagggttttgccatgttgccaggctggtctcgaactcctaggctcaagtgatctgcctacctctgccacccaaaatgctgggattgcaggcatgagccaccgggcccagccagtgtttcttattaattttttattgattttctgtttttttgtagaggcgtggtctcactttggttcccaggttggtctcgaattcctggcctcaagcaatcctcctgctttggcttcccaaagtgctaggattacaggcatgagccactgtgcccagcctcaagcatctttttagaaacctttgcccattatcatgatgttcacaaacttgttcctaaacttagcactgttggtttgacttacctgttcttatttctaagccttcccaaggttgcagagtcaccctccaaactccagaaaggagctttctcatctcaagccatcaggggttgggggacatggggagggaaggctcagatgagtggtcattcggtttagccagtggagctgtgagttctgtgcttggaaccatcctttttgtatttgaatcctaactctgtcccttgctacccatgtgacttggggcatgttgttgaacctctctgtgcttcattttccccatctgtaaagtgtagacagcagtagtgactgtctgatagtgttgctatgagggttgaatgagatgatgcccatgaagcactcacaacaggatccggaacatgtgggtgaccaatatcattatcagttaaattaggttcatcaaaggatcactcgtataggtttttagaagacctgttttaattaagatatgaattctataattcatgtctatacatggatcctcatgaagtgggtaaaagcagtttcttttaattgtttaaatacttgttttatcatcttacctatattgtagtatctgttaatgataaaatagtgctaaacaaggtaaacattaatgtagctcctcactaatttgtcaaaaattctgatttactggaatccattttgagattgattgtggacgaagtgtagtggttcacacttctaatcccagcactttgggaagccacggtgagaggattgcttgaatccaggagttggaggctgcagtgagccatgatcatgccacactaccctccagcctaggtgacagagtcagaccatctcaaaaaacaaagaaaagggccaggagcggtggctcacgcctgtaatccagcactttgtgaggccaaggcaagtggattccttgagctcaggagttcaagactagcaacataacaagaccccatctctacaaaaaatacaaaaattagccaggcgtggtggcacacacctgtagtcccagctatttgggaggctgaggtggtgggatcacttgagcccaggaggtggagtttgcagtgaaccgagatggagccactgcattgcagcctgggtaatagagcaagactctctcaaaaaaaaaaaaaaaaaaaaaagaaagaaatggattgctcgtgaattaaaagtagtcctgagtagaaagcttttccccaaataaagttcacaatgacagagatggtttaatggacaaatgaggactagttatttcattttgtaatgcaagtctcatagctagtttttgttgttgttgttgttttgagatggagtcttgctctgttgcccaggctggagtgcagtgacacgatctcagctcactgcaagctccgcctcccaggttcgccattctcctgcctcagcctcccaagtagctgggattacaggcgcccgccaccacgcctggctaattttttgtatttttagtaaaggcaaggtttcaccgtgttagccaggatggtactgatctcccgacctcgtgatctgcctgcctcggcctcccagagtgctgggattacaggcatgagccactgcgcctggccatacgtagttttacgaaaatattaatgtgcatgcttttctctgtagtcttccttttttcatcaacatgggtgttccaccaatgacaccaatgccaagtacaacagtcgtgctgctcagctctatagggagaaaatcaaatcgctcgcctctcaagcaacacggaagcatggcactgatgtaagtcactggaggctggattgtttcctttagatacatgttcacttcatagaaaaagtgatttttatcctgaatagtaaaacttttctacctgagttgtcttacaaggaattagtgtacagtagattcttactattgaagtagttatgttctgtaaa

SEQ ID NO: 28659 - DNA, 2300 bp, Homo sapien
cgtacaaaagacttaaaaattagcaaggcatagtggaacctgcctatagcctcagctactcaggaggctgaggtgggaggatcacttgagcccaggagttcaaggctgcactgagctgtgatcatgccattacactccagcctgggtgacagagcaagaccctgtctcagaaaaaaaaaaaagaaaaaaaaaatatatatatatatatgtgtgtgtgtatatatatatcaattaaatagttaaagtcagaggtctaaaatagcagtttccaaaatgctagtttctcaatcttttttcttcgttgtccctaagcataaaaatcaattaattagataattttccatttaaattggatccaatgtttccctaatgagataaattaaatactaaggaatacaattttgtcaggtagaggtgacctttggaaggccataaaccattgtaataactaagatttttttttcacttttcaagaaacaatttttgcccctcttaattaaaaatatatgcctggccaggcatggttgctcctacctgtaatcccagaactttgggaggccgaggcaggaggaccacttgagcccatgagttcaagaccagcctggacaacaaagtctacaaaaaaaaaattttaaattagccaggcatagtggtgcatgcctgtagtcctagccacttgggagtctgaggcagaagaatcacttgaatccagggggttggcgctacagtgagcagtgttcaccgtgccactgcactccagcctgggtaatcaagcaagaccgtctcaaaaaaaaaaaaaaaaaaaaaagaagtatgccttagatgtttcaaggcttttttttggtttttttttttttttttttgagatagagtctcactcctattgcctaggctggagtgcagtggcaaaatcatagctcactgcagcctcaacttcctgggctcaggtgattctctcactcagcctcccaagtagctgggactacaggcaagtaccaccacgcacaacaagttttttacatttttagtagagacagggttttgccatgttgccaggctggtctcgaactcctaggctcaagtgatctgcctacctctgccacccaaaatgctgggattgcaggcatgagccaccgggcccagccagtgtttcttattaattttttattgattttctgtttttttgtagaggcgtggtctcactttggttcccaggttggtctcgaattcctggcctcaagcaatcctcctgctttggcttcccaaagtgctaggattacaggcatgagccactgtgcccagcctcaagcatctttttagaaacctttgcccattatcatgatgttcacaaacttgttcctaaacttagcactgttggtttgacttacctgttcttatttctaagccttcccaaggttgcagagtcaccctccaaactccagaaaggagctttctcatctcaagccatcaggggttgggggacatggggagggaaggctcagatgagtggtcattcggtttagccagtggagctgtgagttctgtgcttggaaccatcctttttgtatttgaatcctaactctgtcccttgctacccatgtgacttggggcatgttgttgaacctctctgtgcttcattttccccatctgtaaagtgtagacagcagtagtgactgtctgatagtgttgctatgagggttgaatgagatgatgcccatgaagcactcacaacaggatccggaacatgtgggtgaccaatatcattatcagttaaattaggttcatcaaaggatcactcgtataggtttttagaagacctgttttaattaagatatgaattctataattcatgtctatacatggatcctcatgaagtgggtaaaagcagtttcttttaattgtttaaatacttgttttatcatcttacctatattgtagtatctgttaatgataaaatagtgctaaacaaggtaaacattaatgtagctcctcactaatttgtcaaaaattctgatttactggaatccattttgagattgattgtggacgaagtgtagtggttcacacttctaatcccagcactttgggaagccacggtgagaggattgcttgaatccaggagttggaggctgcagtgagccatgatcatgccacactaccctccagcctaggtgacagagtcagaccatctcaaaaaacaaagaaaagggccaggagcggtggctcacgcctgtaatccagcactttgtgaggccaaggcaagtggattccttgagctcaggagttcaagactagcaaca

SEQ ID NO: 28660 - DNA, 2300 bp, Homo sapien
tatatatttttgtattcaattagagccagataacatatagatagaatattatatgttatagtattagatgctaagttctatgaagaacacttaagcaaccatagtgtataaatggtacctcctaccccttcctcccctattcgtgtagatactgtctataatttactgcttttgtttccctctcctcaatctctatggtggagaatgggctagactgcactactctgataatataacttagtaagatttcagctccaagtagtaaatgggaccatcattcccattcccatcaggaaggataaaactgctcataaacatgcccggtattctgcataaggccaaactagtacccggtggacacaaagcacaggtgttatacttcgactcaatacaggaagaacttttaaaccatcagagctacctgcaaaagtaatgtacttttctggaagataatcaatttccctttcttggaaaagttgcagctttgggtttataagttacattgtctgcaagctcccaactgccaccgagggtctccaagcagataggtggagtgtacatttcctgacttctaacagtagaaagcctccaccaaaggctcttcaggatatccctaggaagctgctcacctgtgctactcagcactgattctttaatttctttgtacagatgaataaaccatggtttattttattttactttttgagacagggtcttggtctgtcgcccatgctggagtgcagtggtgcgatcttggctcactgcagcctcgacctcctggactaaagcgatcctcccacctcagcctcccaagtagctaggactacaggcccatgccagcatgcccggctaatttttgcatttttttatagagacggggtttcaccatattatccagtctggtcttgaactcctgagctcaagtgatcctcccgcctcagcctcccaaagtgctgggatcacaggcatgagcccctgagactgcaaataaaccatgctttagagaaggtaagtgtcttgaccaaggccacagagctaggaagcagctggctgaactgggattgaggccaaggtagtgcctttgatgccaaaacctgctgtccttcctcactatcacccaacctctttccagtggctccacacccattgtggtgacagaggcaccttctgctgagtgtaaactcttctggctggaattgtttcccagagggtagggtgcagccccgagggccggggttaaaagtcaagcttctcatctggactcatcagttctgactgagcacttctgcctcaacccgcactgccatctctccatgaacgtgacacaaaagcccttggtttcagaaagccagtttccgggcaaagaaagctttccacccagggcctggcgtgagctgagggcaagaattaaaaagagtcgggcgcggcggctcacgtctgtaatcccagcaatttggaaggccgaagtgggtggatcacctgaagtcaggagttcgagaccagcctgggcaacatggtgaaaccctggtctctactaaaaatacaaaaattagccgggcgtggtgatgtacgcctgtaatcccacctactcgggaggctgaggcaggagaatcgcttgaaccagggaggttgcaaggagccgcaatcgcgccattacactccagcctgggggacagagcgaggctccgtctcaaaaaaaaaaaaaaaaaaagggaaggccaccagctaaggtccggcgtcaaggcacgggccctccgtccgtctcgtgccgaaggagggcgcgtgcgccccttcccctgcctctgacctttccatggaagcagcccgttaggcgaaatggcgatcgaccaggcgaaacgttggtggatcctatggcagcgcgcgtggcaggcagccacacccgggcccggcttcgcccagcgctaagggcgtggagccgcgccgcaaatggcgcgcgagcctcctgcgcacgcgcgtgcagcgcctggggtcgggccagcggcgcggctgaagcgagggcggggagggaaagcgagcggcgcctgcgccccggcggtggacgggcccggtcgtgggcggggattggggcggagcctgaccgttacgcgcagccccgcccccgcggcctcgtcgctcctgctgaggcggtagccgcttttcgtcgactcttaccggttggctgggccagctgcgccgcggctcacagctgacgatgggggaccccagcaagcaggacatcttgaccatcttcaagcgcctccgctcggtgcccactaacaaggtagcggccgcgggcgagt

SEQ ID NO: 28661 - DNA, 2300 bp, Homo sapien
ttgctctaactctccaactggaaaagtatcacttctacttggggaaactgaggcctagagacaagctgaagtttccaagctggcccctgagggcagggcaggagagggaagatgggcagttagaggccctgccagatctctcacggggggggccgtgtgatccagcctcagagtggaggttgcttcatccagctcagcggggaccgtggtcttgccatggtgtttgggcagtgactgaggccactggcaccaggagcctgcttctgaccccccaccttccctcccaaccccgttctgcctgtttctctgcagcctggggctgtgggccgagccgggtgtccgccctgcgctgtagggctccaactcctcagaagctgggagcaggggacccgccacccctcagacaaggaggctgcgtgacaaggatctgtcccatacccttgctgagctgggacaaagccacactgcaggggcagctgcctgccttgctcctcccaggtgctctgtgaggccccatgcccagctggcgtgcttttctgggcagccttcccagggctcggtgagcgtggccacagccgccctcacgtcttgcttctctcctgtcttcaagccagtccaagcctcctccctcctcagtttctccagcgagggagggggtggttcctcagggatttcgctcagtgctttgggctggctgagactcctcaagaaaccctggctggctcttggagcctctgtttcctcctcggtagaatggaaatggggagacttgcccataccctgtggagatgtttggagacgcagataatgtaagtaaaaagtggagagcacacagtaggtgctcaggaaaatgtgctcataggagagttatgggtgatgtcagtcttgtcctgctgtttgggctggggcaatagagaggcgccagccgatgcccgcaccatgtggaagcccaggtcaaacagcagcaggtctcggggagaagggaaccccaaggggctcaggtgcctcaaatccccaacctccagtttggcaggggcagtgggccgtggccttttgggcaggggtcctgtgccctggatcttgcccagctccaaagctagtaagccccagggaggccacccccgccaagtgaagtgggcatgaagacagatgatggcgaagggacttccatatgcacgagatcaactgtttattgatttttttcctcaaatactacacatgtaaaggaactgttaaactgaaaaagacttgacaatttttggtaaatccgtagcacagaaatgaggatttctgctggtaagttctcaggacagacacagacacaggtccactttccaagcaagacatctgctcactggaaacggagtgaatgcatagctggtgacggcggcgggcactgctgagtcacgtgaaacacaggttcccccacgttccccccacccccgccggcccgcgtggcccccgcgtaactctggctgcagcacctgctcccgggcgactccgggcagcccgagacactcgtgctgcgggtaagacccagcttctgtttgtgcacaagtaacacgacgactgaaatctgcaactactgcaaagacgcgggcacttttacagtgttctgctacggagccaggacaaaggccggtcagaagccggaccagcagtcagctggtgacgacgagcctccctccagcaggcaccacgtcagagaggccccaggcccactgagcccgggaggagacccagccggccagccagacgtgtgcctgaatgccacagacttcaagcagtttacaaacgaaactcactgttaaaagctgttaaatctcattaaaacagtagacgagtgctttagattctctgaatatcaaataatatatacagatagacactgagacatgacagtctaatctaaagcatctttacagatgcatttgcttgaaaagttagtcttctttttaactctgaatcagtgataaaattgttaatttgcaaaagagtacagttttaagcaagaatagagtgaaaataatttttaaatatggcgatttgggggagttctacctaaggttctatgtaaagcttccattcagatgcccaaaagcacaaagagcattcccaatagaaacccgaccataacccggtcccaccttcctggcataattcctttcctcaaacatctgccacctgaggctaagcctacacacggcgtggctgagtaacagggtaagggaatagggagatcgtttcctcaagactggtgcgcatcaatctgtgccataatttaagtagaaatgaacagg

SEQ ID NO: 28662 - DNA, 2300 bp, Homo sapien
tgttttgtccttatagagacaggatcccaccttgttgctcaggctggtttgtaactcctgggctcaagcaatccttccacctccacctcccaaagtgctgggattacaggcgtgagccactatgcctgacccactccccttgtttaagggaaacttttgctattaattttatgcttgatttaagcctattagtttcagattgttgcctgacaattgagttccctgtttgtttttccaaattactggctagttcattttatgtgaactttttttagaaataaaagcactgtcaagttagaattcatttatcagtttgtcacacgaaactggctccatattcttctctacagtagagtgctttggctctagctgatacctttgaatgaaatagaatattttcttgagaaagcggcaccatagttgagtgcatagatgcccagaaaatatttgaaaaccaaatcctctcatggtttgtacttaaaatttttttttagagatgggatctcactgtgttgcccaggctggagtacagtggctactcacaggcactatcatagctcactgcagcctcaaactcttgggctcaagtgatcttcctgcctcagcttcccaagtatctgggactatagatagtcatgtgccaccacacccagctcgtgtggctttttaaacttcaaaggcacatatttatagtactggttgagaaggtatttaggtagttcacttctagatagcgcttctgatgggtgtgacctcttcttgtccatgcttacctagcattcttatggtgggcttttatcaggacattctactttttattgctggtaggtaaatggagcagaagtcactcttgtggtggagtaactagtgacttgagctggtgtctgatcttcagcgccctgccatttgtcagtcccctctcccctccttcacagccacagcagcttcccagggtttgccctccaggaccagcgggaccctgcactgggctggtttctaactcccctttgtcacacaggttcctctacctgggatgcctttccttgctgctcctgctgaagaattcccactgaaacatcagccctgggcaccctttctggaccctctatgtgtccccgtagcatgttgtgcagaactgtttcctagctcttggccgctgtgttggaggaggttgttcaagtgtccatcgaccctgtgagaatggagtgccccagtgtgggggcacctggcttacgggctcaggagctgggctgccgtggagcctggccccagtcaccttctccctggccaatgcttgtggaaggtccccatactccaggcactgtgccaggtcccagccggatgccatttgatccgtgcaacctgtcaggcagattggattctattttacccatgagcagtgtcaggcgcagagctcttaggtattttgcctgaggcagctggatcattaagaggtccccccccccacccccaggggtcttgtgaagactcatagatgcagatttcagagaccttctagatttgtgcatccaggctagcgtgttctttggtgttgtcccctcttgctgtctctcatattcagcttgttcagaccagggcttcagctcctcttgaggattccactcatcagactgttgggtagggaagagcctctgaaacggctgcctccaagcatgggaagaggccgctcctcttttgtggacaaagggccacagaggccctttgtgtgacaggaagtcctgcttctagaaggggctgcctgaaagtggaggggttgaaagaagctgaagcgttgacctggggccactctgactcatgcatgttgtcaataatactctttgtctgtcttgggaacctggcacagcagacctcgaaggtggcctggagcattcctcttctccctccttcctgctcactctgccgcctgtgaatgcccctattttctgacctgaacaaagggcagcctcctgacccattctatattttttccttctatttatgccaggagaatctttctgtctcatctgggcctgtgtgagttttcttttttagggtttaagtgcgtctcttgagttggaaaacttgcagcttaagggagagctgtcccactgggcaggtgcctctgacggagaggaggcgtcgtcgggaagtatgtggccgtggctgctctggcatgatcctgaagactggcacgaaggggaatggagccgcacagagaatttcaggcatcagaggggaagcgcaggtacccggacccacggcccagctccctgcaacatggtccacatgtctcctgtatt

SEQ ID NO: 28663 - DNA, 2300 bp, Homo sapien
gtggatttaactaagccaaccacaggatatagtgaaatatgtgttgacttctctgcttttttggtgacgggctgtgtggggaggggtggtaaataatttctcaagtagtgtaaattattatcatatgtcaagtaatagagtctcatgttatgtggtctttgcttttattggtatttttccattaaggaatttctttttctcttttttttgagacaggatctcgctctgtcacccaggctagagtgcagtgacgtgatctcagctcactgcaacctctgctccctggggtcaagcgattctcgtgcctcagcctcctgagtagctgggattacaggcatgtgccactacacctggccaatttttgtattttttagtagagatgaggtttcaccatattggctaggctggtctcaaactcctggcttcaagcaatccatttgcctcagcctaccaaagtgctgggactacaagtgtgagccaccggcccagcctaaggaatttctaaacacaagatttttttttttttttttttttaattgatcattcttgggtgtttctcacagagggggatttggcagggtcataggacaatagtggagggaaggtcaacagataaacaagtgaacaaaggtctctggttttcctaggcagaggaccctgcggccttccgcagtgtttgtctaaacacaagattttcaaaagagatttttaacctacttcgttttgtgttataaggtaagactagatggctgtttttaactgaacatttttgaatgaatatgagtagcaagaacactggtaaatagtgtatatccacttagcacagtttccccttgcagtatgttcttttgccaattacgtattttcccatccctacatacacccgcttgggccatgttgaaaggaggaaccgccctgaactggccctgccctggccattaccacttagatcctggcttgccaaggggaatgggggagtgtgcatgtgtatcttctaggagggcacctagcagaaattgatcccttgaaatatttgtttcctgtctgtttttgcaggttggtttccatatctactctttcctgtagtgtctgtattttttgttactgtatgagattttaaaaagtgttattgaataatatgcatacctaaagtgcacagatctcaagtgtacatatcagtgaattttcacaagcccagcacacccatagccagtttaagagccacagcacagctccaaaaccctcctggcaccccttcctgcctgcctcctctttctcttccctgtcccggcttcgaagggtgtagattagttacgccttttcttgtgctggatccaaagggaatcgtacagcatgtattcttgtaggcacaagcattttaaaatctttctctcctcacctaaagctttattgtttttttcttcactttaaattctttgtaaaaattgaagaagcgaggtgtttttatttccatgtaatcacagttgcgtatttgagtgtcctagttcttaggagacagtcgtgctgctgagagaccatggggtcacctgcctgtctccaggggactctgtgtccccagtcctgtctcctgcatgaggcttcctgttcatctgctgacaggcattgccttgttgtgtgtagtcacagaaggaagttgacttccacatgtagggacagtgtaagattatcctgtgcaagcaagtccctgtcccactgactgctgtgacgcccctcagatgcagagagagcatgctgtcttttttctcttgtaagcaggaggatcccaaatacaagaagatattagaagactcatgtatggtgtaagttagtttgtatataatttgattttttgtgtgttggggagggggtagtatgaattttgttctcagacctcttctccctgattttccgtggaaatactgaaatttctctttggccactttctgaaaagagagctcttctgtgatggccacagcaggcaggagcgtgcagtctgggaacctgggactgtacagcgaatgcagcagtgtatgggaatgaccttatctcggcagccaacaggaaatgatgaaatgtgctgggagaattcagctgagagacagaggtcagacatgccagcagggttggaaagaggcaggtacggaagctgagctgcagagttagccggcatctgacagaaaaatgtgagtgtgctgtggaaggcttgcatttcctttaaggtagacctctttgaaagtagaattttcacggaattgttttctttctcactgagtgactgatttaacagaactctcaccttc

SEQ ID NO: 28664 - DNA, 2300 bp, Homo sapien
ctgggataacaggcgtgagccactgtgcctggccaaatccccatttatgtattcagcaaatttttgaacgcctgccatgtgctaggcacggttctaggcactggagttacaacaggaacaacgtagtccatgatcttacattctggtcagaggaggcagagcgtgattaaacacccccagcctggtgtggagggaaggccagcctcagtgggcgggagggtccaagcctcatcccctcctgccagggctctgcttgttgccaaacctcccagcccccttctagccttcacttccctgaactggtttctgacttcacaatcgttatcagaattatttttaaaaaatttaatgtttattgaggctcattttgtgccaggtgtcctatttttccttgcgtgattacacttattctcatgacaactttgttttgcaagtgagaaagctgggcctaggcctcatacctaggaaatgtgatgtgtggttttgatcagcatgcagcttgaggctgtagaactcagtaagccaggcctgaggacaccatcagaaataccaacaaaaaattcagtgtgtccattttggcctggaccgtctctattctctgctttttttccccctgattgagacagggcctcactctgtcacccaggctggagtgtagtggtgtgattgtggcccactgcagcctccaactccagggcttaatgatcctctcacctcaccctcccaaattacaagtgtgtaccatcatacctggccaatttttttttttttttttttttgcggcagagtcttgctctgtcacccaggctggagtgcagtggctcgatcttggctcactgcaacctttgctgcctgggttcaggcgattctcctgcctcagccttcccagtagctgggattacgggcgtgtgccaccatgcccagctaatttttgtatttttagtagtgatggggtttcagcatcttggccaggctggtcttgaattcctgaccttgtgatccacccatcttggcctcccaaagtgctaggattacaggcgtgagccaccgcgtccagtgtcatacctggctaattttattattttttttttgagacggagtctcgctctgtcgcccagcctggagtgcagtggtgcaatctcggctcattgcaagctccgcttcccaggttcaagccattctcctacctcagcctcccaagtagctgggactacaggcgcccaccaccacgcccagctaattttttgtatttttagtagaaatgaggtttcaccgtgttagccaggatggtcttgatctcctgaccttgtgatccgcccacttcggcctcccaaagtgctgggattacagacgtgagccaccacgcccagccaatacctggctaatttttaaatttttctggagactggggaagggggcaggtctcactgtgttgcccaggctggtcttgaactcctggcttcaagtgatcctcctgtcccggcttcccagagcgctgggattacaggtgtgggtcactgtgcctggccactgtttcttttaacaatcaaattgcctttctcaaggaggaaaacatgggtggaatgtgctttaaggcctctgtctggtggacattataggcacttgaagttaccaaatctgtatatttactgttggcaaaattgcatgatcccatccttatttccaaataattgccgcgtgaatgacattggaaatgcacatttagttcttgactgagtagttgtatacacactctggtttttccacaccagacacttgctctcttgctgtgacttttaaggtcctgcccaatggacagagtaacttcctgaaaagttgctttaaaaaccttgtctcctcagtggacggagggtgcaatgaaacaacatttgtcatcctgactcagtcccaaccaagcagaacctttattgtgactggaggtttgcaagctgccgtcctcctggcaccaaaagcagcctgttctttaaatatttgcattgaataactttgtagctctgcttccttctaaggcttgccacacttcatgtcagaagcagagctcctcctctggagttattgtgaaacatgactgaatgccagggtgcagtttctctgcagtcagctcactttatagaggaagaactcggctgcttcagctcaatgtgagttaaacgttgcagtgtccagtcttgcttcctggcagttggggcccggagcagccccgaggcggggaggggggacattgtcccctttgactatgtgattgttggaagcagggtcctgagagggagtccaggagg

SEQ ID NO: 28665 - DNA, 2300 bp, Homo sapien
attccagcctgggcatcagagtgagaccctgtctcaaacaaaccaaaacaaaaacccccaaaaatttgggagaggctctgtatttctttttttttttgaggcggagtctcactctgttgcccgggctggagtgcagtggcgcgatatcagctcactgcaagctccgcctcccgggttcacgccattctcctgcctcagcctcccgagtagctgggaccacaggcgaccgccaccacgcctggctaattttttgtatttttagtagagacagggtttcaccatgttagccaggatggtcttgatctcctgacctcgtgatccgcccgtctcggcctcccaaagtgctaggattacaggcgtgagccacagcgcccgacaaggctctatatttttatagggcatggaattgcgatgtaagcggaacttacccagatatgaaagtgctgagagctgatggctgagttctatctatacaaatggtccacaggtattgtgggtggcaaagaggtccctgttggctcagtcctggagaatgaggagagacttcttggcagtggtttgtcctggcactgtgtgttggttttttttttttttttttgagatggagtctcgcactgtcgccagggctggagtacagtggcgtgatcttggctcactgcaacctccgcctcccaggttcaagtgattctcctgcctcagactcccaagtagctgggattacaggtgcatgccaccacacccagctaattttttgtatttttagcagagacaggctttcactgtgttggccaggctggtctcaaactcctgaccttgtgatctgcccgcctcggcctcccagagtactgggattccaggcgtgagccaccgtgcctagccggttcttttgtttctttctcaattattgtcataaggacaatgccacagagcagtctagaaagtaaacaaccactagatttctttgtggactcttttctcatacctatctatatgtagcagcaattctacagtttctaccattttgtatctagctttttcttttattattattttcttttattttactttttagagaactgggtcttgctatgtggcccaggttggcctcaaactcctgggctgaagcgattctcctgcctcggcgtcccaagaagctgggattccaggtgcatgtcaccatgcctggctctatctggctttttcttttaacgttttagtttaagcattttcccatagtgctacacagtcatcattattattctcaagggttgggctgacctgggtttctaatcctggctctgccatttactctctttactccacatcacccccagcaagttacctggctcacccctcacctggggttcctctcaccatcctctccacctggatgacatgaagcagtgcttggacagcgcgtaggacagtgctcaggaagtgctctccattttccttcaagagtatttccctctgcagaacggggctaataccctatcatgcaaggtgattgtgagaattggaaagaatgcgtgtgcattgcctggtgccttgccatccaaatatattttattagagagagcagcaacatacgcccccccaaccccccgtttaaactaagcgggtccacgtggaatgacgcttttggcgcaagtcggaggagctcctaacgacattagcttctttgagtcccttgggagaggaaactttctgaaagactgtaggattaccttccctgaacttccggtcaggtgcggtgctgccctgccgcgccctcttacccctggatgccgacgaaaccgcaaaactccagccccgggaagcgcgtctcaaggaccaccaccagcgagcggctttgggagagtaatctgcgccaccctcgcagcccattaaataggcactccccgtttgattgacaggagaagtcaccaatgcgcgtcctggggctttccctcgtcctcacgcggggtgagccgcctctctactcatctggcccaatcgggggcgccggggaggctgtggggcggggctcggtgtccggtagccaatggacagagcccagcgggagcggcgggggcggtgcggtcgcggctggcggcagaagcggccgcaggggtctgggcagggctgggcagtgctgccggagcaaaagcggtagcgggagcccggccggagctgggtctggagacgccgtggcagcctgaacggagtgtgcgacggattgggaggtgagtggccgccgaggtcaggggtcgccgcgacggttggggcgccgcgggcgggacgcgggggcgctggtccgc

SEQ ID NO: 28666 - DNA, 2300 bp, Homo sapien
tagcagagcctcactctcacctagcaactgggtcaccagcaaactaaccacttggtgtgactcttccattaggactgcgtggccccggagcctcagaggccaacgttcccaaccagggactccacccttctcccagagggaggcaaaaacaacacaatgtaactgagaaccgggttgtaaaaaccggtggaagagctgggaacagttaacggggtgtctttcacttctgcgtgtaggagccgaggtggagccgccagctgtgcagaggacaccccctcctgggaggtaagagggctcgccagagccagcaaggcgtgcgggcagggtccctgtgcggtggtactggttgtttctgaggcaaacagaactccccccctttttttttttgagacggagtttcgctcttattgcccaggcttgagtgtaatggcgccatctcggctctccgcaacctccgcctcctgggttcaagcgattctcctgcctcagcctccaggctaatttttgtatttttagtagagatgaggtttcaccatgttggccaagctggtctcgaactcctgacctcagatgatccaccctcctcggcctcccaaagtgctgggattacaggcatgagccactgcgcccggccacagaactccccattttatacagtgggaaacaaaggtgcaacgaccccagggacaggcttgggaaacagctaataaacagcagagccaggccacaaggccaagtctgactcggggatctccatcccacacccgccatcaacagcaaacacattaaaactaaaccccacggctgggcgcagtggctcacacctgtattcccagcactctggaaggctgaggcaggcggatcacctaaggctgggagtttgagaccagcctagccaacatggtgaagccccatctctactaaaaatacaaaaattagccgggcatggtggtgtacacctgtaatcccagctacttgggaagctgaggcacgagaatcacttcaacccgggaggcagagattgcagtgagctgaggttgcgccactgcactccagcctgctgggcgacagagcgagactctgtctcaaaaacaaaacaaaacaaaacaaaacttaaacaccagggaacacacacaacacacataccaataagatcacgaagaaggaatggctgaaaagcccaccaattgtagtttatttggagtccagccaagtaccatttgtgttgaaaagacctatttttccctaattggcagtgaaacatcattaaatatatgtactcatatacacacacacaatatggcatgtacacttgacacacgtccatgcatgggcactgagagagcctgggcaagtcagttaagacccttatctgaaggacatacccttggtgccatttgggagaacaaactcctgttactagcattgcaacaaaaacaggtggcaagctttaaagataaactcaagacagcgagtgaaacttcagcaaatacgtgttaatacgaccatgagtaaaaggcccttcctggccgggcgcagtggctcacgcctgtaatttcagcactttgggaggcggaggcgggaggatcacctgaggtcaggagttcgagaccagcctggccaacatggtgaaaccccgtctccactaaaaatacaaaaattagttgggcgtggtggcaggcgcctgtaagcccacctctttgggaggctgagccatgagaatcgcctgaacccaggaggtggaggttgcagtgagcctagattgtgccattgcactccagcctgggtgtcaagagtgaaactccacctcaaaaaaaaaaaaaaaaaaaaagacccttcctaagaacagcactgtaactcatgagttattactcaaatgcatctgtccatctacccaccaactcaggtcctctccatacactcctgtaagtcaccgggctaccgggagactgcatgggaacaaccacgctcgcgcagcctgtcccgcagccatcgctcctcccacagctcctggctgcccacggcgcttccctgtagcaaacccagctgctgacgtcataaaaggcacacagccggacctgtctgtgctcatctagttccatttacaacagactcatccacaaaaccgaagtggtagaaacaggtctttttgaagccaggcgtggtggctcatgcctgtaatcccaacactttgggaagcttaggcaggagtatcgcttgagcccaggagttcgagaacagcctggccaacatggtgaaactctgtctctacaaaaaaaactttaaaaagtagctggggg

SEQ ID NO: 28667 - DNA, 2300 bp, Homo sapien
tttttgtatttttagtagagacgggtttccatcatgttggccagaatggtctcgatctcttgacctcatgatccgcccacctcggcctcccaaagtgctaagattacaggcgtgagccactgcgcccggccaatttaccactattttttaaaaagtggtgataacaccattaactcagcagagttcttgtggggattcattgaggggagctgtggccagcttcttagggtaaggccagcctcatgggcctgtgacctgtacagaaccataggaccccgtgctcagacaagccctgaagttagtttaatgctgctgtcgccatcttaaagttctttttttttttttaagacggagtctcgccctgttgcccaggctggagtgcaatagtgcgatctcggctcactgtaacctctgtctcccaggctcaaacaattctcctgcctcagcctcccaagtagctgggattacaagtgcgcaccaccatgcccggcaaatttttgtatttttagtaaagacggggtttcaccatgttggccaggctggtctcaaactgctgaccttaggtgatccacccgcctcggcctcccaaagtgctgggattacaggcgtaaggcaccatgccctgccttaaaattctttttttgttgttgttttttttaactttttttctctaagagacagagtcttgttctgttggccaggctgtagtgtagtggcgggatcatagctcactgcagcctcaatctcctaggctcaagtgatccacctcagcctcctgagtaactgagtaggactgctggctacgcccccatacccggctgattaaaaatattttttcttttttttttagaaatggggtcttgctatattggccaggctggtctggaactcctgacctcaagtgatcctcccatcttggcctcccaaagtacagggattgcaggcatgaggcaacatgctggaaggctacaatgtttattgaacactttactatgccaggccctaaccacgtcttgcaagccttcactcatctcctgggtttaaggtgagaacactgtagtcggaagccttgggacttctcaaggcctcacaaccagacagcagctgaagggtatgaattggcaatttggactccagataagtgttggttccactagatggtgccaaaagtaaatgatgatgcgctgaatgtgctctgggcctgggaggcggttgtgtgggagattataggaagtgatgttagcaaagctccaatcatcactaagaaagcacaccaccacccctcctgagaggcagcagcatgaatggtcaggtgtcctgggttcaaagccagactctgtcacttacaagttgcacaagtttgcataactctttaaattgatgaaattaaaaatgaataattgtatagagaattcgaggtaacacaggtctataacgagaataataaacgtcttttttttttttttttgaggcggagtcttgttctgtcgcccaggcttgagtgcagtggcacgatcttggctcactgcaacctctgtctcccgggttcaagcgattctcttgcctcagcctagccaggatggtctcgatctcctgacctcgcgacccacccgcctctgcctcccaaagtgctgggattacaggcgtgagccaccgagtctggcccagataaacactttttaaaaaaaattattttatttttatgttattattattattattatttgagatggagtctcgctctatcgcccaggctggagtgcagtggcgcaacatcaccatttcttcagataaggaagccgaggtagaaggggtaggagaggctaaacagcggattgagaccgaacccaggattcggacctaatcatcacaccgctctacctttctttttagacttaatcccgtgctccagacccttctcaatctcctttctgggccccgagagggtggacggcctggcatttcctaggatccaagccctgggcatagcggccgcccgaggtatggagcccaaaggagccccaggcaagtctgactccggaaatagtcgcagcgccggcggtcgcgtcctgggttgccagggcgccgccctggaagtagagtgcagcgcggggcggggcgggccggtgcgcctggcagtcggctgcgtactcctgcgagcgccggagaggggctggaggcggggcgagggcgcggctcgaggcatccctgcagggcgctcctccgagtccctcggcgctctgagcccacaggtgaggtcctgtcccccaggccgccgcctcccgggcaccgagggtgtg

SEQ ID NO: 28668 - DNA, 2300 bp, Homo sapien
cccaaagtgctgagattacaggcgcaagccaccgcgcctggcctagttttttaatttttagtagagatggagtttcgtcatgttggccaggctggtctcaaacacctgacctcaggtgatccacctgccttggcctcccaaagtgctggggttataggcgtgagccaccatgcccagccatctcttcctccttttgatcagcatattgtcttgggattttgcaaagtaaataagtactgtatttgcacccactctgcccttgaatcatccagtgtccccaaacggtccttctttctccatcttttctgctaatgtttactgaacatctcctacatacctggcactgtgcctccagccttaagacccctctgcaagcatctcacatatatcaggtctttcggacccatgagaccccgtgtcattgctttacctccctgagtctcaattttttcatctgcaaaatgcattcagagggaagcccccattatgaagggttccctgctcctgactgtaaggcactctgtggctgttagccacagtcagggcgagctgctttgtaggggttgatgtagtttggaggccctagaagaaaagactacagggccgggagtggtggctcacgcctgtaatcccagcactttgggagcccgaggccggtggatcacctggtgtcaggagttcaagaccagcctggccaatatggcaaaaccccgtctctactaaaaatacaaaaactagccgggcatggtggcacacgcctgtaatccagctactaggggggctgaggcgggaggattgcttcaacctgggagacagacgttgcagtgagccaagattgtgccactgcactccagcctgggcaacagggctagactctgtctcaaaaaaacaaaaacaaaaacaaacaaaaaaaccccacaaaagcaaagaaggtccagagcccggaaggcgggaggggctctgaagactttatcacactttacctcctctgttcctcccaacagcccagctcttggtaggtgctgttgtccatttcacagatgagaacattgaaggggaagtaattaccctagaggtgggaagaacagagtgagggtacccaacaggtagcaaacgacagagctgggggaggggaacccctgtccctgcccctcccctaatctctgaggggatcaagacagaagtaaacaagctttgccgtgcccaggacaattgttactttgttattccaggagcgctctgccttctcccacccccaatataccccagggctggagttaggtcctacccatccccgcgtagcaggctgcccacccgcccaccccgcctggaagctttctgatttctctgttcgccccgccaggcgctgtggggtccgtctcaccaggtctgcacgtgagccccctgcccccaatccctcccagtcccgcccgcctctcgcggacccggagccccgacgggagggggaaggcagtgggtgtgtcatgcagctggaaggctgcggacgggcggcagtggaggggcagccccctggcttcgggtatggatcactggatgctgctgctaaccaaatgtgaacctcggttttcatatttgtgaaataggctttaaaacacctaaatcccaaagctgccagcctaaggagcacacgtctttgaacgctggcttcacgctgtcatttaagtcatttcgtcctcttggagcctcggtttccacgtgggtaaaatgatcgtgaaaaaaagcaccgaggagtactttgagctcgaacggaggccatccgtgtaaagggccagattctgtcaatggatcgatccccccgatattgatggaaacccctgagtgcacgcccgtgctgggcgcaggggaaacagcgacgcacgggacaaaacaagcttgcagaacagcagggggcagagaggctgtaaacaagccaacgggctgcacttgtagcggttctgttgccaatgccattcagaccccagtccgggattccgcgctcggggtgcgagaggccgctcccggggaggggcgggacccgggcggggcgggaggggcggggcgcccgggcctattaggtcccgcgccggcagccgggccgcagacacgaagcctcccgggtggcttacagacgctgccagcatcgccgccgccaggtgagtgcccccgaccctgctgccgcccgctgctccgcccagctcgagcccggcggttagcgcccaggccgcggcccgggtgccgagcggctggaagtgtggggagccgtgcccaggttttaccgctccagcaagtcgctggcgggg

SEQ ID NO: 28669 - DNA, 2300 bp, Homo sapien
tcagagatacccatgaggtcccatccgtgggtggccccagaggtgcaagctatttcaaaaagaatcctggggcaggcccacctgtgggctttggtggaaatggtggacaaggggaacaggcaggtctgggggtgctgagcccccggatggctgaggctgaccaaggggaatggacaggtctggtggtgctgagtcccccggatggctgagcccccttgagcccccttcccacaggggttgcagcttaccttcctttgtgggaggtgagggggctctaagacctgtgtcctggtcccaatcctgaaaccagccctgctggcaccacccctctccaaatggggggactaagaagcccctagtaggccccccactaaaccacatccttgatcctacaccccacccgcattcactcccacacaaagactaagacactccccaccctcccagcttgctggtctgggcctctaccagggacctgtgtgcattccatcccagtgactacaccgggggaactcccagggaagtgggactcctaggggccctgagctgaggccggccctgggccctggccccacccacctgacctgccaatgccctgggcctacactccctacttggaggggatgcgggtgggaggggtacaggtgtgggctggcaatcagggttgggggctgtggtcctaccttctgttaccctgggaaacctcaggaaaatactgccccaggcttcatgtcctccaaccttgtccattaatggacaggtgcctccagttctaaaatccttaatgactaaaaatcctgaggctgaaaaaaaaaatcctgagcagaaaagaatcctgtggaacatggagctggtccctggcctgtgggaggtgccacatcagagacaggattccccagcagaaagcaacagcccaggtcaggcctgaccattctcttccaggctcagggtagaaactactgaggtcagctgctcctgggccttcacgttcctcatctgtaccaggggaagaatgaaagtgccagtcctggccgggtgtggtggctcacgcctgtaatcccagcactttttgggaggccgaggcaggcagatcacgaggtcaggagatcgagaccatcctggctaacatgatgaaaccctgtctctactgaaaatacaaaaaattagccaggtgtggtggcaggcgcctgtagtcccagctactcaggaggctgaggcaggagaatggcgtaaaccagggaggtggagcttgtggtgagcagagatcatgccactgtactccagcctgggcgacacagcgagactccgtctcaaaaaaaaaaaaaaagccgggcatgctggtgcacgcctgcactcccagctactcaggaggctgaggcaggaaaatcacttgaacccgggaggtggaggttgcagtgagccaagatcatgccactgcactccagcctgggtgacagagactctgtctcaaaaaaaaaaaaaaaaagtgcaggtccttcctgccgctgggatggccgggtgtgcctggacatctgggtatgctgccgtgtgctggacatagctgggagcagttggcagagtgcaagggtcaggtcctactggaccttggcccctgaaaccccaggcaaatcctgctgcctccagggtccttgtcagtccaaggaagatcccttcttcatgcctcagtgattctttgaagccgggaccaggaactgcatggcctcctcaggctcttccataggttctggttttctttcttttttctttctttcttttctctttctctttttttgtgaaacggagtcttactctgttacccaggctggagtgcagtggtgcaatctcagggctcactgcaacctccacgtcccgggttcaagtgattttcctgcctcagcctcctgagtagctgggactaccagcgcccatccccccacccccggccccatacctgggtaacatttgtatttttagtagaggttgggtttcaccatgttggccaggctagtctcgaactcccaacctcaggtgatccgcccacctcagcctcccaaagtgctgggattacaggcatgagccacggcgcccggcccggttctggttttctaaaatgagagccgtcagaggcagttgaaccagagcgactccatcttgattaggggctgggtaacaaaaggctgagacctactgggttgcattcccaggaggctaggaattctaagtcacaggatgagataggacatcagcataagatacaggttacaaagaccctgctgataaaacaggattcggcaaagacg

SEQ ID NO: 28670 - DNA, 2300 bp, Homo sapien
agtagctgggattacaagcatgagccactgtgcctggcccagagacccctttgtttgtccctttccggtgaaaccccagatgggtcccaaagtgggggaggggcatcacccagtggctagggaggtggaggggacctaaagatctgtttctcaaaggcacctccaaacaatcctctttgttttagccttctttcactcttagatctagaagcagcagcagctgctacctgttcttaagtttttgaggattctgttgtatgcataaggattggctcgcagccttccccactcctgggagggatttagctgtctgagatcagctcagtcaggtaataccagcctacctgctttccagcttccagagattctgctgctggcggtcccctttcctgttcttcctgtccttgtggatttatatctttaaatatctctttgttgtggatttatgggcttccagaggcagtgctctctctatgcgtcttaacctgaaagtgtcctctgtgtgtgtgtgtgtgtgtatatatatatattttttttgttttttgtttttttctggagatggagtttcattcttgttgcccaggctggagtgcaatggcgcagtctgggctcactgcaacctctgcctcctgggttcaagcaattctcctgcctccgactcccaggtagctatgattacaggcatgtgccgccacgcccagctaatttttgtattttttgtagtgagggggtttcaccatgttgaccaggctagtcttgaactcctgaccccaggtgatctgcccgcctcggcctcccaaagtgctgcgattacaggcatgagccaccgcacccagccttttttttttttttgaaacggagtcttgctctgtcacccaggctggagtgcagtggtgggatctcggctcactgcaacctctgctgcccgggcttaggggattctcctgcctcagcctcccgagtagctggaactataagcgcccaccaccacgcccagctaatttttgtatttttagtagagacggggtttctccatgttggccaggctggtcttgaactcctgacctcaagtgatccatctgcctcagcctcccaaagtactgggattacaggcatgagccactgcgcctggccgagcctgtgtctcttgagttgcttttaggttaacattagataaccccaatttccaacctccattctgtcactaaccacctgtcactcaatctctgagcagctatccatcacagcgttgctgtgaggaattaaataagctaatatctgaaacacattcaaggctttgttcaatagcataaagatctattggatgcttattatgtgccaagcactgtgtggtttgtaagaaaacattataaaagagagctgttgtatagttgggaactggcaacggatggtcggccatgccaactcctgtggttgggaggatcatatgcaagaaatgtggttgctggccgggcgcggtggctcacgcctgtaatcccagcactttgggaggccgaggcgggtggatcacctgaggtcaggagttcgacaccagcgtggccaacatggtgaacccgtccctactaaaaatacaaaaattagtcaggcatggtggcgggcgcctgttaatcccagctactcgggaagctgaagcaggagaatcgcttgaacctgggaggcggcggttgcagtgagcaaagaacacgccactgcactccagcctgggcgacagagcaagactccgtctcaaaaaacaacaacaaacaacaacaacgacaacaacaaaaaccatcaatgtggaagagtttcaagtgctcttcatgtgccaggtagaaagcgtaaatactacattgcgttgcgttatttattccataaatatctgttgaggacccactgtggtgtggcatcgtgttccgttcaacggctatggctgtttaagtaaacgcatgagtccctccaggaccccagaacgcagcccgaagggcctcagagccggggcggaaccagcgtctgcggaacctttcttcccgctcccggtgccccggaagccccggcaggaaatgcgtcagggaccacgctgcgccgcgccgccgcagtcgggcctcggtcgccacggtaacgcgcgcgggcaggtgtccgaccatgagcgtccgggtcgcacgggtagcgtgggtcaggggcttgggcgccagctaccgccgcggcgcctcgagcttcccggtgcctccgccgggcgcccagggtgtagcggagctgctgcgagatgcgaccggggcggaggaggaggcgccctgggcggc

SEQ ID NO: 28671 - DNA, 2300 bp, Homo sapien
ggttggtctccaactcctgacctgaagtgatctgcctgcctcggcctcccgaagtgctaggattacaggcgtgagccactgcaaccagccacatgtgtgtcttatttttattttattttattttttgttttgtttttttgagaaagagtctcactgtgtcacccaagctggagtgcaatggcgtgatcttggctcactgaaacctccacctcccggttcaagcgattctcctgtgtcagcctcctgagtagctgggattacaggcgcctgccaccatgcccagctaatttttgtatttttagtagagactgggtttcaccatgttggttaggctggtggcgaactgctgacctcaggtgatccaccggcctcggcctcacaaagtgctgggattacaggtgtgagccaccacgcccggctaagaagggattttttttttttttttttgagacggagtctcgctctgtcaccaagctggagtgcagtggcaccgtctcagctcactgcaacctctgcctcctgggttcaagagattctcctgccttagccttccaagtagctgggattacaggcacacaccaccatgcccagctaatttttgtatttttagtagagatggggtttcaccatgttggccaggctggtctcgaactcctgacctagtgatccacccacctcggcctcccaaagtgctgggattacaggcatgagccaccgtgcctggccagaaggaattttaaaaaagaaaaaaaaaaaaaaaaacaaagctgccaggtgcggtggctcacgcctgtaatcctagcactttaggaggccgaggcagtggatcacttcaggtcaggagttcgagactagcctggccaacatggtgaaaccccatctctactaaaaatacaaaaattagccgggcatggtggcaggcgcctgtaatcccagctaccgggaggctgagggaggagagaatcacttgaacccaggaggcagaggttgcagtgagccgagattgtgccattgtactctagcctaggagacaagagcgaaactccgtctcaaaaaaaaaaaaaaagaaacccagaagaaaaagatgaatgaagaatggaaccaagcctgggttatccttgtcttcaggccaacacagtaaaaaatagatttatgtatgtttgttttttaatagaggaagaggctcacaaaggcaaaaatgccaggtcctaggaaagccatactgcagcctggctggtccccaaggaggctcctggcttctgtgtctgggtagaagtagccacagttctccttggaccctgcaggatcagtttgggccaacgtggctggttcaggctgatggggcgttgccaggctgagttgtctggagggagctgggacagccttgaactgcagcaagacagccatagtgccaagggcctggggctggacacaccctgcatgggagtggacctgggcagctggaggccacctctgggctgtgatgatggcagcctcccctcactgagcgccgagcatctgaggggtgtcctgcctgcatcaccgcgttgcggcctcatcagtcccacgactttgtgcccattttacagatgaggagatggaggcccagagagccagtcagaaagtggctgggccaggactaagagtgcagcgcgctgcctccgtgccctgcgtcaacagctcaaggaactggggtgctccggaaatggggccaaggctgctgggcagcaggacgctcagggccttggcctcaggagaggtaattccccactcggagatcggtcttgttgctgcattttatagatgggaaaagtgaggctagaagagacgacaaacgacacgccgttggacacacggcaacgttttagatgttgggtctggccgggcggccgtcaccggtcaccatggggaggaggaggagccgagagacttgctcgcggccggggggaggcagaagcgcgtcccgcgggagaggtggctttgaggagtgagctcccggtcccgcggggacgcgagtgggcccagtgcccgggctgccaggcggggcggggcggggccgggcgactgagaggggcggggcctggcggctgggaggggcggggcggatgcggggacagcggcctggctaactcctgccaggcagtgcccttcccggagcgtgccctcgccgctggtgagtgaggacgggacgcggagggggcagcgggaagtgggggcccgcatggctgcgactcttggcagcgccgcgggacagagggaaactgaggccggagccgcagactggacacccgagggggcga

SEQ ID NO: 28672 - DNA, 2300 bp, Homo sapien
tcggggagctgggtgaccgggtggaggtagcgggtgggtgatgggccctttttggaatcagaaaatgttgttggaaggcaccctccatcactcacccagctagcggcccttggagcccatctcccttggtgttaattggcggtgacttgccctgcccacctcagagttctggtgttgcccacagtaatggatgtgaacattctttgtaaaatgggcaccaacatgagaaccaggtgccatttttatggacctgcagaggcttcacagctagcacctcactcacctccaccccagctcagtggggctgtggggctcccccagccacacagacaagggaacaggctcccgcctgagcagcaggtggtcctgccctgagccctgaacccctagttgggaaggctgagtgggtggcacctccctcgcagggacaaggccgctcaagaacccatatgtgtctgcacacttgtcttccagggcctttgcactcaacgacctggatgactacgagaagcacttcacggtcatgaactatgacccggatgtggtgctgaagcaggtagggcctgagggaggtgcagagcaggttcacacagaggccagggcacacccgaccccaccccgcccacactgcctcctaggaggactggcacacaggccagtcccaggagccgcctcctgagttcctgctatggaaggcgattgttagcgctgccatcatgagccaggctgggttctgtgttgtctcaggtaggtctccccacggcacagagggccactggctgtgtttgagataatgtggacacagagggggatgggtccagcagcaggttgagacagtgtgttcccagccggggcttactcctcaccaccacttcaaccggaaaagcagaccaccctgtgagtgccagggcaggcgggggcggggaggccccacctggtccggctggctgctggcccgtgaccctgcccgggtctaggacctcctgtcctccctggtgcacagtgttgagcggtgccccatgcagtgggcactcagtgaatggcagctgcaccatctgagcacctggagctcaggggcatctggacaaaggcccttccaaggtgggggcgagaaaccagagctggccagccagtgtacgtggacaggtaggcacagcctgcacagaagcaggaggccagctctgggtacaggaaggaagaaaggaagtcctggaaggcctctgtggcctggctggttaatgagtgtttcagatgcacagaacacctaccccaccctgcctgtcgccagccttgcaggtgccgcggactccccatgcagccagccccaacgctccccgacccctgaacgtgtggctgtcattcccaggcatgtctttggttcttttcagcaggagtatgttcctgaccattcaagctgctgttttgcttacttaggttttttgttttgttttgtttttttgagagacaatgtctcacgctgtcacccaggctggagtgcggaggcatgatctgggctcactgcaacctcaatctcctgggcccaagccatccttctgcctcagccccctaaagtagctgggactacgggcacgtgcctccacgcccggctaatttttttgtatttttagtagagacggggtttcgccatgttgcccaggcttgtctgaaactcctggactcaagcgctccgcctgcctcagcctcctaaagtgctgggattacaggcgtgagccaccatgcccggcctcctacttaggtttttatgtaaatatcatcttattcaacggatccttctgcagcttgctttgttggctgagtggcgtgttttgaggttttgaggttcgggcttgttgctaactgtggcggcgattggtcatctgaggtcttcactaatgataaatcatggcgcgtgaacatgcgtggaggcacctggccatgcccatgtccgaggagtcctctaggaggacttggagaaagggccctgccatgcactggtgactataccagcacacactccccacaggggccgagtggtcctgttgcttctgtctgtcttatccttgcctgtgttgaagcctactccctaggacccagaccccccagcagggccccaggacattgttggaagtcgccctcaggttctgagcccctcccttctgtactgtgggggtcatcccgggagtcctctcctggagctctgtgcctggggaggtacgtccagcatggcatggatggcgggcttccataggggcctttcctggcttgttcttttctgggagaaacctgagccgactgccacc

SEQ ID NO: 28673 - DNA, 2300 bp, Homo sapien
taatgaaaagaggctggaaaagttggcagtgccagctcacacagagccttggagctcaggtgaagagttgaaccacaaagggttccaagtagggatctgatacaactgggtttacatttggggaggagcatgtgaaagaggactgccctgtcagagcctcacattctcctggtcaaaggggctgggtcaggaatgttcacataatctgaccagtacctgacacaactgagactcagtctgtcttccccagcgggaccgatggaagggttgtggaagcgggaggtgcactaggtgtgtaccactatacctggctaattaaaaatttctttttgtagggtcgaggtcttgctttgttgcccagcctggtctcaaactccttatttcaagtgatcctcctgtcttggcctcccaaagtgctggaattacaggtgtgagccagcatgccccatcctagcattgtgatgctgttttactatattatttattttgagatggagtctcgctatgttgaccaggttggagtgcaatggtacaatctcagccttggcttccacaacaaaaaccgaggaatcagggttttcctctggccatggtgaaaccctgtctctactgaatacaaaaaattagccaggcgtggtggcacacacctgtagccccagctacttgggaggctgaggcaggagaatcacttgaacccgggaggcagaggttgcagtgaaccgagactgcaccattgcactccagcctgggcaacaagagcaaaactccatcccaaaataaataaataaataaaatgtttttctctgcagccctcaccaacttgagtttggaaatttttgcctttgcagacccacctgcttcctacaatggaattgaacaagtccgtgaattggtgcattttattcaaactcagttcaaaaatgttatcaaaatagcatctgaagctccaaaaaattttcagcctttgttttttagcaaattacaattcttacaaaattgcaaaaaggaagacattgaaatgtatccctatggagcaataaaactcaatgagagttcaaaagagaatgtcttttgaaattctataactgaactgttttcttttaaagagggagtctggctatgttgccgaggctggacttgaattcttgggctcaagctatcctcccgcctcagcctcccgagtaactgggactacagacgcggccaccacgcccagctcaactgcacttcgaaacatcccgacatgtaggagtaaattcctctgacgggtacacttggtcttaattggatcaactgacattccgaatccaaatataagtaattgagaagggccacgattttgcagcatccaaatctggtgaaacgctcacaagaatcgagagctcccaaggcagggggcctgcgagctctgtgtgcccggtgcaggcacagaagcgccgcctcaccgggttcgggccccaggacaccttccgggccgtcggtggggccttttccggtcctgacagcgccctatacgtaggcaccccgccctcccggcattccccggggtcgccgcgcgctgagcgagaaaagctcagccaccatcaggtgcgcgtgcgcacacggcggcagccaaaccacaggcgcggtcgcagacgcgcgccccctcctggcaagctcgcgcgctctcgcacgcaccccgccgatgcgcagggcctgcccgggggccgcggcaaaccgggctggaggcggactgggggcggggcgggacggggtgagggggcgagaagagggcggggcaggggaggggtcgggggggccgggaggaggacggggcggtggggaggggggcagggggcgggggcagggggcgcggcaggggcggggggctggggggaggacggggcggtgggcggggggctgggaggaggacggggcgggggtgctgggaggcgggcggggcggggggcggaggcggggggggctgggaggagggcggggcgggggggggctgggaggagggcggggcgggggggggctgggaggagggcggggcgggggggggggcgctgggaggagggcggggcggggcagggggcggaggcgggagggcagggccgacggacggcgggcggcggcggcggtggcggcgctggagtcggcgcgggtgctggcgccatggaggccgagcggggtcccgagcgccggcctgcggagcgtagcagcccgggccagacgccggaggagggcgcgcaggccttggccgagttcgcggcgctgcacggcccggcgctgcgcgcttcgggggtccccgaacgtta

SEQ ID NO: 28674 - DNA, 2300 bp, Homo sapien
atgtcgggagaaagagagtctgggctgtgaccgagtgcatgtgtcccacccagccggaaggccagcgcctgggatggagccagcagaaccccatgccgaggtccaggaggccttgcctgctcttcatctgcctgcgagctgtaggacctgcatgggaaatggtctgtgtgtttcaggttaacaaatactgaaaatcccaaggaacctgggagaatctgaaaatgaactccagtcttcagctcgaagttgcctctagggttcctcctggtcacccccgggcccagcctggctggcgagaaacaaacacggtttgagaggctgtggcacactgaggaccacacagatggaggcagccaagtgaggtccctggaggttcagggcttggtgacgaggtaggccgtgatcacatattctacagtccaaaagagggcccggagctcagcaattactcacgccgtcacatgtgcccacagtagcgggctccgcggcgtggctcctgctgccatcagctgccttctctgctgaagtccaactcaagtcggagagagagtggagcctctgcacttggggagtaggtcagtgtcaactaacaagccctgccaggggccactgccgctcctctggtcacagtccacgcaggccagccctggtttctggaaagaggcctccctccctccctttgtggagccgtcagtcatccccaagatgagaggcgagcatcctgccgagtgagcctgcagcaacagctcctgaggaaggtgccgggaggggtgtcgcctcttcacgagtgttctccagagaatcagaacccagaggatacagacgtagatgtgtgaggggctgcattatgggaactggctcacagattctggaggccaacaagtcccacgatcggctgtctgcgattgggagaccaggagaagccacaccgtaactcagtctgagtccaaagcccgagaagccaggggccaccctgtgagtcccagcatccaaagccccgagaacgaggaagatggatgtcccagctcccaaagggaggattctcccttcctcctccttcttttctattggggccctcaacagattggatggagtggatgtcttcactcagtctgccaattcccatcctaacctcttctggaaacaccctagcatgttttcccagctagctgggtatccgttcacccaaccaagacgaccatgcaatcaaccatcacacttaaatgtttttgttttgttttttttgttttgttttttgttttctttttttgttttcttttttttttttttttttttttttgagatggagtctcgctctgtcacccaggctggagtgcagtggcgcgatcttggttcactgcaagctccgcctcccgggttcacgccattctcctgcctcagcctcccgagtagctgggactacaggcacccaccaccttgcccggctaatttttttgtatttttagtagagacagggtttcaccatattagccaggatggtctcgatctcctgacctcgtgatccgcccacctcggcctcccaaagtgctgggattacaggcgtgagccaccacgcccagccagggttttcttttttaatcctttccagaaacagaaagagctcttaacctctctgagctctttctgcaattcctttgggcgatttctgaaagttgccacccacgtactcacagatccactgcccgcctctcctcccctcatgttccaggactcaccaccgtggtcagaccatgcccagtgtgcccagggcaaagttggatgggcaggtgcagacgaggcccagccttcatcctgctttccctcgcaagcccttctatagctcccagcccacgggagaggccatgaggagcgcgaggtcgccagcagccccactgggcctcccacaccatctgagtgacttgaattccagggttgggctctgtcttgagtctccacatcagtctcacaccagggaacttgggggtcccccgttaaactacagctgaccctgggcctcagggcgggatggtcccaaggtgagctccgtggacagcaaagcgcatttcttccagttggcatgttgtcgaagccaatggcagcttgactgatgtgaggtggctattccacctggttcaagatggaggtgtagagaaaagggaagtggggaacaaggactgggccaggtaggacggatccacgtaacgaggcccaagaaaaaatggaagctgggggcagagagtccaggaggcccccatgctgtctgaggggaggccggcatagcccctcctcgactgtcgcct

SEQ ID NO: 28675 - DNA, 2300 bp, Homo sapien
gagccaccacgcgcagcttaaaactttcttttgtaagagtgttcaagggcagtaacagaggtgatgggctccagctcagatccctcaagctgcagggggtgctctgtaaggctggcccgctccctctcccctgcctgctggctcctcacctggagcccctgccctgcctcgtttcttccccgttcctctcccttgattcctgaaatttcccaggctggtcactaggtgtcaccgcaatcaagtttttctgcccccacggacctgaggtcttgcaccagagaagtcaagagtcaagagactcactcacctcctgagctttactccctcaaggcccgggaggctggaggtgtccttctttcctccctcaggttgccaggtttagcaaataaaaatacaggacgcctcattcaatctgaatttcaggtggacaatcaatacttcctgagtataagtatgttcaaaagttgcatgggtcatacttataataaaaaaaattacttgtttatctgaaatcccagtttaaatgggcactctgtattttatctggcaaccctgccctgccctccacagggaccctaaaggaagccatggcggacggacaggctgtctagtgccacccttagctcctactgccagagagctcaggcaggtgcccaggccatggcctgccacgaacagggaaaaggtctgtttttcctttccagcaggtgacgagatggagggcgcccaggcatgggggccaaggtggtagcatcccaaaagtgttcccacagcagccctgggaacccggaaggagacagtggtaagagcactgtggacacacgaacaggaggatctgtaaggctgtgagcagcgtccccgagccccagccagtgactctccaccactgtccacccacatgccgcagaaaggagcaggggctgcagagccacagcctggggctggagtcccggctgcgtcacaagcagtggcgctcacttcctctccctcagctgtgcatgaggggcggcagcgggtacttctcatggcccttcgaggacaaaaggggctcatgggctcggggcacagtaggtacgtttggatcatcggcaggtacagccactttggggacataagccaattcccgccaccgactcaaacttagtctggtgacttgtcgctgcactcaacagacaaacgtgtgggcgatctgtgatgtgccctgggggcacaggagtcaggcgctctgtgatgtggaggcgaggctgggcagcgggagggaaaggtgttctggagcaggaacaagcccatgcagaggcctggggagtgaggctgggggtctctgcgcttctgacagacaaactggggctggagaggcctcgtggagagaagccggcagacctgcaagctgaccagctgtggaagggagcaaggtgggacagcagtgcaggacccagcaaaccacgacgcgctgggcgtccctctcctggcggtgggctgggcacactgctctgcacgaggggtgtgaaggcactttgtgaacggatgatgcacacacttcgggcatgagtccctcatgagatggtctcatctcctctacactcccatgcggcatgttttcctctgcaccctgccctgtgtgagacgtgagaaacacaaggatgacttaaacacatccctgcccttcttgggagctcatggactggtcctgcagtagagggctgaaccatttcaaacacatgagtgcaagtaaagaggaagacgtgcacgcctgcctaagagtcagagacagcttcagagaggaggtgaaagtgcgctgggttttgatggatgactaagagttctccaggaagggaggggaatgggaaatggcagtaaaggcagaggatgacacataccgaggttgtaatcagtaaagggcacgtgtgccgtaacagggagaacaacaggcagatggggaggaaccaggagagaggaactggactgtgggaggccttgggaggcaggaaggcagcagtgcctgacaatggaggaactcggaggggggcggagaaagcgccccggctgcaggatgcaggagggaagggggatgaggcggaggtagggacaccaattagcaaccacaacctttgaagaaggcagggcaacaggggtgaggaagctggctgggtttgggaggtgagtagagctcggacgtgggatccggtcacactaggatgtgggagccacacaggggaagggtgaaggcagcaccccagcgctggtgccccactgatgggggacgcgctaggaagcacaggtctgggaggatgggaagatgc

SEQ ID NO: 28676 - DNA, 2300 bp, Homo sapien
ggcttacaggtgtgtcttctctccatttccctcctcctctgctcgctgagtcctccacatagacaacagctgcctagaaggaaccactttctctctgcctgcacaccttagagggtgataattcaccagcaaacttgacctgagcaatcgcttgggggcaggctggggactacaacttggtacaagggacagctacctctgggctgaggggtcacagagtaacctgcctccattcctgccttgatttgtggggatggagcctggaagaagcttctcttgctgccatcaagcttgaggggcacctggctagggctgggcgggggggtgcctaatgaccaggcacattagagggcattgtttcaagtaggtcagagccccctggaagaacctcccccaccacctcacactgcttgccctgttgcccaatgcacaagataatatgtggttctgagggaactccccaccccctgcagaaactcaaagctacacaattgacggggacaaaataaagcctgtcaacagcatctcccaaattaaaccagcagccaggagcagccgtgcagaccgaaatgtctggagcaatggggtgggggctcagtggagacaacaggcagcgcttccttcttctttgggcatctctggaccccccacacccccgatccccatgtaggggaccccttgcctcagccaccaggcccgtgccacaagctgatgtgaagtcagatggggtgtgagagctggctggacacagatttaaccttccagggctgaggagctcgtctacggtaggttggatgagggcgtgaagaagcatgtgtgagcgtgtgtgtgctggagggtgtgagggtgtgaggctgtgtctgagtgattgcacgtgagagcatgtgtctgcatgtgtgactgtgtgtgtgtgtgtgtgtgtgtgtgtgtgtgtgtgtgtgcgtgtgtgtgttgggggcaggaaagggagctggtgtggaggggctcaaactggtgcaggcagagtggacaaaaagagaaaagagttgtctttgagttgggcctggagagcaggagaagaaaaaaggagctcttattggtggttgtcaaggagatgggccttggggtttgctgaactttcgtcccttaaagcgtcctgcctggaactgagaggggccatttatttccagccgcccgtccctcccaggcccggtgggaccagacccgaagccaaccctcgccaggcgtcaggtgtagaccccaggccaggccagagcagttcctgggtcttcggaccgggatgcccgccctgcccctcctcctggccccgcccggtctgtcacagggggaggcctcggcctcgcattccgggcagcgaacttcgccggccgaggttagccccgtgcgggggcctcccgcgggaccgaccgccaagcggcattgtccgtcccgggcgcccgcccggttccagacgcaggtcctgcggccgccccgtgacaagcacactgacgggccactgtcctttgacgagtgctaaaaagttcgtttgttttgaacgtcaattttcaagtgatcttcacgaggtttcccctcccggttccttcgctgctgcctcgcccgcactcggtccccagtaggtgctcaagaaacgtccagcaaacggcagcgcaggcgagtctgctctgcgcgctggcgcgtttcactgcccacggatggcgggcgacctcacgggatccccggttcgcaggatccccgcccccgaggctgcctctgggccgggaggggttaccccagaggggcgtccactctcgacggcgggggccggggcgccgcgggcaggggagggcgcagcctccaagcagccccagcctggcctagaccccgcgcctagcgagccggccggccaggcccacaccccccacctgccgcccgccccaggggaagggtccccccgacgacgcccgagcccccctcttcctcggagggccggaggccggcgcccattggccggccctgggcgacgccccgcccctccgacgccacgggccaatgagcgcgcgctgtcagctcatcagccgggctggctgggcggctcgggagcccgagcggtggcggagcggcgagcagcgagcagcgcctgcgggagcggccggtcggtcgggtccccgcgccccgcacgcccgcacgcccagcggggcccgcattgagcatgggcgcggcggccgtgcgctggcacttgtgcgtgctgctggccctgggcacacgcgggcggctggccgggggcagcgggctcccaggtaagcccccgaccgaggtggggg

SEQ ID NO: 28677 - DNA, 2300 bp, Homo sapien
actgatcatgaataccgggggcagaggaaattaatcagccaggcaaagacttttaacaagtaaatattatgcacagaaaaacatgcaattagtggaggttagttaatgcctttcaagttgcatcaggctgcagttaagggtggaatttctgcgttatccctggattgtctgtcaaagtctttaatgtgacaatgtgacatgtctctcccatcgcccctccctcaccgggaacaaaaaagggtcttttcacgaattccccctttccattcttcttctccctgagatctttccgttcagcaataagtacctttgtctgcctgcccttctggagcaagggtcctggggcaaagggctccccaggtgcagaggcctgggaatagcttctcaggctccctccgtacccacagatcaaagtcgatggcacctccgataagaggtaggggccttccttctggcctgggcgcctcaccctctaggaccagaagtgtccaacacttgggggtggcagggagaagaggggatgaaggcactgtttcccacagcaagaaccgtttaatgtagcctggggcactccgaaagccattccctgcagccctcgttcttgctgtgtggatgtccccatgtaatgagaccatcagtgagcatcccttccagactgccactgaagttgtctgacttgagtttgaagaggtgactaaaatgtcaaaagcaaaaaaaaaaaaaaaaaaaaaaggaaagaaacaaaaaacccaacaggaaaaaaataagagacccctttttgggggtggtattggaggaaaggtataaattgcttctcagttaatttgattcaccatggttctccctggtgacctgacaggtctgctgccaacacaaatgttttactttattttgacttttttccccctaatgagacaagacttagttatactttatttccacttaaaatatctgtgaccaatgagggcagcccaatttcataaaaaaatcataacaaattgagattataggtattaattttgaaatcaaattgtgatttgaggtgttccgtggccttttcaggccttttcatgaattactctgtgggggattttcttggacctgaacttggccagcttaatgtcagaaccaggtcatcatcataaatagaagcagctgcgggaaaaaataaataaataaaattctcccttctggttgactctgctctgcatccagttcaaagccagggatgagtaggctcctctttccaccaccccaatctacacctgaaagtttgtttctataaaatgtgacttgtctgttgcccactttcgcattcccgtctcctccttccaagaaggatgtgaggctcagcgttgatgcacacgaagagacttttggcatcgcccaggctaatttcatcacttcaaggagaaaatgatgcctgcttccaatttctaacactctcatcgtttccccttcatttcattcttttgcattttccggacagtgctgcagtctgcaagcctgcaaaatatattgcactggctacctgagaaatgtaatcccttcctgcaacctgcctttcccttcttcctgacaaagcgctttttagtgtttcagtgttcacagaagaggcaaaggttctctcccctaaccctttttctgccctgggttccctgcacaatgcagtggttgggggctggtgagaatggagttttgcatttgtaagtttgtcattcaggcacgttagttaattgatcatacttgggaggtttcatccttaattgcaaattcctgcaccatcacaaaacatacacttgaactgatcataaaaatggcaaaaccccaatatcagacttaagtgtagaattgccatagtgctgatttgattatgcttcagtgacatctgtttaatagatttccacaagaactgtaaatccacatttactttctttgcaaattgtatttgaatcctgagcaaccacagccctctagcctcttcccctccctagccatgtatgtgctaaacccccattcctgttgagtgtgacttgatatataagcgggaaggggacacgatgctgagttttacacatttacctcctatttccttttgtgtgtggatatgtctgtgtgcatgtttgaaacagatctgaacagcttcccatttcaactccatagatacgtgactctccaagtgctttattttgaaaactaggacgtagcactttgcagaagaaaaatcagtccacttgctattatttatgtgatcgctgatctgctagatggatatagaaagcaccaagaattataataat

SEQ ID NO: 28678 - DNA, 2300 bp, Homo sapien
taacctgcacaacccccaggaggtggcattgctactatcaaatcttttctttcttttttttgagatagagtctcaaggctggagtgcagtggcgctgtctcggctcactgcaacctctgccttctgggttcaagcaattctcctgcctcaccctctcaagtagctgggattacaggtgtgcaccacagtgcccggctaatttttgtgtttttagtggagaggggtttcactacgttggccaggctggtctcaaactcttgacctcaggtgatccgcccgtctcagcctcccgaagtgctgggattacgggtgtgagccactgcaccgggcctcaaatccatcttctagaagaggaagctggaggctcagggaagttaggaagttggcttaaggtcacacagcaagtcagccatgctggggcttgacccccgtccagatctgggcgggcctggctcagagtatgcggcgtcctgaaacttggcatctggtgccctgagccctttcccaggccttctgggtgccgggcagcagttacagacaagaggggtgcaggcccctgctcccccacctacagttctgttgcgtagcacctgcagggagagccaattcactttgaaacaacccacaggacaaaacaatggcgcaagtgtgtccccaggaaaagggagatttttttcccccttgtctctgcaggtggagaagagggatatgttttgggaatcaggaagtgtctttagaggtctgtgggagaaggaggatattgctatttatttcaccttctagggagatgatcaagatttaaaaaaattaataacccatttctcctttgcacataattaaaatgttctccagtctctaatttttgtctttttcctaatctaatttgttttctgactgtgtcgattcttcttccaagcgcaaagcaaaggggatttttcttcatttaatgtgattgcgatatgagtgtccaggaatagtttaaatgatgttattttctccttggttaaatacagcgcaaaaggaatcgttggagggtcttaatgacccaaactgaaaacaacgacaaaaagtcttcaaggcatttcccatttacacagtttaaaaaataattatgaaaaggaacaagacaactcaatggtctgactaacgaggcgtcggccattgtgctgtgtgttggggtaggatggggcctcacctggggcctgcatttccaagtttctacagagttctacactgaccccaaggtggggtcggttggagggatatttaagtccagtaaatataaatgcaaactgcacttccccgtgaaaaagatttgaaaaatattgcagcattctcaagctgcaattcaaagattgacggggcacattagggttcccgagatccttacgagagagatggtagtgaggcatcggaggaggtttttgcaaaaggttcctcctccctcaccatctctgcccctacctgcactaccacccctgagccagtgggtatgtgaccatctatgtctgggaaaatcccttctcagggcaccactaaaagatatctttagatgaaatcgatgtcgagggaggaattttcgcccgtgctgtctccacctgctcaggcttgcaggggtgtgggcgtggggccatgtgggtgtgtttgggggtctgtggaggatgggggagggttgtaggagaatccttcctgttccccaattctgaaaagtaaaacttaactcacctgtttacaaaataccagccattgtcttaccccagctcactgtcaccctgtaggctcgggaggattttgttgaaggaaaaaaaaaatgtcttaagtatttaaacacgttgagccatgcatgcatccgtccacagtgctgtgggttgttttttttttcttttttttcttgtcccctccctcccttcccttttctttttaccaaagtatattcatcaaactgctgagttggaaagatttgtaatgagtttttgagctgtacgactgtgtttttttttcctctccccccgccctctccctctttctaaatcttcatctgacattaaataaagcaaatcccaaacagattaactgtcgcacggttctgctccgtctcctcagtctgtttccaggtctggcggggggccgggctgcggtggcggcagcggtgggagatgccggggcggccggcggaggtccatgtggcgctctaggtgggatgccagcgtcctgaaggcggaggccctggccctcctcccctgcggcctgggcatggcattctcccagtcccacgtgatggccgctcggcggcaccagca

SEQ ID NO: 28679 - DNA, 2300 bp, Homo sapien
agaccctgtctctaaaaagaaaaaaaataggctgggcgcagtggctcacatctgtaatcccagtactttgggaggccgaggtgggcggatcacctgagatcaggagtttgagaccagcctggccaacatggagaaaccccatctctactaaaaatacaaaagaaatcagctgggcttgttggcgcgtgcctgtaatcccagctacttgggaggctgaggcaggagaatcgcttgaacctgggaggcggaagttgcggtgagccaagatggtgccattgcactccagcctgggcaacagagtgaggctctgtcccaaaacaaacaaacaaataaataaataaaagaagaggaagagacacctggttcaggctttcactcggcctttcctgctggaatggttcttaccctgcgggcgcaggaaccagcgtggccagctcccacagcacaaagtttccagtatttgcgaagtatttgcgaagcaagaagtgaccgttgccggggtttgcggacccagcgaacacatggcaaggggcgggcctggaagggacccgccccccgattccctgactccatgcctcagtgaacacgcggcaaggcaggcctggaaggctgcattcccctggccccccgattccctgaccttacgcccattttctcccagtgggcacgacggtgtttcagtttccagggtgtcggcatcaactccagccctggattccacctcctttccccagcatgtgttaccgaagcgaatgacagagatccctgcggggaggcccggggcgcccttctcacatgctgaccagggcattgcaggatcggtgttcacgcaggctctgcttcttcccccggtgatgggtccgggtctgagagctggattcaagtggggaaactggggaggggattgttactccccattggggctactccgtgagggcagggcctggcctcccagttcctactgcagtctgtgcctggcacacagagccgaggctggagtgtgcagaggggagtagatggggccactctggaaggtctcagtgaggggctcccactgaccctgtgggcactgggtggaggacaagggggaggtctaagcagggaagcaggctctgatttgtggtctgggaagttggagtggggaagctgaggggcaatgaggctcaggcaggggctgcgtgggggtggtgcctcccagaccccttcaaatgggaccagctatgtcatatgtggggccaggtgcaaaactgaaattgcagaccccagctaggggtggggaggtgaatctcccttcccatgggccggccaccccaacccacaggtggccccgaggcgtcacactcaaccttagaattgggagtgggcaagaggcccccactcagccacctgctgagcacagcctggcactgccagtcaggcagggatggctgctgccttcctcattacctcccggacactcctgggcacatacctaaccccagtcctcctggtgcaggccccggctctggctcctgaggggcagaaagcaacagtggaaggcaggcctcccccgctgatgtggttcgtccccagcctgggtgacatgcaccaggggtcatgggacaaaggtggggaggggagcccggtggcactggggcaccagtggcaggaagtgcatggcaaagaacctgacccaggaaggcaggaaggggcaggagtgcagtggagggtgggacagctcaggagtcaaggtgccatgctccattgtttcatcagacttcacttacaaaacatctgttgaagatataattaagaataaggagaccacagcaaagccttaaccccaagtgcaggctccttctgtgcgctcggcccctggcagctgccctggttgcacgcctgagaagctggccctgtctgcaagtctgatgttgggcaaggccttcagcccctgttgcagccacagcgccctcctgaggcatgggcggggggtgccggccagcctgggaaggagctgggatagacacctgggctcgtccttcacacctccacggagatgtcttcaccgtctgagccgagaacacctgcccagagtcttgctttgggaagatatatttgcatatctgaagtaccagctataatagaaaagccgccgtggaaacgtcttcttggggtgcccccgatcgcaataacagtctgggtgcaccatgacagctttcgctatgcacacagtcacttggaaaggtaagcatatttgaaaagcggggtgggcggagataagacgtatttcccagcctttcaaacgcccttcattcgtgctt

SEQ ID NO: 28680 - DNA, 2300 bp, Homo sapien
tctgcccagttcgcatcacaaagagttgccttcacctccagaagcacctgctcaacatcctcatgagaaaattgcagcaagagtgaagaggagaaatgtgcttgagacagggactaaccacggtggactaggaaccgtggatgcagaggtggcactgtccctgcagcacgcatccctgcaccggccacctcctgccctgtcccatcagtgtgcgatctgttttctgggaattcaatgggatcaaccccctaaattggcctaggaggatgcacctggccgagaagctaacacctgagctcagacaaatcggaaaagcatgcatttaccaggaggacgagtaaatccttgagcaaatgatttctgggctggaagggcagcatgaaactgcaaggaacatgacatggcaggaggaggggggtgaccgtggagcaaggggtgaccgcaagcagttctggtcgtagtaaatgacagagtaggtgagagtttccttttgtcctgtttatttgccatcgggagcaggaggtggtggcagagacagaccacttgggtcctgcaacattggctgcagagtttaggtccctttgtctgaataaagaagaatcgctgaggactcctgagcgagcgagccagccagcctcctccagggcggctgcaggggaaggcagccggggaagaaccccagactgcattcatcattaacttctccagtttaaccccaagttgttgtgtttttctaatagaagagaaaagaagtaatgaataataggaatagttaatgcatcatccttaagctcattaaatatgataccacccatcctttccctctgggggatgcacaggaggtaagtaattaaaaggagattaccaaaatgtaattaagacagtcggcaactctccccgcaaagcaagttcaccgtgagtaatccccagccaaagcaatccattctcagagagagaaaaactggaattgtagttaagacattgcctaagaccttgagtaaactgaaagcacacagagagtaaagatgacaattttacacctactcataatccatttcttatattgggtatgccatcaaatctgtcttccaaaactcctattattcttaagcctcctctgcctgtcacagcagcacgtgaaaatgatctgagctcttctcacagcaagggccgcgggcttcctgcccctgctgtgtggcttgaccatgagtcctcccctgtcattgctccttcctcatactgctttgttaagcaccactcaaatcagacagcgcttcttaaagtgcaggtcccaggccgctgctctgcagaccagcccgccccagggctccatggtgggggagtccaggggtcttgctgtgcagaaggcctggggctcatcctcttggcactgtcctgggcttgagaaccagcccaggaggcacagaggcctgcgagcttccgggaagggaaggcgacgtgtgtcttttcagaccggagcaaggagttggtcccatgtgcctggaagccatcacatcccctttcaagatgagaagcactggcctagaaggcataaaagaggaacaaggcatcgaagcaaaaatgctacccagtggcttggtgaagaagccgaacaggaaaaaaaaaaaaaagagaacacctaaacggcagcacacacaccttctcatgagattcccacaaactgggaaaacatcatctggatttctctccccagcaaatacccgttcttcacttctagaaaaacattttacattcaaagtgccatgtgcaaagtgtagagtatcaccttgtttttagaaaatcgttcctgtttaacatttcccttaaatcttaaagtgcaatttcagtttcttcagtgagtataaaaataacactcagtgcagaaatagaatttttaaaagacatagtagaaacccatataaaatctttctactttattaccatggaaataatggaattttttaacaaaacacatccttattcaatacagagtaattattttgtcacattctagcaagcagagagccaatgagatctttcctcactttgcgtggaaatatacaatctctaaagtcattcagttatatgttaaataacttgaagatgttttttgttccaagagagaagtgaagaatgtagttttcaaccaaagggatggtaaagtacatcaaaatgtttgtaatcttttatgaacatcatatttatattcgctgccaacagtgttacttcaatttatctttctttttattgtaaatataatggtgtctacgtattttcaatgaatatggtaaagaatgggg

SEQ ID NO: 28681 - DNA, 2300 bp, Homo sapien
caagtagctgggattataggcgtgcaccaccacacccagttgatttttgtatttttagtagagacggggtttcaccatgttggccaggctggtctcaaactcctgacctcgtgatctgcccacctcggcctcacaaagtgctgggattacaggcgtgagccactgcacccagccgagtcacttgtttttcttgtgtgtttgttctaagtttctccatcacagtgtaagctccttgggaatgtggactctgtccacattgctagtcattgtgtctgcaggttctagagcagcacatagtgactattcctatgtatctgtgactaacgagctgactgataggaaggaaggctggatctgactgattgtcaagatttaacaagctgggcaataggagaggaattaagtaaccaccagaaaacctcctgatctctcaagagggccaagtatgtaaaatgaggaaggggaaaatggatggaaaatcagtaggattcattggtttgctcatggataactaaggaaataatcaagccttatattctagaaaagaaatcagggtgtgaaaagtagggggcatagggctgtttggatatgtgtttagaccatgagatcaactgggatctactgactttgctgagatagcacatgcccctcaggggctctctgacagcactttggggaggttcaggtgagtcctctggtgcaggtggaatttaggaggagtctaaaagtgaaggcagggaaatagacatcattaggacttacagtccttttaagcaaaaattgtaaaaatgcaacgtaattccatcaattttccaaagcttgcatggtcaagtagtcataggggattggctggttgaactttggatccctttccaccctcgaaattccatgattctgcagagtccggtaggcagttggagaaagatggcacagaaaagcaggtgaggttgtagtaccagtggtgcagacttatgggcaagcagcatcaaggctgtagttggggacatcagaagagatgacctctcagaagagagtggagagagacagcacagtcaagggcagcgggagtcaggtgaagaaggaaaatcacagtgactgcagtttacactggccaggtgccaatgtgggtgtgcacatggactttacacattttcctccattcctaatttgttctagtgcgtggaaagatctagggcatcccagcccctccagcctcagcctttactgtgctttactgtggcctagcagggacctgtgagcaaagggtctttttttaagtgtccatcctgtgagtaaatatgatagaattttgatcatttttatttatttttgagatggagtctcgtgctctcccccaggctggagtgcaatggcacgaatctcagctcactgcaacctccgcctcccaggttcaagcaatgctcctgcctcagcctcttgagtagctgggattacaggcacgtttctaccatgtccagctaatttttgtatttttagtagagacggggtttcaccatggtggccagcctgatctcgaagtcctgacctcaagtcatccacccgccttggcctcccaaagtgctgggattacaggcgtgagccactgcacccggccctatctttaaatcctacaagcctcaccttggaaaatgagctgagactgagaagttcccccaatgtttctcaaccatttcctgtagtctccattatctctccaacttgcaaattcagaaataaaagtttttagctgttttcctcccaagacacttaatgttatattgtgttttcccccttctgagaataaatgagccctgtttgttttgtgtgctgaaaagaaaaaagttgaatagcatttatctgaaaataaacaaggacttacaaaatttaagaagacttccctgacatgcagctggagaaataagactgtattttaagaattaagttaaaccagaagtgaaataacagactttaatggtatccttgaaacaaacaggggggatagggaaaccccttgggagattaatgagcccattaaatttaaacacagttatttattattttttttcttttaagaccaaaacagaaggttgcggattcagaactagcttgtgagcaggctcatcagtatcttgttaccaaagcaaaaaacagatggtcagacttgtctaaggtaagaaaatgattatttccttaaaaggaaagaaaatctatttcaatgtttcaagatcactgggatgatgaagctgttcagatccagacgctaagatgggaaaacaactctgtgtacccagtgtgaggac

SEQ ID NO: 28682 - DNA, 2300 bp, Homo sapien
tggtgtggtattagagaagcctgaagtatttcaggcagaaaggagtgatcaactgggctgaatgctactgagaggtcaagtaatgtacggccaagtagagaagaagtatttgtgagaatgccagttaccaggcaatgagagtcacgcttctgtgaaatttggtaactgaaagacagcatgtatagacagctctactgagaagcaggttaaagaggagcagagaaatggggtggaaaccagaagatcatctattttttttttaaagatgtgagatactagagcatgttccaagaaggagggaaagagagaaagagaaagaatgagactcttggctatcatgagagagggaataactgaagcccttttgatctcaggaccaaactttttggcctcaggatccattcacactcttaaaaagtattgaggatcccaaaaaacttttatttatgtttatatctatcaatatttaccatgttagaaaatacaattgataaaaaatttattaactcattaaaaataataaacccattagatgttaacgttctctaatgaaaaattacactttccaaaaaagtgaaaagaggggcagttttctatttttgcagatctctttaacatctggcttagtacaagaccgctggatctcttaccttcttttgcattcaatttgttgcaatatcacacatcatgtagcttctggaaaatccccccatatacttatgagagaaaaacaatgaaaaagcaagtaaagtcttaagtgttatgaaagtattttttggccccatggacagtctgaaagggtctcaggatccccagggattcccagaccacacttagagcactgcctataataaagaaggcaaatggggagggatccaggacacagttagagggactggcctctgtaagagaccctcttttggggcaagaggaaaagaggcgatgaatgccaaagtgattgtgaaggagtgcattccattcttatgcattacattttctcaatgggataagacccatggtcattgagtccggtgaggaagtagtgagtgcgggaggtctgagacaagccatgggaaagaattctcttggtgaacaggaaaactagctgcccagtgaagtagtcagagtgcccagcagggaccgcatagtatccatctttgcagcacacaccagggcacctaattgacctgccgcagccatgtgtgcaaggaattccaagctgcacacgtctgcctggctgcttctctcccacagtgagcagtgtggcagggtgcctaagagcaagctccataggttctcattctgctcctacccctgactggcagtgtgtccttgaacaaaatgctctgtgtgcctcagttacctatctgtaaaatgggagtaaccacagcacccacctcacagggttgttgtgaagacaaatgaagatgacaattacatgtaaagtacatacctaggatgggtgagtgcctggcaagggaagtgctccatagggtcagcgacaacaattacattcactcacgtgatttatggcgcttccactcggccctctgtcttagtaataattcactcatttagcgaatatcaatggaatggatgcttactgtgggtatgggcggaggctgaggttacagcctgggcaaagcaggccagctcccgtcctcaccggctgtctcctcgagcagacaagcggacccagtgagacccgctacgtggtggcacaatgcgagtccccatgactgctcaccctaacgaaggcgcaggatgcggtaggggctttgcggacctcactgcagccaatcctgaccacaggccccagtgggcacgcttagccttttacagatgcagagtctgcttctcagagcagggggctgacttcccccggctacacggccctatgcagttcggtgggaccgggccgaccgcccagctcgcgctaaagcccacgtaacagaaacccgctcccatgacacgggtcgccagggttcccgctccccagagaacgggacttccggcggaaatttcttccgggagcggaggcgcgggactgacctggccccgccccctcctcgtttatctccaattgaccaatcacagctcagcttcttgccaggcgcgtaggctcattctccagtcagcgactgccgtcgtctctcgggcaacagcgtcctagagacgccgaatgggcagcccctctgagaccccgcggcttggggtccgcgcacgcgggtgccggcccagctaggcggagaatcgaggaggggttcccggtaaggctgtattcggggtggccacgcgcg

SEQ ID NO: 28683 - DNA, 2300 bp, Homo sapien
gacctatgataatactttcatgttataccctgtgtccttctgacctattcccaacatttttgaacttgcaggagttcaagactcaacaagacattttaggctcatcttgtactttccttgccctggagttggctttttctccaagaaaccccaggttcatttggtgagggaagtatttagcaaagatctgggcagtgggtatgcctagtattattgagatatcactgcctaaaggcttttccagcaaatataagaaataggaattttaaaatatcataaactcatgtcaatacctccaattccaatccaataccatagagttcttccctgccttctcgcattccccacttacattttccttctcccacagtgagaaccctcacctgaaacatcaggatattcattcattcactcaatccctctagcttttggctagatgcccttttgccattggcctaattattctgaataaaggctgggtgctcggaatgtcctctttcttttttggaaagacatctacaagcttcccaagtcaggattaattgctgtttcctctctctgtctgctatgtacacatggcctgcgcttctcagcccatgtgtatgtctttggtgtcagaatgcacgtgtctcactctacagtaagaaggagagagtaggaataggtcccgtccagccactctgctccagattcttgttggtgtaaactccttccatcttcctggctacactacttagaggtaggaatcattcttttcctttacacagctgatgatgctcggctgcagagaatgagagcaggctgtgttgttttcatctttgtgcttccccaggcatgttagtaggtgcttcatatatgtctgttgagtgcatgactggcaaggggttgcactgagatctctagaactcggttgctctcaaattatagtttgcacaagaagtgccttactaaatgtatatttttgtaatttttctccatagatctggggtcctggaatttgcaatccaacactcccctcccctactcatgggatattaagaagcactttttggctgggcgaggtggttcacacctgtaatcccagcactttgggaggccaaggtgggcagatcacgaggtcaggagattgagaccatcctggctaacacgatgaaaccccgtctctactaaaacaaacaaacaaaaaatacaaaaaattagccaggcatggtggcatgtgcctgtagtcccagctactcgggaggctgagccaggagaatggcgtaaacccgggaggtggagcttgcagtgagctgagatcgcgcccctgcactccagcctgggcgacacagcgagactccatctcaaaaaaaaaaaaaaaaaaaaaaaagcaaaaaaaaagcactttgtttttttggctggactaggtggcccatactttttttttgttgttgttagaagatctcgtcctgttgcccagactggagtgcagtggtgcaagctcacagctcactgctaatttttttttttgtatgtttgtagagatgcggtttcaccatttacccaggttggtctcgaactcttgacctcaggagatccgcccgtgctcgacctctcaaagtgctgagattacaggcgtgatccaccgcgcctggcgaagacgcatatttttaataggacctaatatttacctgaaattatcttggttatttaccaatgtaagctccaacagggccaggcttctgcttgcttctaccctgacgcgtgtcggggccctggcccagtgcctggcacagatcagcagcgcgctaagcacgtgttgaatggacgactacctttcagggccttccagccagggtatctcatgcgtctgtgttgagcgcttgctgagtgacagaagctatgagcggaatgaacgcacgcacgactgaggaggctgcagaccgcgggccagggtctctgtcagccccggcagcgggtgggtgaccccggccgggggcggggcggggaggacgcggctccgcggcgccatgacgtcacgcccgtgcagcgccgcggccgcgtgccgggcggcgccatgacgtcatacccgcggagcctccgccgcgcgtcggcggcgccatgacgtcacgcctgcggagctgccgccgcgcgccggtggggcgcgagcgtgtgcggggcgcgggcgcgggcgcgggcgcgggcgcgtgcgggctgcgagccgggaggcggcggcggcgacggcgacggcggcggcatggcggagagcgaggccgagacccccagcaccccgggggagttcgagagcaagtacttcgagt

SEQ ID NO: 28684 - DNA, 2300 bp, Homo sapien
ctgagctctgtgctgcctgctgtctctggggggcctcagacagcccacaccaaaatgcaagacccaattcctgaagcatcaagcacgcagaaactcagcctggctccaggccttacgcttcctcccacagccccgcaccacctgccctcaccgccatgactgctctctcccgctggctggcttctcactcctccctactcctccctgcctggtgcctttgctcaaactcttccctctgtgcccatctccctttctccccgtggtgaacccttgatcgacctccaaggtcctgctcaaaccttgctttttctccgaaacctccggaacatgtccctgctgaactcccagcccctgaactcctcccttcctgaactcacactggtggtccactgttccagggaggctcagtctgcctccggcacagtcacaactgtgggtgaaatgttcctggctgtgcctgctgtgacctggttccctcctggagcagagtcagcacatggcttctaattaccccctgcagctggggctgggtccttcccgcaatggagatagcctggggtacctgccaccaggtgggtgagtctgtgcaggcccatggtctttgaggcaaggatgccgcccctggtgtgggatcagcaaagcccggtaccgcccacctctgtgggaggggaggctgggctggcctgtcccagggtgccttctgcacccagtgcccatgggcaagctgcccttcactcccaggtcaaggaagaggtaggtgtgaggctaagagaagcagatcctcccacctcttcctccgaaaatgacccacccaggccatgggctgagcattcagtccacaaacactgtgccacacttcttccaggcacagatggaggacctggccctcaaggagctcacatgagaaggcactgatatgtgccatgtgattaaagcagtaacacagggatgggcgcagtggctcctgcctgtaatcccagcactttgggaggctgaggtgggcagatcatctgaggccaggagttcgagaccagcctgagcagcatggtgaaaccctgtctctaccgaaaataacaaaaattagctgggcgtggtggtgcgtgcctgtagtcccagctacttgggaggctgaggcaggataattgcttgaacctgggaggtggtggttgcagtaagccgagattgtgccactgcaccccagcctgggtgacagagtgagactctgcctcaaaattaaataaataaataaataacatagcggttgccattgattgtgcgccacttgattaaaacaatcaccgtagtaaccattgtttgtgtgcttatccagtgccgggcgctattccaaacacgttacttgcattaactctaatccttaccggtcctatggagtaagtaatgttattatccccacttgatggatgagaaaactgaggcacagatcagttaaattatccagggtcaccagccaagacattctggagccagaattggagcccagacagccctaatcactacaaacccaagttcttggagctttgcagtttataaagcactttccaatggattgattaggggaggagggaggaggtgggatgtttgagcaggctgtagtggtaggtgaggcttggagagcgggtgagccaggggaaggtgcagtggtgctggctggagcggaggctggccccgagacctctctttccctcaagtccctccctggaaccagcacagctgcggacttaagcctggtttgaccccaaagaccaggtgtcctgggtccgactctgccacttcctggctgtcaccatcctgggctgcgcctcagttgcctcatttgcgtaatgaggactggaataacatctgcccagactaccagagatcaggcaagatttggtcccactcccctgccgtgtcacccagaaatctatgacccgatgcggatccggggcgggcgcgtgggggcggcgccagcgtatacacagcgcgcgggcacttctggggcacacctggcgcacaactggagtgggggctgatcgcgacccggggacttcattggctggggcgcaggtgacgcagcccgggggcggcgcagggagcaccagcaccagccccagcccggctccctccagagcccacatttgggcccagccccgtccaaggctgcatcccggccctatcccgggtcacggagtgacccttcctcgtcccgatcaccccgcccggtccacccgccatgggcttcttagaggaggagggcagatggaacctgtccttctccggcgccggctacctgggcgccc

SEQ ID NO: 28685 - DNA, 2300 bp, Homo sapien
gtcacagcctcaaattcctgtgccagagcctggccctcctgtcattagtcctaagactggtcatgcaatgcaggagggatggatgggtacaggaggctagaggttctgaccccagctgtcccctccagaagcctcagttccgccgcagccctgagcgtgaggtgggggtggagggcagttagggcaggactgtaggtaatgcccctctccagcaaagccaacacgtcaggaatagatgggaccccctgtctgcttctcagctctcctgaccttccccgggacttaggacctgaccctgccttgctctgggcctccatctacaaagtgtctatgtgatgaggcagtcagcccaggtattcactaaggcctgaagctcccatgccctgggattcctgcccagagaaaggaggcagccctgctcccagctcccctacccctccaggcaaggcaaaagcaaggactgcagcagaatggggaagctcagttgaacatgaaccacccaaccaatccaggtgcttctcaggtgacatttggaatcctgacagcaatgtcacctgttttacaacaccaccagtcattctgcagttgaggacactgagccacaaagagggcagaggcctgaccccaaagctcacatactctgcattcctccaggtctcacggagaagggggagggcttcctggtccactccagctgggggcgctatggcccggcagaccagggtcctccagtgaggagctctggaccaaggtctaacttggctccatgtactgctgtgggcttgctccacccagtgccaggggtaggtcaaggtcaaggggcctcttaggcatctcctaagggcatgctactatccaaatgtttgtgtccccactaaaggtcatctgttgaaatcctacaccttaaggtgatgatctttggaggcgggggcctttggaaggtgatttgatgagagggtggcacccttatgaatgggattggtgcccttatcaaagaggcccagaggtgaggatgtggcaagatggcaccttctacgagccatacctctcaccagggaccaaatctgctggtatcttgaacttgggctttccagcctccagaactgtgagacagagaaataagccaggcgaagtggctcacccctgtaatcccagcattttgggaggctgaggtgggtgatgacttgaggtcaggagttctagactagcctggccaacatggtgaaaccccatctctactaaaaatacaaaaaattagtcaggcatggtggcgcatgcttgtaatcccagctactcgtgaggctgaggcaggagaatcccttgaacccgggaggaagaggctgcagtgggccaagatcgtgccattgcactccagcctggggggaaaaagatagaaataaatctcttgtttgtaagcccctccgctttaaggtgttttgttttcgcacctgaacggactaagggactaagggaccaggaatcatccaggcctcagcttcccaaagcactccccactccccagttcctacagggccccgaccccagccccagcacccgtcattcacattttttacttacaaaggaaactttgaaatggacacttcctgttactttcattcaatgaaaaaaatccccagcacttgaaggcaatcatacagaaagcctgcaacaacgcagagagtagactcttcaggtggtggtgcctgctttaggctggctctccccgggtcaaaagggacgtgataaagtgttaaagtgatgttaaggatcaagtgggcaccaactgcgactcccctcccaccccccgacttaacagatgtcaaggaaaacagaaggaagccgtttctctccaggacatgcagtgtctgctggagttttggaaaaatgctttctctcgagtcgctgcggggagctcccaggctggacccccccgcacaggtcctccgccatcgccctcccagcccccgcccccaatccccctcccagacccggtccccgcccccatcccccgccagacgtcgtccccacccccatccccctccaagccccgcccgggagggcgtcctgcccgctcattgggcctcccgccggctcatttgcatggtccgaggggggcggggctgacgtcgcgctgggaatgccctggccgagacactgaggcagggtagagagcgcttgcgggcgccgggcggagctgctgcggatcaggacccgagccgattcccgatcccgacccagatcctaacccgcgcccccgccccgccgccgccgccatgtacgacgcagagcgcggctggagc

SEQ ID NO: 28686 - DNA, 2300 bp, Homo sapien
tccaagcccactagacaagtttgctcttcccagagcacatttctgccttcaagtcatcctggcttgtcagggctgggggagttctgctgtagaaatattagagtggaaggaaaaagatgtgttgggagctatttttctttaatactaaaagttggttgatgaatttgtcgttggccaagaccaaggagactgcatttttaaggacatatgtgtatttatctgctcagaaaatgttcattgctgtgtgctagggatactgcagtgaacacagaggtgtgacccttgccagccttgtgagagaagtgagcagataagtaagcagaagggtgatgctgtgtcgatgggaaagtacaggtgccaatgagaaggcacaggtgtcaaggagaagacacaggatgctggaggctcatgcaggatggatctccaaggcccaggggaagaagggcctctcggaggacgtgaatccacattaagactttggggataagtaggagcgccttaggcatggggacccatggatgcgaggcctgtaggacacagacaggatggcatgaaggcctgtgcaactggaggggtggggatggggacactaagagatggctggaagtgtgggggtggggacactaagagatgactggagaagagggggtcaggagtggtgaaaaatgggagaggagggcaggctgggccttttggatacagggggattgcatcctgcagtggtagggagccactgagggctgctgcagtaggagtgaggggatcagaggagagctttggaagccccctggatgcgggacaggaagcgagataccagtgtctaggaggccagtgaggcagccacaggctccaccaggatcagggctgcgagggtcatgaggaggaaaccaatttgaaggagtccaggggaataggacttggaaatgaccgatgggacatttgggaagaggaagacagaagagcgcagtcccggcttctggctttagcagttgggcaaggggagatggggagatgtgcccatgggttgagggttgaggacattaggagggagccggtatggcaggaagagctggtgtgccagagatgctggaagcagcatctgcctgagaacagatacctggcaatattcctaagggaaagtgacatctcggagggtgaggagggcatctgatagggcctggaaagagccggggcaagcatgaatgtgaggttatcttggggggcaaggctcaggcgttgaggagcagcccctggtctcttcagcctgaagttggaagccagagttgggccaggtgcagctgtggttgtctgaagtccccctcccccagcccagtgtgccaatgctgtaagagcaagggccgctcactggtgctggtggctgagtcccagcacccaggacagggcctggcacatactggtgcccaatcctcccttctgggtgcttcttccaaggccttgtgatggaagtgagtaccctcttcgacatcagacccagcttcaaatcctggctctgctatgtattggctgcgtggctttagacaagtcttttaaccttgctgtgcttctgatttctcagctgaaaaatggagatgatgatagtggtttctgtaaggccttatggtgaagcacctagctcagggcctggaaggcaggtgtaaccagtggttcagttgttataaaccaacactaaccctcgcctttgcacctcatgaaaccagatatgtagatggagcccacaaagctagcaggagccaagctcacgtgtgtcctgctttaaagccccatacccctttctccgggtgacaaacacctgtgctcgttctcttcccttcccctcttccccttgcatttggctaataacaggccagctgcctgcctccctgcagtttggtagatgggtgggtaacgaccaccactcccacgttcgcctgatgggcttgttttccgtgcccttcacaggcatctgcaacaggccccagccaggcctgaagtcatcctcagaagggatggatcctgaggtcgccatgcccagctgggcaaacatgagtctggattcttccccggagtcggctgccttggctgtgaggctggagggagatgagctgctagaccacctgcgtctcagcatcctgccctgggatgagagcatcctggacaccctctcgcccaggctcgctacaggtacccactcctcggggtgagcacgggcagcaccttgttttctttcttgtgcattatggaggaagatggtactgccacatgggagcgatagggtgaggcaaccatgacaggtggttggg

SEQ ID NO: 28687 - DNA, 2300 bp, Homo sapien
ctcactcccagacctagcctgtaggtgccccaccattgggggatcgctgattgccatggcatggttagagaaatatggttcttaaaggttctcatccagagtggcacatctctcttctgctcacaatgtgttgaccaaagcaagtcacatggatgggagcagggagatgcaatcctctcttgtgcccaaaagaggagcacaagaaatactgttgaatagcattgccagaggccacagaaaaatctccaaaaccaaaaatctctatgacccaataaattcaagaaatactgggttaaagagaaggaaaccagtatatgcactgtgagacttctcagtctttattatatacattgtaaccatcacagacagcctttaatatatacatcttaactatcacagacagccttcagtatattatatacattataaccatcacagacagccttcaatatattatatacattataaccatcacagacagcctttaatatatacattataactatcacagcctttaatatattatgtacattgtaactatcacagcctttaatatattatatacattgtaactaccaccgcctttaatatagtatacccattgtaactatcacagcctttaatatacacattgttaactaccacagacagcctttaatatattatatacattgtaactatcacagatagcctttaatatatacattgtaactatcgcagacagccctttgtttgagggtaaagcatgtgactttgttttcctcctgttccctctgccatcctccagggcctcacacacaataggctctcaaatattgcaaccatcttgcactctgcagggcaacctcatggcttatcctttacaagtggcatactcagaagaataacgaggaagaaagtgtaagaaaagagggctgtttgggcaaagaaaatctggttgattcgatgtttacagagtgccaggccccatgcttgatctcatgaggtcctcagaccttatgccttaggctatcatttccattttacagataaggaattgaggctcagggaactgagagtgagggaagggcaggggcctggctggtgctgggttctgtctctttccaggcaagaagggacatgtggacttgaatatttagctcagggatgttggaggcctagggtgctgctatttaaatggaaagggtgtcagggtttctgggagggagtaaggggacagaagaaaagatgcttctgttatcagaagggagtggcaacgtgacaggatactgaagcttcctcttttcttattctgtctcgtttctttcaatatacttatcacaatgtgtggctgatatttattatgcctttttcttttctattctcttttcttttttggggcaggggagctgttttgccaccaaaacctaagcccatggccgtcttcttcaccgatatgactggttctcatgcaagcacctagatggccctcgcccataattactggctgcagttgagtgaatagcggtcattatctagcgcccaccgtgtgcccggcccggtgccgggagctttgctttccgtctctcacattaggcccttttaatccaacccccaagaaggagacacgaccatcgtcttcattttgacgattttgagtgggggttccaatgacttgaacgaaaggagccagggcaccaatccgggtttgtgtagcagatgccggtgagacccgactactgcagctcgggggtggccggacccggggtctccccgctgagtctcggggcttcaccggcgcgtgggcacaagcacagcaccctcgggtcgggggtgctaggagggctaagagcagcaggacttgagtgacacccaacagctggtctgatctctttcaggcgccaacgccagacgccagcctcccagcggaccctctcgcagacccaccttcaccccacgcgccctccccacacagtccacgcgccagcagcttcgcggatgtcagtgaacgctcttcgcttgcgcagtcagaacgtcctccgcggccgtgtgaacatccgggtcacaggcgcataaggaccaatgagcgaaggcatcgcgagccagggggcgcggagaaggcggggaatcatggccgcccccagtgttccgcgtccgggggtttgtgggagttgccttgacctgcagctccgccaccgcggacccgccttctgccctcagcagcagacgctctgtcccgcccgggcagctctgcgaggcagcggctggagagggaaccatggggactgtgcacgcccgggtaagaggcccagcgacccgcg

SEQ ID NO: 28688 - DNA, 2300 bp, Homo sapien
tagaattggtgataatatgttttgggttgtttgataacaatgttaacgttagtaattaggaatgatttggagaatgttcatattaatagtctcttgttcaaattcctttaaactctaaatctgtaacattcttgagcctcacgggtggcaaggttagcttgtcccttgcattaatcaggtttgaatgcaggatgtgagcactcagcagcggcatgttttaaagaatgaaagtgattacaaatgaaagactagatctgtagttagcatcttccttctgtttttatgaaagtcccttagctagcatagtctttatccaatccaaagttctcattccttcaatgtagaccactgctattttttttttttcccctcctaggtacttggcctcaagcttcctaatcttcttggtcgtgcagaaaaggtgacctttcagttttcctatggaacaaaagaaacttcgtatggcctgtccttcttcaaaccacggcccggaaacttcgaaagaaagtaggaagcccaacagatcattgagtacactggcctgatagaaaagttaaaataggtggcttatttgtgaaaagaaccatgacagaatcagctgccacttctgcagtgaccacatgctgtagatttcctcttgaagatgagccctacgggcgtagtgttaagtctgttgatttaaatgtgtgcaagttctaatcactgtttcagcttttaaagctctatcccattgtctcctagtttctctgtaaacttatataaagttactggacagttcccttggagctcactgcgggagacggacagaggaatgtcagctgagtacagtgtgagtagcatttcagtccttccctctgggcttgggggaaaacagggtggctttttcactgattcccaaaggcagcaagagggcagcgtggaaagcacaggccctctgccctccgcaccaggtacctcctggccaggtgcctcttctctagccgagtacaggctacagggacccgagagtggctgatgcccatgttagcagctccttaacctggtcctgactacccgaggcaccattggttgtccctccccatatgtgtggagactgacagtttctcatagtcagcagagttggtcagatcactggaaggtttcttttttgttgttgttgagacagaggtttgctcttgtcgcccaggctggagtacaatggcacgatctcggctcactgcaacctccgcctccccggttcaagtgattctcctgcctcagcctccgtcaccgtgcccagctaatttttgttatttttagtagagatggcggtttccttatgttggccaggctggtctcgaactcccgacctcaagtgatctgcccgtctcagcctcccaaagtgctgggattacaggtgtgagccactgcacctggtccggaaggtttcatttttggttcacacctaagtttacacctagaagggtgtgattaaatgccaccattggaattcgtatcatttggcctttttggggctttatgataacctgctttttttttttctccttcctttcgccactgttcctgactcctcttgttctgggctttagttcttgcggagagccctgagatagaatactatgtaagagtcgttccccacatgtggtcttcagaccagcagcatcgacctcagctgtgggcttgttagaaatgcacattcgcgggctccaccttgagctgccaagtccgactcacagagagtggggcccaggaagctttaagtgtgctctccctccaagaacccagcagaagccctggaggcgaccacctgggcttgactcccccgtctcccttagggctgtgcgacctcaggcaaatgactcatctgtgaaatgaaggacaggagcgcggggtctcccagggccgttgtgagggttggatgagaggcgtggtaaagctcctgatgcggcgcgtggcgcagtttaggtgcttgaggtgcgttagtgccccaggcctctggtccttgcagaccaaggccatgagaactcagagcacacagagctgggccaggtagactccaggttcaagatggagataggagaatccaggcacatttgcactttcatttccttttctccaaattttcttgtctggaagggagcagccctgagacacctttctgctttgaaaccgtcctcggatgccctctggtggggccgtggaggggaaacctgggccacatgctgctctctccagcctgctgtcctccagcaggtctccaggtgcctgtgtgcacccacagtggtcgggctcccgggagc

SEQ ID NO: 28689 - DNA, 2300 bp, Homo sapien
acatgtgtaaacgtgttgttgtctgttccctgcaggtttgacatgtgcttcctactcttcctttgtttacatattattattttttttgagatggagtctcgccctgttgcctaggctggagtgcaatggcgcgatctcggctcaccgcaacctccgcctcctgggttcaaatgattctcctgcctcagcctcccaagtagctgggattacaggcacccgccaccatgcctagctaatttttgtatttttagtagagatggggttttaccatgttggccaggctggtctcaaactcctgacctcgtgatccgcctgcctcagcctcccaaagtgctgggattacaggtgtgagccactgggcccgacccctatgtattattattaatattatcattattattttgagacagagtctcgctctgtcgcccaggctggagtgcagtggcacgatctcggctcactgcaacctccgcctcccgggttcacacgattctcctgcctcagccccctgagtagctgggattacaggcacacaccaccacgcctggctaactttttgtgtatttttagtagagacggggtttcattatgttggccagactggtcttgaactcctgacctcgtgatccaccggccttggccttctaaagtgctgggattacagatgtgagccactgcgcctggcccctacgtattatttttaaacccatttctctcatcacctcccataaaaatgtaacagtatatttttatgcgagtaaatgccatttttaacaggtacatatttcatattattgacatcctatattttagttaataggcttaatttgttagagcagttttaggtttacagaaaagttgggcaaaaagtacagtgttcccgtataacccccatagcttccttattattagcaccttgtgttaggatgcttcattggttaggattggtgaagcaatatgataaccttattaactcaaggccatagtttacatgagggttcactcttagtgttgtaccttctgtgggctttgacaaatgcatgatgtcctgcattcaccattccaggatcacacaaagtggcttcactgcgctaaaaatgctgggctcccttcatccctcccaccagaccactggaaacgacaggtctttgaactatccatggagttttgccttttccagacagtttgggagttgggatcatacagtttgtagccttttcaagttgtcttcttttccgtagtaatatgcacttaaggtccctccatgtctttctgggacccaataacttgtttcttcttattgctgaataatattcctttgtctggaagtaccacagtttgtttgtccattcagctgccgaaggacagcttggttgcttctagtgtttggcagtgatgagtaaagcttctatcaacattcacgcgcaggttgttgtggacagcttctgggacataagttgtcacatctgctgagtcagtgccggggagcgcagttgtttggtcacgtgttaagagcacgcctcccctttgtaaggagctgccaggcgagcttccggggtggccgcgtccttttgcatttccccagtgaggaatgagagagagaaagtttatcatcttaatggctgcgtgttttgtcttatgacacactattatctttttaaagaccaaatcccaagctttggacattgagtttgtgtttttttttttcttttatgattataaaacaatgtattcaccttcgaactgaatgttggtactcatctgtaagttttatttatttatttattttttctttctttctttttttttttttttttgagatggagtcttgctctgttgcccagactggagtgcattggcgcaatctcagctcactgcaacctccacctcccaggttcaagtgattctcctgcctcatcctcctgagtagcatgattacaggtgcccgccaccatgcccggctaatttttctatttttattagagacggggtttctccatgttggccaggctgatctcaaactcctgacctcgtgatttgcccgccttggcctcccaaagtgctgggattacaggtgtgagccagcacgcctggccaagttttactttaatatgaaattctagatgtgaaatcgccagatcttttagggctttatcgtactttctgggaaggttgtctcatttatactcctagaaccgtctctgacatgcaacatccgtcagaggtatctccacatgctatggaactttaaaacatcatttaagtggatgcatattattccattattaaacattctcccc

SEQ ID NO: 28690 - DNA, 2300 bp, Homo sapien
cgcgtccttttgcatttccccagtgaggaatgagagagagaaagtttatcatcttaatggctgcgtgttttgtcttatgacacactattatctttttaaagaccaaatcccaagctttggacattgagtttgtgtttttttttttcttttatgattataaaacaatgtattcaccttcgaactgaatgttggtactcatctgtaagttttatttatttatttattttttctttctttctttttttttttttttttgagatggagtcttgctctgttgcccagactggagtgcattggcgcaatctcagctcactgcaacctccacctcccaggttcaagtgattctcctgcctcatcctcctgagtagcatgattacaggtgcccgccaccatgcccggctaatttttctatttttattagagacggggtttctccatgttggccaggctgatctcaaactcctgacctcgtgatttgcccgccttggcctcccaaagtgctgggattacaggtgtgagccagcacgcctggccaagttttactttaatatgaaattctagatgtgaaatcgccagatcttttagggctttatcgtactttctgggaaggttgtctcatttatactcctagaaccgtctctgacatgcaacatccgtcagaggtatctccacatgctatggaactttaaaacatcatttaagtggatgcatattattccattattaaacattctcccctgattttcttactttttttttttttgagacggagtctcgctctgttgcccaggctggagtgcagtggcgtgatctcagctgactgcaacctctgcctcccaggttcaagcgattccccctgcctcaacctcctgaatagctgggattacaggtgcccgccatcacgcccagctaatttttgtattttttaatagagatggggtttcgccgtgttggccaggctggtcttgaactcctgacttcaggtgatctgcccgccttggccccccaaagtgctcatattacaggcgtgagtcactgcacccaggatttcttaaaatcttcagcacctttgttgcttccatttttatgtcattataagcaacaactacactctgcataaatttttgtcgaaagtatagattatttcttttcactcgtatttagagtgcttcattacagtgtaatttttaagaaaagtaacttaagtttttgatggttttatttcatctgtttattataagcaagtgtgatatgccgagtctatgagagctgagcctttacctacctgagaagtaaggcatgctggtgttccactcaccacctccgtgcggttggccagactctgtgggcaagaatgtaaattgctataatttttttgtgaaagtggtttgatgtatcaagagccttaaaatgtgtatgttcaagaattgttaataatactattaatgatagccccaagctggaaactggaaaccgaaatgcccatcaacagtaggaaatggtcagataattatggtatcttctactgtaatgaggaagaacaagttacagccactggctgaatgatggcatgagtaaatctcagaaacatgtcgggaggaaaagctagacccagaggaatgcctcctggaagatcccatttataaagcttggaagcaggtgaagtggcctgtgctgtgagagggtggggcagtggctgcatgtggtatgggcaccaggtggtggttagaagggaaggcaaggtctgatgtggggtgtgcttggtttcttggtcctggtgctctctgggcagatgtgtttcagatatagaaattcattgagctgtacacttaggatgtgtatactttcctatgggtatgcacaataaaagcttaaaaaaatacatgtttgtgccaggaaactcatcataggttaatgtccatgataaaggacttagaaaccagtatgacaatagaagagaaatagatcattaaatattggtccacctatgttgtttttcaggcataaaaaccccattttcaaggaagataaagcgttaggagaaagtgtttacaatatattaaaactgaaaaaaagtaggactggaaactgtgtatatatatatatatacacacacagagagagagagagcaagcaagcaccacattttattggcttgcttatttggttttacatttacattataatccactggaagaaaggacatcaggatgttagctgtttatttctgaatggtagaaattaaaatattttcatttttttctctttatgttgatcagatgttctacaatgagtatatt

SEQ ID NO: 28691 - DNA, 2300 bp, Homo sapien
acctgcatctttaaagccagccatgtggtgtcccccatctctccctcttgcctcctctgcgtctctgctgtctttgaaggacccctgtggtgacctcggatctgcccggggaatccaggggtcttatttctaggtcagcagatgagcgtccttaattccgtctgcagacttagcgcccccttgtcatgttatcgtcacgtttacacgatccagggattaggaggtgtgcgtcttcggctgggtgggagtgcgggacattattctgtctcacacaactagtatctctctaatatttgggggataatcttaaattggtcacacataaaaaaagtttttgaagaacgtgaaacctcctttgaattgaaaaagtggtgccatatggaaacgtctagtgttgcaggtgatgccccgcagggcttcgcacatgcattactctccgattttttctctctctcagctggggctgagtccccgtcactttcagtcctccccgtaacttgttgtttatgtctttgccaaatgacctgaagatttgggcctcagtctggggacccatgttatccctgggccacactctcaggtgccccgggactgtctcgccctcattacctgcagaagctgcagggattttacagagaatatataaaaagagacagttttggttgggcgtggtggcttgcacctgtaatcacagcagtttgggaggccgaggtgggtggatcatttgaggccagtagttcaagaccagcctggccaacatggtgaaaccccacttctactaaaaatagaaaaattagctgggcgtggtgacagatgcctgtagtcccagctactcgggaggctgaggcaggagaatcgcttgaacccatgaggcagaggttgcagtgagctgagatcccgccactgcgctccaacctgggcgacagagtgagactctgtctcaaaaaaaagagttttgccttccttataatagttaggaacatggaaaaatgtgctttttccccctaaatgatttattctttacagtttcacgcttatgcctttgagaaaaccagaaacccatgtttcaacactgtcatgatcagaccatcaacttagaccagtgaaatctgaataatacagactcagcactatgatctttgagaaatcatctactacatcagtggagaacccagcgaaagggtcacctgagaaaagttacctgtttaatcaagcaagtctggggtaccccaggtcgctacagccagctccttaatgaaagctcaccagggccagctgtctctcgtgcggctgcagcgtgtttaatttgcaggtggactccgcgggctgctcctccacaggtgaagtgaaaacagtggaggtcctgggtgaaaatgcgggttctgttcatcctcagaaggtggtaagtgggcagactagagcgtgaagccagaggcacttcatcaagtgctttccacaaaagaccaaaaataaggcacgttcattgtgggaaggaatttcatagctgctattttagagagctcagagagcaaagaaagatggaaagcctcacaaaatcccccatgaaatcctcccttggctcagtgattctttgcatcttaatgttactccgtttcttctctaaatacctcaattttctggactggaagagagctgggtatttgtttaattaacctcttgctttactcggcgagggatgggccatgaaaccagtgggctgcttccgctgaagaatgctgccggctccgtgccggaagcctgctggctcggtcatcttccatttgtaacaagaagattgattttagtgaacctaatcttcacaatgcttctggaagaacagctgtgatggatcactcctctgttatcgtgaatctgcggtgctctcggtacacacactgtgacctttaacaaacggtttcatcagtggtgtgcctgccacactgtgccacaaggctcttttgtacctggctgctgtctacaagtcttatgacccagtgagggagcagactgttctgccaaatgccatcgctactaggacaaaggacagtcacctggtgaggatctgccatcaggccacattttcccattgggtgactcctgcaaaggccctacactttgacgtcctccccatctccggcagctccttaaactaagaactcattttaatttctgaattctccctttttaaagaccagataaatttacctttgggacagttagatgtgcacaaatgcaccatgtgtttaaagatcaccaaagaggagagaaaaggggattccttagtccagagaacaaaaact

SEQ ID NO: 28692 - DNA, 2300 bp, Homo sapien
gagagaagacgtttctgttgttctgagccctccagctcatggaactttgtgctggcagccccaagacaccccagtgtcctctccctgtctcttctgcctggtgggtcttctcctcctttactgaaaggaaaagggcatttgatccttgttccaggtcaaatgtcccttccctgcaagcctcctctgcccacagcacttctcccccaccccatccacatggtccctgtccctcctccatgctggccacgctacacggccactgtgtcctgtgcccacgttctccttgaccacaaactcctggaggacaaagctctgtgcccttggtcttcacgcccctggctgaggactgggcctggcaccaacttgaccaacagaaacatgtactgcactggggggactggggggcagccagcacaaagggagacagaaaaaccatctcaacccacacacccagagctgaacccacttctccccaggtgccgtcctctgctgagtgatccaccatggcctggcaggacacccagccttcactcctcctacttctttttttttattttttattttttttttatttttggagacagagtctcgctctgtcacccaggctggagtgcagtagcatgatctctgcccactgcaacttccacctcccgagttcaagcgatccttgtgcctcagcctcccaagtagcagggattacaggcatccaccaccatgccccgataatttttgtatttttagtagagatggggtttcaccatgttggccaggctggtcttgaactcttgacctcaggtgatctgcctgctttggcctcccaaagtgttgggattacaggtgcgagccactgcacctggcctactcctcctacttcttcaaggctggggcttctggctgtgagcatctcagaaatctgtttgcttttctcctaagtcaccgtccgcctgcctgtgccttctctgtctccagcacctgctgagcagccatcagccagaggcaacatctgtgacatcacagctcaaagccctgcctgggtatctaggctgggcatggtggctcacacctataatcccagcactttgggaggccgaggcaggcggatcacctgaggtcaggggttcgagaccagcctggccaacatggcaaaaccgcatctctactaaaaatacaaaaattacccggtcgtggtggcgtgcacctgtaatcccagctactcaggaggctgagacaggagaatcgctttaactcaggaggtggaggttgcagtgagccgagattgtgccactgcactccagcctgggcaacaaagcaagactacgtctaaaaaaataaaataaaataaaacaaaacaaaataaaataaaataaaataaaataaaataaaataaaataaaataaaataaaataaaataaaataaaaatagccctgtctggcagtcctcgggatgaagccgtttcctctgcttccaacacatgcgaggcctgtctcccctcctctcccctccctggcaccccacactgtccccagggcctgctcttctgctcacctcatggtaccggcctgcaagccatttcctggggcctccccgtcgcctcttccagaaacaactcctggaactccccttggaggtcaggccaatgacctgtgccccgcattgccctccatcctctaagcttcccgtgggtagggacaattcccagttctgaagggctccccctgccccgggcctggctcttggcagaagcttaacaacagaccggccacgttcgtgtgacctgattctctccggctttcaggacgtcctgaggctgcacccacgtggcaatggtgtctgtcgcgctgtcgcctggatccggcaccactagcggagccgagcagagcccagggctccaacgcgtagggaaaaggctgcgccgctcccggggtggccccacgccccttctctgagcttgagcggcggcgcgggacggggacggctctggccgggaccagcaggcctcgggcatccgggacgccggggccgcgctccaggccaggggcgggggcgggaccggggcgggggccggcggcggggccgcgccctcggcctctccccggggcgaccgggcggctccacacgcgctgcgcccgccgccggccccacgcgcggcccatgtcctccgcgccgcgctcgcccaccccgcggccccgcaggatgaagaaggacgagtcgttcctgggcaagctgggcggcaccctggccaggaagcggagggcgcgcgagggtgagtgcgcgcccgcgcccgccgacccccggggac

SEQ ID NO: 28693 - DNA, 2300 bp, Homo sapien
tagctgggcgtgatggtgtacgcctgtaatcccagctactcgggaggctgaggcaggagaatagcttgaacccaggaggtggacgttgcagtgagctgagatcacgccactgcactccagcctgggcgacagagtgagactccatctcaaaaaccaaaaaccaaaaaacaaaaaagctggacctggtcaagccatcgagtgggagaaaatgtttgcaaaacacatgtttgataaaagactggggtccaggagatggagagaacttccgcaactcaagaataaaaacacagtcaacgcagtaaaagaatagatagataaagggtttgaacagacacgtcaccaaagaagattgacagatagccaatatgcatctggaaaagtgctccccgtcaccagccacctgggaaatgcacatgagaagaacagggaatgccccgcagacccatgggaaaggctggaagatgtggtgagaataggacagctgctactcactcaggctggagggatgtgcagtggtgtggcccctcaggaaatcagcttggtagtttcttttaaaatcaagtaaccatccttcctatgacccagcaattccagtaaatcttagatagatttgctcaacagaagtaggaatctgtggctgagcacggtggctcattcctgtaatcccagcactctgggaggctgaggcggacagatcacctgagctcaggagttcaagaccagtctggccaacatgacgaaacctaaaaatataaaaattagctgggcgtggtggtgcatgcctgtaatcccagctacttgggaggctgaggcaggagaatcacttgaacccgggaggtggaggttgcagtggcagtcaatatcgtgccactgcactccagcctaagcaacagagtgatactctgtcaaaaagaaagaaaaaaaaaaagtaggaatctgtaagaagactcttgtacaggaatgttcatagcagcttcattcataagagctggtacttggaaacagcttggggaccatcagtaggtgaatggatacacggacagcagtaattgacaggacggaatgatcctgggcagtgtcaaggaacaaggtgccggtacaggaaatcacccgagactctcaaaaccactatgctgagcaaaccaagacagaccaaaagagtacacactgtgtgatttcatttcatttcatttttttcaaagatgagatctcactctgatgcccaggctgaagtgcagtggtgcagtcatagctcactgcagcctcgaactcctggcctccagtgatccttctgcctcagcctcccaaggagcgaggaccacaggtgtgtaccactacaccccgctaatttcacttttacaatgttctacagcagacagagctaatctgtggtggttgcctctggggctgtgggcaggagttgcttggggaggagcaggagggattttctgttgttatgaaaatattctttacagtgagagtggtttgagatacgcaggtgcagcatttgtcaaaactctgcatgtgtactttaaatttgtgcatttcatggcatgtaccttttaactccaaggaaataaaagaactataaataaatactgaactctaattagtgatgtgtgtgattagagggaaaagtactgatgtctgcaacttactttgaaatgtgttaaaaaaagatgatatggtagactgaatagtagtaccaaaaatgtctatattccaatacctggaaactgagaatatgttctcttatgtggtcaaagggaatttgcaggtgtgattaagttaagaaccttgagatggaattagcctgggttatttgggtgggcccagcgtgattaccagggtccttatgagaaggaggcaggagggtcagagtcagagagaagtgaccatggaggtggaagttgcaatgatgtggggccaggagccaaggaatgtgagcagcctctgaaagctgcaaaagccaggaaattgatttcctcctggagcttctagagggaatgcagccctgctgacaccttgattttagccagtgagacccattttggagtcctggcatccggaaccacaagatagaaatttgtgtcgtatggaggccgggcgcggtggctcacgcctgtaatcccagcactttgggaggccgaggtggacggatcatgaggtcaggagatcgagaccacggtgaaaccccgtctctactaaaaatacaaaaaattagccgggcgtggtggcaggcgcctgtagtcccagctactcgagaggctgaggcaggagaatggtgtgaacccggaagg

SEQ ID NO: 28694 - DNA, 2300 bp, Homo sapien
tgcctcagcctcctgaataactggaactacaggtatgtgccattgtatctggctaagtttttgtagagacagggtctcactatgttgcttaggctggtctccaactcctgggctcgagcggtcctcctgccttggcctcccaatgtgctgggagtacaggtgtgaaccactgtgccaggcccctttaatttattctgaaaatggcgtgtcaggagctgggtcttggctgccttgcttgcattgtgaaatccccttgcctggcaggtaggaggcagtcgatgcatacagggtgagtgaatgaaatgttagttagttgcattacattgaagtggtctaaacctgactctaagatgtgactactaggctgctgatccttttatgatttttcaagtgcgtagttattttccttttaaaagctaatcacatttcctttcctgactgatcctctgttatttctgcctcctcccccaaggggctgaccaccagccccaggcatctccttggccagctcagtggatacacacacgtcaggaagaccctcccttgccccagccttccttcgtgggtggcactggacactgggcagatggaaaggccctctccatggagcactgggctggcgagggccttcctgtctgtgccctcatgatgtcctcacttggctgtcgaggcatctcctgggccatgaagtgctgtttgctgtcctggccttggattcctgcatcaagtctcccagcaggaaaactgttaaaccaaaaccagtgttgggaactgcatcagagctggggaccacatcagtgctggggacctggatcagcattggggacctggattagccctggggacctgcattagtgctggggactcgcatcggcattgggtgtctttttgttgcttcctcaagtcctagttttgactctggatgaagcttggtttgtgccgtgggagtggagtgttgggggacaggggtgaccggcgggtgagccctcactgttgatcctggcctcgaatgggagaggggcactagtgcccctgggagtgggccaggcatgtcccagtccactgcctgccccagagccccgcctggagcacctgctgggtcgggacatgggcctcccgtgggcctcaccgcttcctgcttcagcagaactgggattgtcagttaatcgagcaacacctccaggaagccagcctcaggaaagagcttccacagggagttgggggactggtaattggaataaataaaagctaatcgtgcttcctggatgccaggaaccactgaaatttgtggattcccacagcagcacatgaggctggtcattgttaataacccctttttaccgacgaggaacccagaccagacagagagcccgcctgtgtcacctggtagggaggggctgggcctggtgttataaaccaggagagggttcaggccgaggaaagggggagcaagttgccggccaaggtaggtatcatgcgagtcctacttctcccctcattcaaggaccttcctttggggaagtgagtgctcccgagagcagcctgccgcctccgtgtcggggcagcctcagcttcttctttctgtgtccgatatttgatttctgttgtcgtggaaacggggtggcaagtgttccatgtgttagcatttggtcctcctgacgtagtcggcacacgggagatgcagctggggtggcacgtgcccacagtggtgccacctcttgccgggggtcaggcagaggagacccagctccgtgccagcttgcagacccccaatcacttctcctgtctcagggcccagagagcaaaggcagtgggaggccaatgtctgttgttcagtttagctctgagccacgtgcatcttcagtcagcccaggggcctgggcgcgcccttccttccttctttgtgcatgggggttttcctggggagcagttgccctggcccatgaggctgatgggagtcaagacagaaatagtggtctgtggtcagcaaggagctatcgctggaaacaccccggtccttccacagcctgaccctctgtgaccttcctcaaaggctccccaaagaggctttcccttgaagtgcaagtcatagtggcgcccctgccacgtccctatatgaacggggtgtgtgcccgcctgccctccgacgtccgccggctgtgctggtctgcagagctgccgccagctgcaccctcctcgccagtgagttctgttgctttcgtatcattttcagcaggagctaaacccaggccagcccttcttttcttttctgctttatggcagaattttgttttgcaaga

SEQ ID NO: 28695 - DNA, 2300 bp, Homo sapien
caatgctaattttcttaggtatcataatggtactgtgttatgcaggagaatgtttttaggagaaacattctgaagtatttagagatatccctaaagtgatgtgatccctgcaatttatttattttttattaatttttaaaaattttagttgtggttaaaaatacacgtaacataaaatgtactgtcttaactatttttaagtatacagttcagtagtgtttggcatatttgcacaggtatatttcacaccgtgtctctgaaaaaaaaaaaggctggaataattcccttctatccatgcctttctcttaattggggtttgggggtgcttggacttatctccatgttactcttccaattcttagagtccctctcttcccctaaacaatgctctacacacaagaggctttgtgagttgtggatttagtctgttgtaactccacaccatacaggattagatttcgcatctgattcttacatcagccctgcagccccaagagatgagagatagctttgagggctatcagagaactccctgtattctgcacataccttgagctgagaatgtaaagccctgggactgtccttttcttgctttaaactctttggtgtgatgataacaagctcaccccacagtccttagataacctgtgctcgtattgcgtatggaagccacaactctgccaaagccacaatttaataggtacttcgttctgagtgatgacaggtaattattttgccatcacaggctacgatctattagaactccattctctaacagttactaggtccccactgcctttaaatcaaccagaacaagtaaccaatcccagttcccatcctggaggtcgtgttgcctgcaattgtttctggtaacaaatccgaagttaattgggattcagttgccgatgattagagtctcttcagttgtttggaggagaaaggaatctaacataggaagctgtgtgattctcaagctgttggaaggctggaggcagcgcctccagcaaggactcttggaagaatactgcagagctggctcctgaaggaagctgccgagtcaggctggccctagaagcatgctttctgggttgaatgctttaggttcacctctgcagatccactccccaccattttctctcctcacatctatgggccgcagcaggggacttcttttctctggcttctggctggatgtgggcaggggaggccctggcaggagggaggagagtgaggcttggtcattgattcctccagctgtgcccttctgctggttcaccatgagctggctgtgtccctctaccaaaggccacagctcctatcccgaggcccctcttagagcttcagtgattctgttcctgggctctgccacccactccctccttcaccctctaggttttgaagaagtaacagctccccatgttgctagcctggggtgtagcactgtctcttctgggttcctttaaccctgccccagctgtccctttattaaacagtcttcagttagcacatgggaatataccgtctctttgctgctgggactgtgactgctgctacatctatgtggctgtgatccagagtcagaagccaccaccagaaccactgtgtccagagctgggctgagcctgctacacacgccccagcaaaataggtcctgcacggtggcttctctccccacctgttacaagccccagtctagcacgggcacttcagaatggcagggactgactcatgtgcctcagtgtcttcctctgtaatatgggggtgatgattgtacctacctcacaaggaagtttccagtaaaatgaaagcccttaaaattatgtttgtttcatcaccaatgactccataaatattagcaacaataccagtactaagttttgtcattttttattaacttcttgtaaacgaccctactttcctgctctcacacactccttacacctgcatcccacctgatttagccactttctgcctaacctgtcagaaagggtagatagcttcccagtcacctgttgctagggaaactcaccatttcagcccggatggtgaagattccagcttgagagaccagctcgggtctgaagtgtttctctatctactgtgctgagatctctccttctcgaaccctgctatgcctttgcatacgctgttttctccacctgccacgttctcaccccttcttcttccactgcaaactcctatgcagccgtcaaggccccattctcctctggaaagccttcccgatccccttggcaacaaccaccaccaatatttattcactgagcccactttgtgccaag

SEQ ID NO: 28696 - DNA, 2300 bp, Homo sapien
taactccacaccatacaggattagatttcgcatctgattcttacatcagccctgcagccccaagagatgagagatagctttgagggctatcagagaactccctgtattctgcacataccttgagctgagaatgtaaagccctgggactgtccttttcttgctttaaactctttggtgtgatgataacaagctcaccccacagtccttagataacctgtgctcgtattgcgtatggaagccacaactctgccaaagccacaatttaataggtacttcgttctgagtgatgacaggtaattattttgccatcacaggctacgatctattagaactccattctctaacagttactaggtccccactgcctttaaatcaaccagaacaagtaaccaatcccagttcccatcctggaggtcgtgttgcctgcaattgtttctggtaacaaatccgaagttaattgggattcagttgccgatgattagagtctcttcagttgtttggaggagaaaggaatctaacataggaagctgtgtgattctcaagctgttggaaggctggaggcagcgcctccagcaaggactcttggaagaatactgcagagctggctcctgaaggaagctgccgagtcaggctggccctagaagcatgctttctgggttgaatgctttaggttcacctctgcagatccactccccaccattttctctcctcacatctatgggccgcagcaggggacttcttttctctggcttctggctggatgtgggcaggggaggccctggcaggagggaggagagtgaggcttggtcattgattcctccagctgtgcccttctgctggttcaccatgagctggctgtgtccctctaccaaaggccacagctcctatcccgaggcccctcttagagcttcagtgattctgttcctgggctctgccacccactccctccttcaccctctaggttttgaagaagtaacagctccccatgttgctagcctggggtgtagcactgtctcttctgggttcctttaaccctgccccagctgtccctttattaaacagtcttcagttagcacatgggaatataccgtctctttgctgctgggactgtgactgctgctacatctatgtggctgtgatccagagtcagaagccaccaccagaaccactgtgtccagagctgggctgagcctgctacacacgccccagcaaaataggtcctgcacggtggcttctctccccacctgttacaagccccagtctagcacgggcacttcagaatggcagggactgactcatgtgcctcagtgtcttcctctgtaatatgggggtgatgattgtacctacctcacaaggaagtttccagtaaaatgaaagcccttaaaattatgtttgtttcatcaccaatgactccataaatattagcaacaataccagtactaagttttgtcattttttattaacttcttgtaaacgaccctactttcctgctctcacacactccttacacctgcatcccacctgatttagccactttctgcctaacctgtcagaaagggtagatagcttcccagtcacctgttgctagggaaactcaccatttcagcccggatggtgaagattccagcttgagagaccagctcgggtctgaagtgtttctctatctactgtgctgagatctctccttctcgaaccctgctatgcctttgcatacgctgttttctccacctgccacgttctcaccccttcttcttccactgcaaactcctatgcagccgtcaaggccccattctcctctggaaagccttcccgatccccttggcaacaaccaccaccaatatttattcactgagcccactttgtgccaagcattgttctagacacgggtatgtaaccgcgattgagagagacagaccacgcacagcctggattttattttaagagctattgggtgccgttggtgggtttgagtgagtggggtcaggaagtgactcactcctccgagggcttgtgggagcctcagctcaggggcgggcagggggcgtggggaagtctgcagccgagagtccaggtaggagtctcctgcgtggtcccgggagaggaaggggcctggcccggggcggggtgtggaggtgggaggacggcggtgcgggatggagggtggaggccaggctgacagggtgctggtggtgggttgcgggggtcgaccccaggctctggcctatgtagctgccattttggaggtgaacagcctgcggggaaactggcatggtttggggaaggcggggagagggggagaa

SEQ ID NO: 28697 - DNA, 2300 bp, Homo sapien
agtggtggccgggtgagctgggtgctggtaatgggcaggacccttccacatcccccaacctcgccgggcctgccctccccggccccccatctctgcatatcaggctcctcccagtcccttgaggcccagctcaaaggctgcctccccatgctgccctaccgctctgtcccttccctccctgagtcctgtggtagcctcacgggctggtcccagggcctaagctagactttctgcccagcagcgtgagtgtgcctggttcctccccagctgcccacgcactgagcgtgagcagggcctcctcactgacctgggcagtgacccagacagtgaccggaactggctagctgcctctgccccttgccgctaggccagtgggccccaaacccaagcccatcagcatcccctggagggcttgccaggacagacggcggggcctaccccggagcttctgattcagaagcccagtggcctgagaatctgcatttctgacaagccctccggggatgccctcgaggccgatcaggggccacactttgggaactgctgctctgagccacagttttctcccctgtacgatgggaataaatgagatggggtgagacagctgtctacttggggctctctaataacctctacatccccagagggggtattcttctttcttaaggttgaggaagagaagggggcctggagagctcccctggttccccaaaagctgagacctttctctcgcagtggtcatgcccatccccacagaagagggtgctgtctgtgggggaaggggtgtggaatttcatgccccccgccggaggcagcctcagcaccccagcacatgaaggccgcctgcccatcttccagcccagcccagcccagctgggactcccctgcagcagccccgggtgggtaggtggggagctgtgtgggctgcagtctaataacctctcagcagacacagagctttcaacgagctggaggaactcctgcaaagccactgcctttgtggttaaaggaatgtattcagccagcgaagccccttttcagtgatacaaattagatacagcgatctcttttatgaagatactaattaagcctgagagagcgggctttaggttttttccattgttatatttgttcagactttcagtcctgtttatcaccatcggcacgactcgtaaataccatcctgggtttgcagtagcattggtggctgaataggggcctccgcccctgagcagagtggtgggagggttccaggccaaggcagagctaccaccgtgaggtgggggtgactgaggcaggcccttggggaccttggggcctagggtactagtttagtagaaaccaaggaacgaagggtctgctgtttttgacccaagaggtacccaagaggtccttgcacctatgccagccaccacccgggccagcctgggctgagcagcaggtccaccactgcccacctgggaacaaagagctagtgatacaagactggagagggccccaaactttgaatccaggcctgagttccattcctgtccctccaacacttatcagctcgggcaagtcaccttaggtctctgagcctcagtttctccatctgtaaagtgggatctcagacttgcttggctgtgtgagttaaatgagatgggtctgtgaagcatacagtaggtgctcagttaaggctgatttcctaattgagtgactgctgcatgtcaagcatgttcaccgaagcaggagagccagccctgccctccaggaccagccagtctgggtgacacagagaatgtaaccagggctgggaggctcggggtaatgggaacccagaggtgaggctcacagtggaccacaaaggcatccaggggagggaagaagcaggcaggacctgagaagaggccggccagtccccctgcctcttggcacccgtggactggtgagggacccctctgagcctggtgactctgtcttccagtcttgtctgcacatttccgggtctgtgaaccatacacagaccacaaaggccgctaccactttggcttccactgcccccggctctcggacaacaagaccttcatcctctgttgtcaccataacaacacggtcttcaaatactgctgcaacgagacggagttccaggcggtgatgcaggcgaacctcacggccagctccgagggttacatgcacaagtgagtgccactctgggggtgcaaccccactgcctcgggccccaggcaaggggcctgcctcccaaaatcgcgtcccctagggaggcggttgggtaaccgctataaggttgggtgggcctg

SEQ ID NO: 28698 - DNA, 2300 bp, Homo sapien
tggccctcccgttccatggtcctgctcgccactgtggacatgggaaagggatgtttacagccctgtaagagcctcttccaacctgcatctgactctccctcctcaagggcaggaggaagggtcgcccaggagagcaggcccaagtcccaggggcctgggagcgggcttacagtggactcctaggacagtgctctgtgtgggagtggtcctggtgagaactgcaggagcccgagctggcctctgtccctcctggagccctgcacacctggtgacaggccctggggatggaactgtctggcgtcaggtcagcagacgctcccaagggcagaggttgcatctgcggccagggcacatcaggtggctctgtgcaccacgagcccagggccaggccaggcatgtgctatcggggcagaggccttgcggcccccatcaagagtcagctgtctggccccgagccccctccctgctgccccagcaccctgacttccagcaccaccatcccagaggggcctgtgagactcagctgcattgagtggcctgaggccaagtgtgcaaggccctggggagctgcagagggagcccccaggagaatgagcctggggccagggcgggggccgccccatcttcctccctcgtgcctctccatgaaaatctgctctcacagcctccccagctcagcttcccgctgtgcaggggcagagactggggctctgagcagcctcaaggacatggccaggggccccccagaccccagcactctgcaaccctctcagggctttagagctggccacggccctcagagggcgtggtgggggctctgggccaaagagggcaaacactgctgaggggacaaggggatgagatgggtctccaggggtccaggagtcactgtggccttcaaccttggccatagccacctcagtgagtgacggaagcgaagccttccctatgggtgaggtagggtggacggggagtgtagacaacactcccagaggcccggctgagagaggcagaggcacaatgcgaggagtgtgggcggggcttccttagtctggggacccctgagcatgatgcgggcgcgtagacattgctgagatgggagtgggtggggggtcagtctctctccatcccagggcccagcacctccctcctcccatcctggggactcccggatcctcatgccttggtgtcccctcctggcggttctttcttgttaacggtcagttctgcaccctggggtccaggccccagcacctccacatgcctggagatcttgcctcctgagtggcagagatgatatgccagcagggttggcatcgggaggaacctgctgggttcagctctatttgttctgaattaccataggagggagagcaaatgggaccagcagcactgggggggcaggtgtgatggacaggcctgggagccacaccctgggaaatgccagccacaatggccccacagaacaggccacagcctccagcccctgccctcccccagccatgcctcctccgcagccatcagcccttgcttcaaactgtgcctctccccaacacccccagcaccaggaggagtaattttcctaataacctttggtgtctctgacttttagcctctagcagccacttctaagatttaccaggatttccgtggacatggtttgacaatttcctcgaggaattagacagttcagttgcaaaactcaatttatctgagagccgcacgttctggtccctgagccaccaggcacctcctctcgccagctctgctgttgacagcaaagtggccgccctgagtggggacctgccaggggcagctcgcatgtaattcaggggcttctttgaggacgcctgagaagtacatagcatctaagactgtgttctcggtaatgagggtttagagaaaagcaattctggagcaggctccaagaaattgagataatttcgctgggagatgagaactgaaacatgaccctgcactgtgtggcctcggtctggaggcaggtgacagggtgacgtgaccacccagagggcccttagatgacagacagggcgaggcggcctcctttgcctgggtggctgcagggtcaggaccaggaccacaaggagaaggtgggcccagcaagcccagaggacacagccaccaggactgtcacccactcctggggaagggcgggtaggaaggaaaggggtagctgaggagatacaagaggcagagggcggcagggagtgagagggaggtggtgggagcagggagggcaggggaaagggcctcaggccagtcctggaggaaggaactcc

SEQ ID NO: 28699 - DNA, 2300 bp, Homo sapien
gccaagagggggtctgttcagttggttggggggggggggcttaaatttttatttttatttctcagtatcttttctctccagccatgccagcttgaaactgaccatgcagaaggatcacctaggtcaagctgggaatccagacccggaatcaaacagttcttaccctttggccagtgtattagtctgttttcacgctgctgataaagacatacctgagactgggcaatttacaaaagaaagaggtttattggacttacagttctgtgtggtggggaggctcacaatgacggcagaaggtgaaaggcacggaggagcaagtcaggtcttacatggatggcggcaggcaaagagagaacttgtgcagggaaacttcccttttttttttttttaatttttttttgagatggacttttgctctgttgcccaggctggagtacagtggtgcaatgtctgctcactgcaagctccgcctcctgggttcacgccattctcctggctcagcctcccaagtagctgggactacaggcgcccaccaccacgcctggctaattttttgtatttttagtagagacggggtttcaccatgttagccaggatggtctcgatctcctgacctcgtgatccacccgccttggcctcccaaagtgctgggagtacagacgtgagccattgtgcccggccggaaacttccctttttaaaaccatcagatctcttgagactcactcactatcacaagaagagtgcagaaaagacctgcccacataattcgatcaccttccaccaggttcctcccacgatgtgggaattgtgggagttacgactcaagatgagatttgggtggagacacagccaaaccatatcagccaggtatcttcactccttggtatttactctggggaacccagcagagaaaagggtggggatttatatacaagtgtagtttataaaactttagcatggtaaacaagataaggatctatcaaaaagggcatggctaaatactttgcggtacaggagttccatggaccacaggcaataactgaaaatcatgcttctgaactatctttaataggaaaatgctcaaaattcaatgtgctgttatggttacaaaatattcataaggtaaaaaatattttgtagaacatatcatagaaaaatgactggatggaagtacagaaatattactatctctacgttacatatatatgtattactatttgctatctttaggtggagggagtctgagtagtataaagttttttttacttctcttacatcaagatttgttacattaaatttatattcaaatcacaataagggcctgatgcagtggctcacgcctgtaatcccagaactttgggaggccaaggcaggcggatgccctgaggtcaggagttggagactggccaggccaacaaggtgaaaccccgtctctactaaaaatacaaaaattagccgggcatggtagcacgcgcctgtaatcccagttacttgggtggctgaggcagaagaatcgcttgaacccgggaggcggaggttgcagtgactcaggatcgcgccactgcactccagcctaggcgacagagcgagactccgtctcaaaaaaaaaaaaaaataagaagaacagtaaatcatcaaaaaaataaacccaatgacaaccacagaaagagccttgcaagccctcttgggaggaatgactgggagaacaccaggtacccgccctgatgaagacgccgcagcaactacagtcttccccgattggcagcagcccgagttggggggtgggggggggtgggactttgtgcatcacttccgggggcggggcagcggtcgtctccgcacgcgcgggagcggtcggtatccatggcaaccagcggggccagcctaaggcccgcccgccaccgccaccgcgccggccccgcccgcacaaaggccgcgcggtgacccgccctctgccgcgaccccggccccgcccctgccccggccccggcctggcccggtccctgcacctgccggaggccgcccgccgccatcgccagcgccgtcgcttggctgcgctgaccgggaagcagttctcggcggtccgcgcggtgattcatcggcctggccgcgtcccccgcgcgggccatcttggtcacggccggcggcggacagagccgcggaggaaccgcgagaccccaggtacgcgtgcccccggccccctgcccggccgggccccgccactgtggtggcccccaggcccgcggccgccaaggagcagccccctttgttctcccccgggcgggcgcggggcgggcgc

SEQ ID NO: 28700 - DNA, 2300 bp, Homo sapien
tacccggacagagtgaggcacctggagaccaagaaccggaagctggagagcaaaatctgggagcacctggagaagaagggaccccaggtcagagactggagccattacttcaagaccatcaggaaccagagggctcagagcttggcaattactgtagacaatgcctgcattgttctgcagatcaacaacacccatcttgctgctgatgactttagagtcaagtatgagacagagctggccatgtgccagtctgtggagagcaacatccatggactctgtaaggtcaatgatgacaccaacgtcactcggctgcagctggagacagagatcaaggctctcaaggaggagctgctcttcatgaagaagaaccacgaagaggaagtaaaaggcctacaagcccagattgctagctctgggttgaccatggaggtagatccccaaatctcagcacctcgccaagatcatggcagccatccgggcccaatatgacgagctggcttggaagaacggagaggagctggacaagtacttgtctcagcagattgaggagagcaccacagtggtcaccacgcagtctgccaaggctggagctgctgagatgacgctcacagagctgagatgtacagtccagtccttggagatcaacctgaactccatgagaaatctgaaagccagtttggagaacagcgtgagggaggtgaaggcctgctacaccttgcagatggagcagctcaacgggatcctgctgcacctggggtcagagctggcacagacccaggcaaagggacagtgccaggcccaggagtatgaggccctgctgaacatcaaggtcaagctggaggctgagatcgccacctactgccacctgctggaagatggcaaggacttcaatcttggagatgccctggacagcagcaactccatgcaaaccattccaaagaccaccacccaccagagagtggatggcaaagtggtgtctgagaccaacgacaccaaagttctgagacattaaggcagcagaagcagggtaccctttagagagcaggaggccaataaaaagttcagaggttaaaaaaaataaaagaactcttacaactcaataattttaaaaatccggctgggcggggtggctcacgcctgtaatcccagcactttgggagcctgaggagggcggatcacctgaggtcaggagttctagaccagcctggccaacatagtgaaatcccctctgtactaaaaatacaaaaatctagctgggcgtggtggtgcatgcttgtaatcccagctattcaggaggctgaggcagaagaatcacttgaacctgggaggtgggggttgcagtgagcaaagatcacgccattgcactccagcctgggtgacaagagcaaaactctgtctggaaaaaaaaaaaaaaattaaaagttcccaaaaatgggacaaagatttaaacaaacacttcaccaaaaaagatacataaatggcaaataagtacataaaaatcatcttcaacaccattagtcattgggggaggggagtacacattttagtcacagcaagataccactacatatccaccagaatggctaaaatttaaagaccctaacaagtgttgacaaagatacggagcaactagaatgcatacattgttggtaagaatgtgaaatggtacaattgctttaaaaatcaatatggcaatttcccgtaaagttaaacaaaattgctgtgaccaaacaattctatgtctagttatttattcaattaaaaaaaaaagcaagcacatgtccacataaaaacttgtacaagaatgttcatagcacttttatttgtgatagccaagaactattaagaactcaaatgtccgtcaagaggagagtggataaatattccattctaaaccatggaagatcatttaaccacagaaaggagcaaacccctgaggcctgcaatacatggatgactctcaaaaacattctactaggtgacaaagcctgatatagaagagtatgtgctgtgtgatgtcatctatatgaacttctagaacagacagggctcctctatgctgatagaaatcggaacagcacggcctgcaggggatggggaggacaggcgatggagacggggatcagatgggagggtgacctggtgagagattttccagctggcagaaatgtcctctaccttgagggaggcgtgtgacatgggagtaagtttgccaaaattcatcaaactgtgctaagatctgtgcacttcactgaatataaacgtcatttaaatgtctacttcatttaaaaaacaaagaa

SEQ ID NO: 28701 - DNA, 2300 bp, Homo sapien
atagcagctttattggtaatagccccaaactggcaatcaacccagatagtcttcgacaagtgaatggctaaacaaattatgatgcacccattccatggaatgctgaccactccacaatagcaaggaacaaactactgaaacacaaagcaacctggaagaatcttcagggatttatgctgagtgaaaaaagcaatctcaaaaggtaacatactgtatgactgcatttatataacatgcttgaaatgataaaattacagaaatggagaacagataagtgcttgccaggagggaggagggagggagataagcacataaaaagtccacgggggggtcctttgctgatggaatgttctgtaccttgatggcatctatgtcaatatcctggttgtgatattgtagtataattttgcaagattttaccagtggagaaaactgggtccaagacatctctactgtttcttatagctgcatgtgaatctacaattatctcaaaataagaaagtttaggctgggcgtgctgcctcacacctgtaatcccaggattttgggaggcccaggcgggtggatcacctgaggtcaggagtttgagaccagcctggccaacatagtgaaaccctgtctctactaaaaatacaaaaattagtcgggcatggtggcaggcacctgtagccccagctactcaggaggctgaagcaggagaaccactcgaaatcaggaggcagaggttgcaatgagccaagatggcaccactgcactccagcctgggtaacagagcgagactcggtctcaagaaaaaaaaaaaagaaagaaagaaggaaagtttaattagaagtgggggaggtcctagtggtcacacaccaagaggctggattagatgacctcaaaggtccctccaaggccaggacatccctcttggcagcacggggctcagaacagctccacctccttctggcacctcttgggccgtttccagccccaccccagtactcgatccaggcactgtctgcccagtctagatgccacccagacactttaggcccctctgtccagatgccctctcctccctctaggatgccccatcctgcagttcaggcagagctgctcactcccagggccctatggaccccattagagtacctggggtctggccgggatgcttgctgtcctgaaatctggtcaccaggaaggccggccatctgatctgcctcatgtcaacactgtttctgggggatgagtggcttagcgtcaaacaagcacaatgatggaaggggaaaaaaaaagctttacaactgaatatggacacaaatatttgcacaattgcattctaaaacattaaaacaatcactacaccaaaacacaataaccataaccatcaccgcccgaatgcccacagcctggcctctggtacaggacttgcggcttctaccaggcactgactgtcaatcctttcggggattcctgggacagacaccactgctccccgcccactgcccccaccacagccacgtaccaacggagaggtacttaaacagggtgaggctgtttaagtgaagagtgaaaagaagcccttttcgagacactggggtgtgggatgtgggttgtggggtgcaggatgtggggtgctggatgtttccaccagggcagttcttctcaaactttactgaactctggaaccacccagaaggcttgttaaaatagggggcccaaccccgagttttgcttctgtaggtccggggtggggccagggactctgcactaacggaggccacactttgagaaccacagccctgggctgtttttggtgccaggcccattcgtcttcccctccctccccgctccgcccgcggctggaccccgatccccgggacagggactgagtctgaccgtctgatttgtcctcccggcttctagcgccccgctcaggtcggggcttggggagggggcgctctctggacgtttgcggcccgccgaggggtggggtgagggcgtcacgggccgatccgggccgccgggtgacccgggacgccccctgccccggcgggcgccgcccacagcctgcgcagtgctcaggggcggaggccgggagggggcccaagcgccagccccccagctccggcggacccgggtgggcgtgcccgcggacccgcttgccgcacttaggcgagtctcccctgcagcgccccgagtccctgggggctgcggcggctgcgggcgcccccgcgcgggcccgaggggcgggacgcggcggagcggggcggggcggggcctccgcggccccctcccccggccccgggctccgg

SEQ ID NO: 28702 - DNA, 2300 bp, Homo sapien
gactccgtctaaaaaaaaagaaaaaaaaatagttcaagaccagcctggccaacatggtgaaacctagtctctactagaaaatacaaaaattagccgggcatggtggcatacacctgtaatcccagctactcaggagggtgaggcaggagaattgcttgaacctgggaggcagaggttgcagtgagccgagatctcgccactgcactccagcccaggtgacagagcaagacgctgtctcaaaaaaaaaaagaaagaaagaggctgggcgcggtggctcacgcctgtaatcccagcactttgggaggccgaggcgggtggatcacgagatcaggagatggagaccatcctggctaacacggtgaaaccccttctctactaaaaatacaaaaaaaattagccgggcgtggtggcagtcgcctgtagtcccagctactcaggaggctgaggcaggagaatggcgtgaacccgggaggcagaggttgccgtgagccgagatctcgtcactgcactccagcccaggtgacagagcaagacgctgtctcaaaaaaaaaagaaaaaaaagaaagaaagaaatggggttttgccacgttgcccaggctggttttgaactcctaggctcaaactgtcctcctgccttggcctcccaaagtgctgggattacaggcatgagccaccacgtctggcctgttctgcttttttcactcggtgtaatatcgtgagcatcttccctgtccctaagcagcccaggagctcgtgagcagtcatgctgagttttcagcagctgcacagtatctgtcccatggctgttctgtcatttgtcttggagcccgcctttcagtggggcctccacatgcacaatgacgtggaaagctgtgtgaccccaggcagggctctcaccctccctgcatctcagtttcctgctctgctgtcaaatgggagcaagaagcaacccacatcctaggggttctgggaggagtaaacgaggagatgggatgtgaagtgtctggcatgtggtggggcttaaaactcggtggctgttgttactgttgctgttgttattattattattattattattattattattattacttaggtcacatatcctaattaaattgtggatccttgcagacaggagccagattctctgcagtcctgtgccccactcctagccacgatcagtcatgtttatgatttgattcctgatgttcggtttcccccaaatagaatgagtctctgtgtgggcgaggtgctgggagaacttgattggcacaatctcattttgtcccccatgagcggggatccttagctccattgtagaaactggctcagatgggcaagttactgaacctgggaaagtgaaaagaaaaagaaaaatcaaaaacaaaaaagaaggctgggcgcagtggctcatgtcagtaaccccagcactttaggaggtcaaggcgggcagatcacttgggcccaggagtttaagccaaacctgggcaacatagcaagacccagtctctattaaaagtacaaaaaaaatgagtcagccgggcatggtggcatgcacttgtggtcttagctactcgggaggctgaggtgggaggatcacctgagcccgggaggtcaaggctgcagtgagctgtgattgcgccactgcttttcagcctgggcaacacagtgagaccctgtctcaaaaaaaaaaaaaaaaaaaaaaaaagaaagaaagaaaagagaagagaagaaaagaaaagaaaaaagaaaaaactggctcagagagtgtgatggccctccccacagtcacacagcagaaatggaggatccaggaatgcttcctaaaggaggcggcaatggccctgggccagcaggatggggggttcgactgggccaacaggcagagggttggtgttctaggcggggtgaagaggaggaggggggctgtccaaggggcatagcagtcggagcccagcacccaacatagggcagagtggagtgtgggtggggctcaggggcgtgtgctgagcttacctgaagtcggcagggcaggaatgagctgtctgggctcctgaccccaccctgtaccttggacctggccagttccttctgtccgggcaggaaggggtgctctgtgggcttggaggatgcaggcgccttcctggggactgctctgtgagcagtgataaaatatttatcagccagcagctgggcttccctgcatagggtgcagtcgggggcagctcccacccgagcctgcagcctgagttctgctgagtcatgggggagcccagtgagccgcctgccctcaagctcct

SEQ ID NO: 28703 - DNA, 2300 bp, Homo sapien
gtccagaagtttgagaccagcctgggcaacatagcaagaccttgtctctattacaaaattttttaaaaattagccagggagccgggcacagtggttcattcttgtaatcccagcactttaggaggccgaggtgggaggatcacctgaggtcaggagtttaagaccagcctggccaacatggtgaaaccccatctctactaataaataaaaaaatcagccaggcgtggtggtaggtgcctataatctcagctactcactagattgaggcaggagaatcacttgaacctgggaggcagaggttagcagtgagccatgattgcgccattgcactccacaggcgacaagagcgaaacgccatcacacacgcaaaaaatcagccaggcatggtggcacatgccttgtagtcccagctattcaggaggctaacgtgggagggttgcttgaacccaggaggtagaggctgcagtgaccacagtggtgccactgcattcaacctgggccaaaaagtgagactctgtctcaaaaagaaaagaaaacgtgtacagcacttgacagttagtttataaagcacctgttgctgcctgtgggccccaagctgcctgtgagatgaaccgttccatcccgctttactgatgagcaagtttgtctgtttatgtctctgtctcccaaagacgatggtatttatgtctggaacacaggaggtactcaggagacactggttgatttgcactaaacaaagactcttcatgaggctctcttactttttattttattttattatgatgatgatgatttttgagacggagttttgctgttgttgcccaggctggagtgcagtggcgagatctcagctctctgcaacctctgcctcccaggttcaagcgattctcctgtctcagcctcctgagtagctgggattacgggcatgcaccaccacgcccagctaattttgtatttttaatagagatggggtttctccatgttggccgggctggtcttgaactcctgacctcaggtgatcctcccacctcggcctcccaaagtgctgggattacaggcatgagccatcacctctctcttacattttatatggggccctcccagctcctggagctgtggctgtcaccccccatctgatggaggggtcaggtgagccttgtgggaatcccagaagctggggactgggaagggccctgttcaaggggctggacgctccctgtggtgaagcccaactctaccatttgttgattgcacaatgttggcacaatgttgggcaagttatttcactctgtgagcctcaatgtcctcaactggaaaatggggagaagaataatctctacctcacggaagtagttcatgttagttcatgtgaaatcagacatctaaaagtgctctgcgaagcaggcaggaagcaccggctgtgccctgccttcactgggatcactctgcccccaccacagggacttgggaaactgcttggttttaccatccaagagacctgggggtgggagataaggagcaaaccctctacttcttcaagccctcactccagcaaatcctccaggcagccaggcaatgctgaagtccctgtccaagggggtctaggctgagcccgggtggagtgggttcttgggccaaggtgcctggaggggactgaaggcctctacccaaagtcctcatgagaactgggtgggggagcctgtgttcaggtgaggggtacggaggcacctctgtggcacagcctttgcgaggagggctgtggagggagacctccggggccggggtcgaaggacatcgtgtgggcgcgaccgcagtgctgggcggggggcgggcgcttgggcttgggccctgcgtcctgtgcgtgttggtttcctgtgggcacgtggggccctcggaagaggggaggagggtgagcacgtcctcagagggcagacccagcgaggcgtcgtggcagctgcggccgcggagacgccggctccgcctcttgcacacgccccctcgcctgaggccccgccccgcccgcgatgcccccgcccccttccccgccccgccccccggggcgccgagacccgcccctgggcccgcccccgggtccgcccccggcctccgtttgcgccgggtctgtgctggccgcgcgcctggcgctccacgctgagcctctccgtgcaatgattaacccggcggggcggccggcgcgggacccgagacggaggcgcggggccggggcgggaccccgcaggaccgctcggcttcctgctctcgccggagtttccgcgtagagggcgcatcgccggcccggg

SEQ ID NO: 28704 - DNA, 2300 bp, Homo sapien
ccgtgtggggacgctgcctgggagaaggagcacaggggagttcaggtgcacaggggcccaagatgctggccgctctgtgacctccagcagaggacttagccacctgggccttggttttctcatctgcaaaatgggtggccaagtcacagggaagggtagagttaaagcagatgaggacgttaggagcatggtggcagctgcctgctttgtggtgtgggcagcatcgtgtggacagctgtcccctccaaggtgagaagtgtggtgctggtctgccataggaaccttggagctgcagctaggtcctgggtgggcggtggctgttgtacccagacctggttctcaccctgaggacctcgtggccagcagcgggcactcatgaccaggaaagtgaatcagcaaagtgctagtggagagtctgcactgggaagggaggggttgggggtcagagggcttcttgcaggtgatggcctctgaatcaagatgaatagctgcttgcctcatggatagggatgagaagggccttccagacaggagaagcagttgctactaagacccagagatgtggcgctacccggagggtcctgcagtctctggggtcagagctcaggatgcccgggagtgtggggaggggccatgtcgggaggagcctggatgctgcctgcaggacctcaggctgtgcctgctgggcaaagccctgggcagggaaggaactgcagcctccacagagggtggatgtggtggagaggtgggaggccagctcctgtcatccgaggtccaggcaagccaggaaggggtacggggagagctctaggaggtagaaatgggctagacttcccgacctcaggtgattcgcccacctcagcctcccacagtgctgggattacaggcgtgagccaccccgctcggcctaatttttgtatttttggtagaggcagggttttgccatgttggccaggctggtcttgaactcctgacctcaggtgatccacccatcttggcctcccaaagtgctgggattacaggagtgagccagcgcacctggcctggttttggtttttgtagaggcagggtctcactatgttgccctggctggtcttgacctcccagcctcaagcaatcctcctgccttggcctcccagagtgctgggattacaggcgtgaaccgccatgcccggctgccacagctaccttcccatcacaccagtcacgttgagcagttgtaacagagactggtgacccaggaagcctaaaagatttgctttctatcccttcacagaaaacgtttgccagctcctgcctcagagagttttgtttcgttttcttttgtttttttgagacggactgttgctctgtcgcccaggctggagtgcagtggcgcgatctcggctcatcgcaagctctgcctcccgggttcacgccactctcctgcctcagcctcccgagcagctgggactacaggcgcccgccatcgcgccctgctgattttttgtatttttagtagagacggggtttcaccatgttcgccaggatgatctcgatctcctgaccttgtggtccacccaccttggcctcccaaaacactgggattacaggcgtgagccaccgcgcccggcagccttagagagttttacaaacaggggcaggaagcatgagggggtcgggagccccacagctggctagggacgcagtgatgatcctgaactccgggtggccgtggaggtagagaaggggcaacagtccacaggacttggatgtgttggggggtgggagaggcgcaggggtttcctggtttctggcctgggcaaggtggggttaagaacccagaaaggaagctggctgaggtttggccacatagtgtgtgcagaggacacgggagcaaggtcctgcggcagtgaccagagggcatctggtgatacaggctgggctccagcagggccgggctgggggtgcagggcctcggagttgaagtgggtgtgagcagggtcctgcagggatggctatcctgcccttctaggagagagggaaagaggaatggggcctgatgggcaaccagggggctctcagacctcaggactgcagtgttttcttccctctgcccccagcatccacaacggggtgatcgccgtcttccagcgcaaggggctgcccgaccaggagctcttcagcctcaacgagggcgtccggtgagtgcctgtcccaccttggtccagggtccttgagtggcagggagggctaggcccagagtcgaaggccccagccaggcccctgacccgccagccacgcctgtgcttcctccccta

SEQ ID NO: 28705 - DNA, 2300 bp, Homo sapien
cctacccctgcttgggttccactgggagctcttcactttgagcctgctccttgcagctgtccctacagagcctctaccagaggtgggtgatggccccctgtggggaagccccaggaccttgccccctgccccttctcagcctccagggaggccttggacttcagcccctgggcagagccggtcctggaagcggagagcctggaggagtggccttgaggtggagggctgcctccctaggaaggggaggaagactggaccgcggccggggttgtagtttgatggcctgtgtgtggcttaagggaatcggctccagctgcagccaagcaactccttggaagccagaaacttgggaactctgggcgggagctcctggtcctctgctgggccctgggatctgccgtcgctcatccaccagggaatccaaacccggtatgggtcacgtgacccagctgtgctgccttacacgcttgcctccatgcctgtgcctcggccgtccccgcgccagacacccttgacctggtccacccagcgcgtggcttttgtcactgccctgcgctcctcactgttcctgagtctcccgacgggctgaaacagggttgttggtttgcagggcctgcacagggccctcagcactcggataaagaaaggaaagacggacaccagcctgcgcccacagcgagaaccccagagtgggagccagcacggagccaaggctactgcggggccgctcgcctgcatcagcccctgctactgccaggctggagccaaggtacggcgcgcacacacccggccccgtcctgccggcagcaaacgcccagtgctgtttcatctcagctttcgacctgcccacgtggggacgtgtatcacgcccctttcatagaggatgccactgagtccgcctggaggaacttcctggggtcgccccatacctgcctccgactaaccctactgccccacagaggggcccccacaggacaggccccggcagagagccccaacagccgcgaggctgcccttcctggcctctcgtcaccgtgtggctccagctggggcctggattctgttttacaacatctgctttccgcagcatttccgccccgtgggctggagaacagcctgcgctgagcagaacgcaggcctggccggtgcccagagccaccccccggccagcccgggaactgagctgcctttcttcctgccgcggcggagggggactgaagggactttgtgtgtgggcacagttcggcggggcggtgagcatccatccgtccggggcattcctgctggcccccatcaccctcagagccaggtttgggctacccgggtgggcagagggctggccactgggctgggagccaaagatgggacccagtccagctcggccccagcccccagggctgcccctggcggggtcccactcctagtgccctcgaacctacatgaagctgggggcttccgggagtgggggcagggcccagagagtgagaaaaaggcaaaggtccctgttcagcctccgcattcccatggaaacctcaaagcagttctggccgggggcgcagcctgagagacagccggcaacgcttccctcttcactcagaggcgcccacaccaagatctctctcgccagttgttcgtctggcttccaggggacagcagaggccttggggacacgtccttggactgtgcatccctggacccagcagccctcatcccagctccgctcagtccaggcagaaaggccaagggttcttcacgttgcctctcccactggaacccagagccagcttgggcagctgtccccgtcccacaagggtcactcacctggtgcatggcaccgttcctctcaaggccagcagaaatcctacagagctggtcccgatgtctgctacctacgtatctgtttcagagactcacctgtcaagatgtgtccccataccactacgtctggcaagcccagctcctatagccagcttggatgctcttcctccaggaagccctccctgcctgaccctctgcaccctcttcttccttcgacgtggtgctgctattggaaggggtctccgtggatccccagacctgaccacaggcagagctggcctggccctgggtcctctgggccactgactgtggtgcaccctttcctcggaggctcagcctctgtctgcttggtggggggtcgatcacccctggctactgcccttatgatcctgctcagtgtcccacttccctgtcatgtgatggatgggcagctgtttggggctcagctgggtccccagtgcccagcatcagcgccagcacac

SEQ ID NO: 28706 - DNA, 2300 bp, Homo sapien
tccctccctgtgaatcccccagcagcgaggcacagcgtaggggctctgtgacagtaaccctttcactgccagaggaaactgaaggggccctctatccttgggacggggtcatctgaggagaacggggtggaggggcctgagggtcggcaggtctcttccccctgtggggtcccaggaccgggagaggggagatgaggacgcatgtgaccacagccggtggggtggggtgccttccgtccacagggcaaggagccatcggtgcgccagctggccctgctgcacttccggaatgccatcaccctcagtgtgaagctagaggatgcgctggcccgggcccatgcccgtgtgccccctgccatcgtgcagatgctgctggtgctgcaggtgggcacagtgggcagagggtcgggcatggggaccgtggggcagtaattgggctcaggtccccacaggcagagcatgagatgaggatttaggggcacgagacttaaggaagggcccgatcagaggagaagcctgtcagggccagggaccggggagcagctggtcagagctgtgggtgcaggagagctcaagctgcagacccgttcctcttgggcacagggctgggcctttacaccctgtgtcggccagcctggggctgtgcccacccccagcacgcacacgcacatacacactacacacatacttgtgcacacgcacatagtatgcacgtgcacatgcatacacaccacacacgtgtgcacgcacacgctacacacatgcctgtgtgcacgcacatactacatgtgcacacgcatacacactacacgtgtgcacgcacatactacacacgtgcacacacgtgcacacgcacatactacacactgcacacacacaccacacacgtgcacacgcatacacactacacacgtgcgcacgcacatactacacacgtgtgcacacatacgcgtgcacacgcatacacactacacacatacatgtgcgcgcacacatactacacacgtgcacatgcacatacacactacacacatacttgcatgcacgcacacatacacacagtgtcccagtcatttctgcccagagggcttttgtcagtgggtcagctctggggaagacactctgagagctgttagcccccctcacagcaggtggggagaggtgcctgccccagaaaggagtggggcccccagtggcatccaccgcaagccaggggtttctgcacacggcccttcccaggcaccacactttgcagttggccggctcatcacactgtcgcaggaccacacagtcactgccggccaccccattttacaggtaggggacccaagtcctgcttgctatgagctaataagggcgggagcccagcttcaccccggctctcgcaggtgcaaagccctctttatcgttctgaatccccgtgaagctcttttaaaattagggtctgtgaggacactcgggaccctcacagggcaaccagagcaaggaaggggcggccagtgtggagctgtgcaaggtgggggctgccctgggtggaagttgagagagtttaggtcaggcctggctgggttgaagcggggacccttgagggactttgctgtgtcagcttcagcttcccggtctttaacagagggaggcctcctccctggcaggataggtgaggacttggtcattcacaaccaagtcactgctcctacaggcagacaattccagggacacgtggggtcccctgtgttagtgtaggtgaccttactgtgggcacctgtggagtcccacctactcattgtaacacaggccaggacataggagcctgtaccagccccgaaaccccaagagttcaggcgactttgctcacccccagggacgtggcctggaccgtgcctcactccctgcctggagtggcctcccacagccatcccaagagtcctgggttagtcctcgcctctggctggctggattgtcacttacaattgtacctgggtgtggccgggtgcagtcactcatgcctgcaatcccagtactttgggaggccaaggcaggcagatcacaaggtcaggagattgagaccatcctggccaacatggcgaaaccccgtctctactaaaaatacaaaaattagccgggcatggtgatgcatgcctgtagtcccagctactcgggaggctgaggcaggagaatcacttgaacctgggaggcggaggttgcagtgagccaagatcgcaccactgcactccagcctggtgacagagcgaaactctgtctcaaaaaaaaaaattctacccccgtgtatcttgtccctg

SEQ ID NO: 28707 - DNA, 2300 bp, Homo sapien
aagaacttaaaatagaactacccttcaacccagcaatcccgttagtgggtacacacccaaaagaaaagaaatctttctaccaaaaagccatctgcactcatatgtgcatagcagcactattcactataggttagatatggggtcaactgaggtgcccatcaatagtggattggataaagaaaatgtggtacatttccaacatggaatactatgcagtcatgaaaaagaatgaaatcttgtcctttgcagcaacatagatgcagctggaagccattatcctaagtgaattcatgcagaaacagaaaaccaaatatgacatgtctcacttctaagggggagctaaaccttgggtacccacagatataaagatgggaacaaaagacattggggactccagaagggtggggggagtagggcaagggctgaaaaacttcctattgggtactgtgctcactacctgggtaaggagatcaacagaaaaccaaacctcagtgtcacccaatatatcccctaacaaacctgcacatgtaccccttgaatctaaaataaaaataaaaataataagttgttgattggctacacatttttctctgtatcacaagttgcaggaacatgcagataatgggtgaggcagtgagtcaggaacaaaatgcctttaaaccatggcccccacggccgggtgcggtagctcatgcctgtaatcccagcactttgggaggccgaggtgagtggatcacttgaggtcaggagttcaagactagcctggcaaacatggtgaaaccccgtctctaccaaaaatacaaaaaattagctggacatggtggcaggcccctgtaatcccagctacttgggaggctgaggcaggagaattgcctgaacccaggaggtggaggttgcagtgagctgagatcgcgccattgcactctcagcctgggtaacaaagcaagactctaaaaacaaaaacaaaaaacaaacaaacaaacaaaaaactatggccccccaagcactgcagggggacctggactgaagtcctatactactgtttctctgggcctgatatattttgttgtatctaagctgctttcctcagatacaaatccttcaacaaaccctagggaaaatttcctctcaagtccctccaattctcccagttctgccacgctttgtacacccctaacgaaaggggccaggtgcagtagctcaggcacgtaatcccaacactttgagaggctgaggagggtggatcacttgagcccaggagttccagaccagcctggacaacatggcaagactcctgtctctacaaaaactacaaaaattagctgggtatggtggtgcacacctgcggtcccagctactcgggaagctgaggccggaggatcgcctgaatccaggaggtagaggctgcagtgaaccaagttcaagacactgcactccagcctgaacagagcgagacccctgtctcaaaaaagtaaaattaaaaatggggcccggcgcagtggctcacgcctgtaatttcaacactttgggaggtggaggcgggaggatcgtttgaggttgggagttcgagaccagcctggccaacatggtgaaacccggtctccactaaaaatacaaaacttagccgggcttggcggcgcacgtctgtaatcccatctactatgaaggctgaggtgggaggatcgcttgaactcgggaggttgaagctgcagtaagccgagatcgcgccactgcactccagcctgggcgacagcgcgagactccgtctcaaaataaataaataaatacatacatacataaagtaaaataatgaataaataaaataagaaatggggaaatggatcagcaagaaagtgcccgccccaggcatgggtgccgtgcgggacggggacgcggcccagccgggaatcggggtgcccagggtgcgatgtgcgaggggctcctgagcgcgtgtgctccgcccgaccccgccctgtccccccgacacacaggtggacccagggtcagctcgtgcacctgggaaatggctcccgccgggtagcaggggcggaggggcggggctgggcggaggggcgggggggcggggcctgcccgggagccacgtccggggaggggccaggtgagcggcagacccggcacgcaggtgggggccggcggggtccgtggccaggtaaggcgggcggcggcgggagggagcgcgcagggaggaggccgtgctcggggtgggggggtgcgccgcgggggctcccagggcgtgtacggggacaaggggccgctggccgggtagggacgcccaggcg

SEQ ID NO: 28708 - DNA, 2300 bp, Homo sapien
agatcatgccactgcactccagcctgggcgagggagtgagactcggtctcaaacaaaacaaaacaacaacaaacagtataaaaattccttacatagcatttacattgtatttggtattataagtaatctagaggtgatttgaacaatacgggagaatgtgtgtaggttccttgcaaacactatgccattttctatcagggatttgagcttccaaagattttggtatccctggggggtcctggaaccaatccctccaggatactgagagacaactgtactttgggcccaactggataatccacgataacccactcatctcaggatccttaacttaatcccctctgcagaatcgcttttgccacagacagtcacatgcacagggtccagggagcgggatgtggacctcactgggaggcctctgttctgcccgacgcaggggctttgcctgtgtggctgctgggtcctcactgccggaaagtgttcttggcacatagtaggtactcaatgcatatttgttgactgactggaaggaggggtgtcctgtggcaccccctactcaccccaccctgggaccctcacacctgttgatgaacaggggccttggccccatcccccgccccattcctgcacagagtggtgctgagtaaataccaggtaaacaccccaaggactggggtagaccgggactgagtgggcagggaggtgtgggaagcagcttccagcccatgtgaggcagccctcaggccccgcctcacgctccctcctcgatggggtgttggtctggatgagtgaatctcaaacctgactttgcatcagaatcacctccagaaattgttagaaaagccagtgctttctcctcgggcaccctcaccagcctcgtcatgccctaggcctcctaactccatgggacctgaatctacccatctcctcgggccgccagcaaagtgccacaacctggcggcttaagacaacaggtcactgtctcagttctggaggccaccagtccaaagtcaaggtgtctgcagagctgcactttcccgaaggctccaggggagggtcttttttgcatcttctggtggttcctggtgtcccttggcttgcggccgcatcacactagtctgtgactccgtcctcacacaccctccccttgtatctcctgagtcattggattcagggcccaccttgatccagttgaccacatcttaactacttacatctccaaagacccgacttccaaataaggtcacattccgagctccaggaggaatactggggtggggaggggatagtcttcaaccccctacacctgggatcctacatctgctctaaccttgaaattcaaaattcctgttcttttttgcagctgaaaacatttctctaagaaccctgattggttttgcatgagaacctcccctgctaagattcaacttaggagggcagccttttctttcttcctcatatggcagtgaccccagtgcctgccctcaaccccagcccaccttggtgctttcggcagcactggcttcctgctggctgccagtgtcagggtctttcatggaggcctggctcagaatttggagctggaggttcaaggttaagtccacaccttgctgccagttagcaagtcactctccctctctgagccttagttgccacccctgtcaatgtggacagtatctgacccttaggtcttatttttctccctccatggtgctggacactggatgggcacttggtgtacaaccgaggtagagtacacagtgggtgcatggctgaggtaggtcgcatagtgggtgctcggctgatgtcgagtgcataatgggtgctcggctgaggtagggcgtatagtgggtgctcgactgatgtagagtgtataatgggtgctcggctgagggagggcgcgtactgggtgctcggctgaggcagggcgcctagtgggtgctcggctgaggcagggcgcgtagtgggtgcacggctgaggtagggcgcgtagtgggtgtgcagcagaggtgggtgactgtcttatgaaaggcatcaggaggctccctcattccccgccttactggagaatgcactgacttcctttaatcttctttgccgcagagctgcagagagacaaggcggcggcggctgctgtgctgggtgcagtgaggaagaggccctcggtggtgcccatggctggccaggatcctgcgctgagcacgagtcacccgttctacgacgtggccagacatggcattctgcaggtggcaggtagggccccagctgggcagtctgcaggaccatgggcagagcagcct

SEQ ID NO: 28709 - DNA, 2300 bp, Homo sapien
gcgcctctcataggatgatctcatggcctgctccagaggagaaaggggaggtcagagagtcctcgaggcccagcctcccacatgcaagctgtgtgacctcgggctagtcacctaacctctcagagctctctttcctcctctctctacactggggtggttgaaatgcttgacctcttgctccctcatagggagtgctcagtgacattggcggttgtgacgctcagctcaccagtcctgcctacttgccagcaggtattctcagagggaccacagagctgagggtgacctgcaccagtacccacttgggaccataattcgtagataaggttcaggcacaacacccagagaaggaaatggcagccacctggctcggttgaaatactcatttcaagggaattccttgtccattcaaatgactgaacaacagcttgatttcatggaataatggcttttattaagaagccaacaggaatgatcatagtggggagtcttgtgtcctggcagtgggtgtttgtagagcacccggtggtcaccagcaactctgtgcaaggctcagtgggagggtgattggtgtgttggaggatgtgggtacacagtagcataggcatgcatgtggctgagtgcacacatgtgcatacatgttcacacatgcacccgcagcgggaacttggtgaatacttgttggttggtggtggtttttttttttttttgagatggagtttcactcttgttgcccaggctggagtgcaatggcaccatctcggctcagtgcagcctctgtcttctgagttcaagcaattctccagcttcagcctcccatgtagctctgggattacaggtgtgtgccaccatacccggcttttttttttttttttttaagtaacagggtttcaccatgttgggtcaggctggtctcgcactcctgacctcaagtgatgtgcctgcctcggcctcccaaagtgttgggattacaggcatgagccactgtgcctggctggttggtgggttttgactggaaggctatggagctccagtggtagatgtggttataagggtaactggggggtctcagagtgggggccagttgcatcaggcccctggagggtgggacactgcctttccaagagcaacaaagtgtgggcgatttgtggtgctgagaatcctgagcaggcagttcgtctagagcagggttgcaaactttttctgtaaaaggccagatagtaaatatgttaggctttgtgggccttgtagtctctgttgcaactactcagctctgccctgatgaggcaaaagcagccacaggcaatgtacaaaatgtccgtggctgtgttccaagaaaacgttattggcaaaaacaggcagtgggccagatctaagccatgggccgtagtttgccaacccctggtctagaccactcccatttataaagtgattcggctttagcagcttcctggaaggtggtgctgctggctgataaagcagagggatggagcttgtagaattcaggtgatgatagggcttggatctgagtccccagcgcgtctcatgttgaattgaaactttggaggtggggactggtggcaggtgattggatcatgagggcagatacctcatgggttggtgctgtcctcgagatagtgagttcttaccagatctggtttaaaagcatgtggcacctctgtcccactctctcttgctcctgtttttgccacgtgatgcacctccttcctttttgccttctgccataattggaagcctcctgaggcttctccagaagctgaacaggtgctggtgccatgcttgtacagcctgtagaaccatgagccagttaaacctcttttcttataaataaccccatctcagcaagaatagccaaacacacaggtttgctgagcagagccatacggccagaagataagtgggggtcccaagcccaaatgtgggatagtccatcctcagagctgtccttcctacacccctgttctcctcccgggccgggatgcagcgctgcccctggcccctctggagctcagcagggagccccatgcccttccaggtgtggagagcagcctgcgtgtcactggctgccgccagatcttacggagcctcccagagcacaactacgtcgtcctccgctacctcatgggcttcctgcatgcggtgagtggggaaggggggagcttggggtgaagcccagtggccttccctcccatgctgggcccgcatggaccagtcccctccttgccctgggtctggggtcatgccctgcttgggcctcggaataccactccctgcccccc

SEQ ID NO: 28710 - DNA, 2300 bp, Homo sapien
atctaaatatcatgtgggatcctgggacagaaaacaaagggctgggcacagtggctcacacctgtatcccagtgcttccagaggcagaggtgggaggatcgcttgaagccaagagtttgagactagcctgggtaacatagcaagacctcatctctacaaaaaatttaaaaattagctgggtgtggtggtgtgcacctgtagtctcagttacttgggaggctgaggcaggagaattgcttgagcccaggagtttgaggctgcagtgagctatgattgtgccactgtactccagcctggttgacagagtgagactctgtctctaaaaaacaaaaagactaaagaaatccaaataaagtatgggttttagctgataataatgtaccgacgttggttctttagttgcgatgaactgggtgtggggtatacaggaactcccagtaatgagtcttgcaacttccctgtaaatctgaaactacaataaataagccagccccataaataaaagataaagggggaaaatatattgcaagtcatatcccagacaaggaaatattgactcacagattcatcaaatactcacgagcacctactctgtggccggccttgagtgaggctccaggagttgttcttcctacagcgtggtggctgcaggactcctggcaggctgtctctcaaggccagcaagagagcctcactcccgtcaccaacaggggtcttatataacatcatacgccataggagtggctttggcacctcttcgctctgtgatgttacctaatcccgtggtattttcaatcctgcccacactcaaggcagggaatgatacggggtggctacaccgcagggtaggggctcgggggccattctagattctgccttccaccaccaaagaatgtcaaatgaaaaaaaaatgccctagtgagctctgtagacaatacagtgtcatgaccttttcacaagtcaaaaacaggtaatggctgggcatggtggcccacgtctataataccagcactttgggaggctggggtaggcctgcacccaggagttcaagaccagcctgggcaacatggcaaaactccatctcttcaaaaaatacgaaaattagctgggcacggtggtgcgcacctgtggtcccagctcctcgggaggctgaggtaggaggatcacttgaaccccagagattgaagctgcagtgagctgtgattactccagtgcactccagtctgggtgacagagtgagaacctgtctcaaaaaaaaaaaaaaaacagataaaactaagtgccaccctgtttcataagtgacagaaatacatgcatatgtatacaaagtcaaagaaatggtcattacaaaactggagaaggtcattacaaaactggagaaatggtcattacaaaactaggatcactagaaatgagggtgaaaagaatgagataaagtgaggaacacagaagagatgcaacttatgggtcaagtgtcaggttttgagtttattagtaggttcatgatgttcaatttattattaaataaaatgaaggacagccatgaaaggaccaatgatgcaaatgtgttatgaaccagtgacgtgttatgtgacattgattagcccagctgtgtgcaccttagctctttaaagtatatttgaatacgtgtatccagtgttttcaaggagcccctccaaatcgagctgtagatgctttctttgggaatcctatttccctgtgtttcttagaaactgacttggtgtctggagttaggggccttagtggttggggcacccataaggattagcccagctatgtgcaccttagccccttaaagtatgtttgaatacacgtatccagtgttttcaaggaggccctccaaattgagctgtagatactctctttggaaatcctatttccccacgtttcttagaaactgacttggcatctggagttggaggcctctgtggttagggcacccatgaggtatcgccctgcacctgccacagcagatgtttgttgagtgcatgaatgaactttgacggttgtgttaatgctcctttgtctgttccttccctcagaaaatcgccttcatggtagcgctaggcctggttaccacggaacatttggaaggtaaggaaggatccaggtagcagcaggttgggctgggactgacccgaaagccggggtgttgggggccaggtgtgatgatgggtggtctgggcttcagcagcagccgatatgggtggagcgtggcctcacactgctgcagtgggtctcaggatgtcccggctcggatggcagtgtctgtgtataaa

SEQ ID NO: 28711 - DNA, 2300 bp, Homo sapien
acatgtggatgatgaactagatagtaaaatgaacagatgaccccgttatccaggtctgttagcagtacgccagcagcggaatcctgtctttcagggcccaaccatgaatttctcattcatgcccttagcgcgatgtttttctcagttactttaagaaacatggacaagtgtgtaaaggtgtttaaaggactcatagtggtagatagcttattggtcagggtagatagagatatgttttctgtgtaactgtctagtttttgtcctaccattcggagactagggaattaacaggaagtgagtttacataggaccttgctatttgaaaatgaagttcatattttccactaaaaaaaaaaatgaggcataggatagttggtcagagctgatgagttgtggccaggcccaggccagctaagctgccttcccaggtgtggctgcactttgctgctgggctgtgattcagatagtggagggccctcttctttaacaagatatgatgtgtgaagactccattagctgctccagtggtttacaccatgagattgcagcacatgcaggggcagtaacatttttatctaaattgtcaagcaacaagcccttctgtgtaagttaaagacccagcgtaaatactgggtgggtggaggtcccctcttcggagttccgagcacagcatttagatgccatgtgtgagctggcatctccagacctgaacttcatgcaggtgcagctttacagtcaggttgggaagagccttctgtttgaaccgcagtccatgctgctgtggtctcatgagaaggaccccggaggtgagcttgggaccttgtgcactaccccaagagtccgtggagctgatgaactctgggttctgagaggctgtccccgagtgcagcagtaaaagtacgttgtcttgaaaggtgttgtgtgcgcgcccagcgctgagacgtgtcttcaccatgacttaccagctgtgtccagcaatgggggattccaccttagaagcagccactgaatgaagctggggggttatccacagccccaccccacattgtttgcagtcctttggtaccaggactttctgttttccgaactctcctcccaagcttactctcctccagaaaggtacattttaatctctctgatgtaaagtgccagttctcattgttgaaacagtatcattatacattgcagaaaaaaatcagtacaactccaaaagctccacacttaatactgctaggggaagatcgtgggaatgggacagcaaggcctagcccggtttcacccctggttagcctggctaccacctgtgtggccttcatcccccacctctcacaccccccacacacacagctggagtttcctggacccctccatcccttcatcgccctgcgcccacccactaccatctcttacctggaagattgtgatagccccttcactgcgtctacttaaaaacatcaacaaaacagctttattgagatatattttacatagacttactcacccatttaaagtgtaccattcagtggtttttagcatattgacagatctgtacagccttcactaccatccattttagaatatttttgtcgcctataaaagaaaccccttggctgtcacttcccctctcccctttcccccttccccagctttaagcaaccactaatctactctgtctctagagttgcctgttctgggctttcgtatgaatggaatcatactatgtgtgtgtgtatatatgtatgtgtgtgtgtgtataaaatgactatatagtatgattatgctatgtatatagtatgattccacttatattaaatagatatatttacatctttttgtgactggcctgttgcacttaatgattcaggctccatgcaagttgtagcacgtatcagcacttcactagcttttatgtcaggacttcccgccctgtagagagaactcattctgtccaaccgttcatccacgagtggacgtttggcctgtttccaccttttcctgttgtgagtggcatgctgcgtctactctgggcccttctagtatattcttccccagagtcagtgtcttagaatgtgaatgaggtcacagtgctccctggctcacaaccttctggtggcttccccttgctcttggaatgaatcccaggggcctgcagagccacagggatggccctgcccacctgctcggcctctgccccagaagctcctcctcgctcctgcggggcagctacagacacctggagtgcttttctgcctctgcggcgttcttagccttgcttgtgtagatcttcctagatcagctac

SEQ ID NO: 28712 - DNA, 2300 bp, Homo sapien
atctgtgtttgggggtcccaaacacgtaatttattacaaattccctaacagagagcagaacaacactggggtcctcacttgaaaaaaaaaaaaaaaagaaaagaaagaaaagggggaattccaataacttctgccaacaaaagcaatgtgtgacctgttggcatatgttgaaagggacatttgctgatggtgcttgcttgggtattttttgtgctgccggagaggaatctgaagttaaaacgacttaacagcttaaacgtttactttgacatatgattgcaccctttctccccagcgtgtttcaaacgtgccagtttgctgccaacagggcacccggcactccgacctgaatgaagatggcagccccgaggtggtgacagtgactctgggacattaacctcctggctgcgcggctgggggttctgaaacgcgacctccgcagctgtaattataattgttttaggtcgcattgaccgggcctgtttacgactcttaacaagagtcttaaaatgtccagtgacatctgttgagagtttaatcgtgtaaaaaaaaatcattaaaggaagagccaagagatcaattttcttgctgtttaaacaacacggaggccatcaggcggcgggggaatgtggcgacgcgactaatttaatcccccaagtcgcggcgctggtatggacaggaggggacggaagaatttaaataaaatatcagagggaggcggaggaggggggaaaggagggagccgaggaccagggtgaggagaaatggaaacacggactcgcagcctcccagcggaaagtgtcctgatcccggcgttacacggcgcagggggtgggggcgccgcgttccccgggttggcccggggacggagaggatgactccgcagtcgtcctctccgagcgcccggcccgagcagtccccggagccggcgaccgtgcgtccccgtccaccgccacttttgttctccgctcggggtgccgggccgcggcggggcggcagtgcgcaggcgcgggcggggcgggggcggggcgcggcgggctgagggtcccggcaccgccccccgccgccccggcccgctccatccgggcactgccgaattagcatcgtgccgaggcacaactttgccgaggcccaacgagatccaggcgcgcgcgccggaggaaatatagtccctgcccgcgggaggctcgcgcgggaggaggcggcggcggcggcggctgggcgggcgcgcgcggggctgcgcggggctcccggcgccgggggggccatgctccgggccgcgccggcagcccggggacccggcgcaacttgccgggcagcctgaggagttggggcagccgagggctcggcgccgcggcgcccggaagcctgtcttccccttcgccagcccccttccctttcggccgtgggggagggggctcgtgtcccccccaacccagcccggaggccgcgtccgcccgcgcccgctctggcccccgcggagccgcgcaacttcccgggagcccgggccaaagtgagcgcaaagtgctgcccaagttgccgggatggagctgcagagccggcccgaggcgctcgccgtggaactcgcgcgccaccaggtaggtggccgggggccgggcccggggccggggagtgtgttgcggggtgagggggtcgggggacccgagcccagcatcctctcttccgggtctctgggtcttccaggctggagcctgcccgggggcggggggcgagggagtgagcacacgcgcggacccccttctgggctcccctccgcctgcccctggcgctgtcctgcacagtttgcgggatcgaggacgcgtgggacccgagcctggagtcttctcttaagcgatgtagggtctgcatgactgggagggtgcctggagggggccccttcgtgagccggtcccggggaggggagtgcgaataggcccccttccggcctcccctcgggcccccgcgccccgggcgaacctgcccggtgtgcagaagtagttttggcgatcgctgctggcgagcggcggcgtggcggccggagcctgagcggggctcggcgtgcgcgtgtgtgtgttggggagattaggacgcgacttgaatatttatgagctttgctcgacacggactcgccgtgtttacttggctctttgttcctcccccctcccccggcacacactcacactcacactcactcgcacacgcaccccggcctgcaaacttgcacggctcggggcgcgccgccgggtggcctcggcccccgccccgccccgcgagctgccccgatgaggcggcagccacag

SEQ ID NO: 28713 - DNA, 2300 bp, Homo sapien
cctgacccgggctaaacccagaagtgggaggagtgggtacctattggggcaccctgagtcagcctctttgttttgcatttgaggaaccttgcttctccctgcttggggcaaaaccaaaggaatcacgaccacttcaaacacgggctagttttgcatccacattaaccagtgttggcttatggtgtgactgtggtcccagctacttgggaggctgaggtgggaggattgcttgagcaggtgaggtggaggcagtggtgagctatgatttcaccactgcacattagcctgcacgacagaatgagactcacacagtaagtaactatgcaaaaaacagaggggcatgtatatgatccttaccgtaacccacatatttaacctacgtaattaaatcaacagaggttattcaggtcatcttcggcccacacagattcaggcagatgctggccggagggtagtggctcctcctgttgagtcttttctgtttgtttgtttgttttttctgagacagagtcttgctctgttgcccagactggagtgctgtggtgcaatctcggctcactgcaacctctgcctcctgggttgaagcaactctcctgcctcagcctcccgagtagctgggattacaggcttgcgccaccatgcctaattttttgtatttttagtcgagaccatgttgggcaggctggtctcgaactcctgacctcgtgatctgcccacttcggcctcccaaagtactgggattacaggtgtgagccaccgcccccggccggcctcctatggagtcttaaagcgctgtttgcaagtttctgttaactaatttgggttaaagtaagggtcatctacatgcccctctgctttttgcatagttactcatatcctaagtctcactctgtcgtgctctgaaggcgaggtgctgggttgtgggatgaggggccatctgtgtttgggggtcccaaacacgtaatttattacaaattccctaacagagagcagaacaacactggggtcctcacttgaaaaaaaaaaaaaaaagaaaagaaagaaaagggggaattccaataacttctgccaacaaaagcaatgtgtgacctgttggcatatgttgaaagggacatttgctgatggtgcttgcttgggtattttttgtgctgccggagaggaatctgaagttaaaacgacttaacagcttaaacgtttactttgacatatgattgcaccctttctccccagcgtgtttcaaacgtgccagtttgctgccaacagggcacccggcactccgacctgaatgaagatggcagccccgaggtggtgacagtgactctgggacattaacctcctggctgcgcggctgggggttctgaaacgcgacctccgcagctgtaattataattgttttaggtcgcattgaccgggcctgtttacgactcttaacaagagtcttaaaatgtccagtgacatctgttgagagtttaatcgtgtaaaaaaaaatcattaaaggaagagccaagagatcaattttcttgctgtttaaacaacacggaggccatcaggcggcgggggaatgtggcgacgcgactaatttaatcccccaagtcgcggcgctggtatggacaggaggggacggaagaatttaaataaaatatcagagggaggcggaggaggggggaaaggagggagccgaggaccagggtgaggagaaatggaaacacggactcgcagcctcccagcggaaagtgtcctgatcccggcgttacacggcgcagggggtgggggcgccgcgttccccgggttggcccggggacggagaggatgactccgcagtcgtcctctccgagcgcccggcccgagcagtccccggagccggcgaccgtgcgtccccgtccaccgccacttttgttctccgctcggggtgccgggccgcggcggggcggcagtgcgcaggcgcgggcggggcgggggcggggcgcggcgggctgagggtcccggcaccgccccccgccgccccggcccgctccatccgggcactgccgaattagcatcgtgccgaggcacaactttgccgaggcccaacgagatccaggcgcgcgcgccggaggaaatatagtccctgcccgcgggaggctcgcgcgggaggaggcggcggcggcggcggctgggcgggcgcgcgcggggctgcgcggggctcccggcgccgggggggccatgctccgggccgcgccggcagcccggggacccggcgcaacttgccgggcagcctgaggagttggggcagccgagggctcggcgccgcggcgcccgga

SEQ ID NO: 28714 - DNA, 2300 bp, Homo sapien
gttatgtgtgttttgtgtgactcagaagtagataagacgaatagtcctagaaggaatgcagaagacagtgagatggagttgagagtgtgatttcacagtcataaagactcaagtctgaattccagttctgtcactgattagttctgtgcccttggaggttttactcacattcatggaacctcagtttgtctgtctgtaaaatggaaataatgacttctgctgtttggttgagcgaggtgatggggatggttcatggtgaagcagaaaggtactaccagatgagtttactggctgcgatctggccctcaactttgcaggtctaaacttttgtaattacccagagatgagcttggtggcagaccgacactaatacctctttcagggttgtagtgggttgaatagttagtggccctcaaaagatatgtcagcatcctaacccactcaactggtgaatgtaaccttatttggaaaaagggtctttatagatgtaattaaggaacttgagatgatcctggattttccaggtggacactaaatgcagggacaggtgttcttaagggaggaagagcaggcagccatgggaagacagcaagagaatggaggtatgcagccataagccaaggaacacctggagtcaccagacactggaagaagcgaggaaagattctccctagagcctttggagggagcgtggccctgctggattttcaactttaccctccagagctgtgagagaataaatttctcttgttttaagccaccaagtttgtggtaacttgttagagcagcctcagtagccactaaataaagtccagttgattagggaaatctatctggcttaactaatgataaaaacaaatttaagaaaataattcctttgggaggccaaggcagcaggattgcttgaggctagatgtttgaaaccagcttaggcaactaagcaaaacgccatctctgcaaaaataaaaaaaaatagctgcacatggtagcacatgcctgtagttctagctactagggaggctaaggtgggaagattgtctgagcccaggagttggaggctgcagagagctgtgatcgcaccattgactccagcttgggcaatagagtgagactctgttgctccaaaaaaaaaaaaaatagccatcagaagaaggtgttgttaataaaaaccagataaactgggtttggaaaagaatattttgccatatgaatccatccctgtccaggtgaaagagatgaggagcctagagacgaaagattttggttactactgaagtgttctgttcagtgggtcatggacgtttcattattaggctgcttcctggtctgagtgaaatctcttcaagacgattcctttctttgctgcagttcagcatttatcaaaaaatagccaatggaatgccagtgctgagaaatgctctgaagtaaaagtattccatggttaaataggctcggggtgtcgtatctccccagtcttagagcttcacaagcacatcatcataggagccaagaagttatgacataaagctgtttgaactatttaatattttcacaaatgtatttgagcccaggacctttgtatagcaaaataataccacattagaaacattaataattacatttcccaagtatcctggtatggggaaagaatgccctggttaagaaattcaagacaataaaagctgagtgcggtggctcacgcctgtaatcccagcattttgggaggccaaggcgggcagatcacctgaggtcaggagttcgagaccagcctggccaaaatggtgaaaccccatctctactaaaaatacaaaaattagctgggcgtggtggcgggcgcctataatcccagctacttgggaggctgaagcaggagaatcacttgaacccaggaggtggaggttgcagtgagctgagatcgcgccagtgcattccagcttgggcaacagagtgaggcttcatccccctcaaagaaaagccaaactaataagattcaaaatgataaaataataaattggtgtttttttatactttgccctatagtagtttccttgcctcttccagcttctggtggctgccccagcattcctgagcgtgtggctgcgaaactccagtctctgcccccaccttcacatcatcttctccatgtctccttaccttcctttgcctctgtcttgaaaagacactgtgatggcatttaggacccacccagctaattcagtgtgttctcatctgcagatccttgatcaagtcacatttgcagagacctctttttcaaataaggtaacatttccaaattcctg

SEQ ID NO: 28715 - DNA, 2300 bp, Homo sapien
gctgcaacctctgcctcgcgggttcaagtgattctcctgcttcagcctcccaagtagctgagattacaggcatgtgccaccacgccccgctaatttttgtatttttagtagagatgaggtttcaccatgttggtcgggctggtctcccactcctgacctcaggtgatgcacccgcctcggcctcccaaagtgctgggattacaggcgtgagccacagcgcccgacctgtgtgtcattctttaactctcgtcttcccttcaaaacctaacaatatcttaagatcaaaagcattcttcatttaggtttcgctttaaagataatatagatctttgccaaagtcagtaaacaaagatgaacaatccttgtgtcaggcctctgagcccaagccaagccatcgcatcccctgtgacttgtacgtatacgcccagatggcctgaagtaactgaagaatcacaaaagaagtgaaaaggccctgccccaccttaactgatgacattccaccatcgtgatttgttcctgcccaaccttaactaagtgattaaccctgtgaatttccttctcctggctcagaagctcccccactgagcaccttgtgaccccccacccctgcccaccagagaacaaccccctttgactgtaattttccattaccttcccaaatcctataaaacggccccacccctatctcccttcgctgactgtctttttggactcagcccgcctgcacccaggtgaaataaacagccatgttgctcacacaaatcctgtttggtggtctcttcacacggacgcgcatgaaaccttggtcgtgggccctcgtggtagagcccatgtcccccaagatttctttggctgtgttaccttagatttgaacaagcactgtacctaaggcgggcgccttcctcctcccgctttcaggaatgccctgctctgccattcttttgctttctcacttctctaatacacttgctttcactttagtccgtggactcgccccgaattctttcctacgcgacatccaagaagcctctcgctgggtctgagtggagacctctttctggtaataaacggactagggagattcgactttgaaggtgaaaacaaaaaccaccatccagtttataagaaggcgctcgaggccgggaacggtggctcaggcctgtaatcccagcactttgggaggctgaggtggtggggcggggggagggaatcacctgaggtcacgagttcgagaccagcctgaccaatatggtgaaaacccgtctctactaaaaatataaacattagccgggcgtggtggcgcacgactgtaatcccaactactcgggaggctgaggcaggagaatcgcttgaatccgggaggcagaggttgcagtaggccaagatcgtgccacttcactccagcctgggcgaacaagttaaactctccatctcaaaaaaaaaaaaaaaaaaagggcggcactggaaacagctgggagtgacagggccagggatgagggatcgcaagctgctggtgagaaaggagctcagaggctgcctggcctacgggccaggagacctcagcgcaaaaagcgcaggactcgttcccctgctctacagctgagtgcccaggacggatctcactggctgaaaaaaacagaagagaaggcacccaatgcaaaatcaaatgtcagcgaacgaggggtcctttaacaggcggcccacacggcccctcctggcgccgagacccagcccctccgggccaccccggccaggtacgaccagcagggtcacctgcgcgcgtcccccgagacggggcctcctgatgtgaagcgaccccagtggcacctcacacgattcccgagggttgcgggcggcctctcctcagccctgcagctcccacacgcggacaccgcgggcctcggccatgtccactgaccgaccttcctcgccggaactcctcgcgcatcgccggcccctcagcggcgactagcgcgcgaacatcctggaagacgcgttgccggccccacgtgagccgacgccccaaagcgcggctgctggcgccggctacgagatcaaggtcggcgcgtgcgcgcttgcgcgagaccggcattctcagccccgcgccggtttccagggagctgggcgcatgcgccgcgtaaggggcccggccggcggaaggaggtgctactgccggaagcgccggcgcgcttgcgcagtagctgaacgcgggcgtttctttcctccctttttttcgaattggttttgggggtagattcgagttacaaaatggccgcccggagcgtgttcggcgcggttcc

SEQ ID NO: 28716 - DNA, 2300 bp, Homo sapien
cttggtcgtgggccctcgtggtagagcccatgtcccccaagatttctttggctgtgttaccttagatttgaacaagcactgtacctaaggcgggcgccttcctcctcccgctttcaggaatgccctgctctgccattcttttgctttctcacttctctaatacacttgctttcactttagtccgtggactcgccccgaattctttcctacgcgacatccaagaagcctctcgctgggtctgagtggagacctctttctggtaataaacggactagggagattcgactttgaaggtgaaaacaaaaaccaccatccagtttataagaaggcgctcgaggccgggaacggtggctcaggcctgtaatcccagcactttgggaggctgaggtggtggggcggggggagggaatcacctgaggtcacgagttcgagaccagcctgaccaatatggtgaaaacccgtctctactaaaaatataaacattagccgggcgtggtggcgcacgactgtaatcccaactactcgggaggctgaggcaggagaatcgcttgaatccgggaggcagaggttgcagtaggccaagatcgtgccacttcactccagcctgggcgaacaagttaaactctccatctcaaaaaaaaaaaaaaaaaaagggcggcactggaaacagctgggagtgacagggccagggatgagggatcgcaagctgctggtgagaaaggagctcagaggctgcctggcctacgggccaggagacctcagcgcaaaaagcgcaggactcgttcccctgctctacagctgagtgcccaggacggatctcactggctgaaaaaaacagaagagaaggcacccaatgcaaaatcaaatgtcagcgaacgaggggtcctttaacaggcggcccacacggcccctcctggcgccgagacccagcccctccgggccaccccggccaggtacgaccagcagggtcacctgcgcgcgtcccccgagacggggcctcctgatgtgaagcgaccccagtggcacctcacacgattcccgagggttgcgggcggcctctcctcagccctgcagctcccacacgcggacaccgcgggcctcggccatgtccactgaccgaccttcctcgccggaactcctcgcgcatcgccggcccctcagcggcgactagcgcgcgaacatcctggaagacgcgttgccggccccacgtgagccgacgccccaaagcgcggctgctggcgccggctacgagatcaaggtcggcgcgtgcgcgcttgcgcgagaccggcattctcagccccgcgccggtttccagggagctgggcgcatgcgccgcgtaaggggcccggccggcggaaggaggtgctactgccggaagcgccggcgcgcttgcgcagtagctgaacgcgggcgtttctttcctccctttttttcgaattggttttgggggtagattcgagttacaaaatggccgcccggagcgtgttcggcgcggttcccccagctgtctctggctgaaccggcgctctcgcctccctgccgaacacagcgtgaggagcccccccagggatatggtgtttgagtctctgggcttgccgagcactaagtcctctgagttccgcagcgcagcaccggaagcggccgagcgcgctcagcccggcgacccctgcgggctccagacccctgcgccgctgcgccccgggtttcgccgcaaccaagacccagcgagtgcagcggcggccgccgaggaggtgaggagcggcggcgggcgcgggaggagaagaggctgagggcgggagcctggtgctgagagcccagggccgggagggcgggagcgggctcgggcctgggaggggagtgcgagtgcagggctggggactggaccctggggagggaggtgcgggttcagcgccgggggacgggcccctggggaggggtgcggggccgggggaccagaccctggggaggggcttaaggggctggaggacgggaccctgggaagtggggtacagggctagaggtcgggactctagggagggagcctgggtcgggcgcacgggccgggcggggcgcgcggtgggggagcgacgggtggagggtggggtgggatgacagcggcgacgcagccccggctgtttttgaagcggggcccgggccccaccgggctgcggcgtccgactcgagtgagactctcccctgcggccccgccggaggtagggggctggcagggctgtcctggcgtggtcttctccgtttccttcctagcgattcctctcgagcttcctctccccctggccgcc

SEQ ID NO: 28717 - DNA, 2300 bp, Homo sapien
tgcctcagtttcttcatctgtggaacaggaagtattaagaaagttaagataaacaaagactggcttagaacagtgcctggagcagaggaagggcttaataaattattaaagaaacaagttttattagaagcaaaggctataaactatcattttccctccaaaacgtaaaagttgtagcatggaagaagaataacttggattacaaaccagatttttacaaatattttaccaaatccctattttatttcaaagcatgacacttcagacaatacattttacttttatgctagaagtgggggggagaaaaaaccctctgtaaaatattcagaacaaggcctggcacctggagtcttatgtctagctactgttatgaagaacttaagggaggcggaaggatctcttgaagccaggagttggaaaccaacttggtctctacgaaaataaagatggacatagattagatgaatagaaataaaaaattagccgagcgtagtggcgcacgcctgtggtcccagctacttggaaagctgaggcaggagaatcacttgagcccaggagcttcaggctacacagtgagctaccactacactgaggcctggtgacaaagcaagacccagtctcaatcaaacaatcaataaaagggaatttaaaaaacgtttgcgtttgtgggtaaaaaaccaaattagacatgatttctaggtatgaagcaacgtggtgggagactgaaagtctaggtaaactggaaaaaaacattatttgtgcctgatatagttatgtggtctctggcatctggtgtagctctgcccttggaaagctcaacttgtcaacatcaccttaaaacgaaaacacagatttggctacacttaatagtgaagtgccttgttggaggaaaacaacaagggggccaagtaaggagacagaaatacctaatctccaagctggttcttaatggaaccgagcaaatgggtgatgaataacccgggaacgcagtaagacaggccagagaggtaatgcgcccaagagaagagagacgaggggcggccagggggagaggaagctcgagaggaatcgctaggaaggaaacggagaagaccacgccaggacagccctgccagccccctacctccggcggggccgcaggggagagtctcactcgagtcggacgccgcagcccggtggggcccgggccccgcttcaaaaacagccggggctgcgtcgccgctgtcatcccaccccaccctccacccgtcgctcccccaccgcgcgccccgcccggcccgtgcgcccgacccaggctccctccctagagtcccgacctctagccctgtaccccacttcccagggtcccgtcctccagccccttaagcccctccccagggtctggtcccccggccccgcacccctccccaggggcccgtcccccggcgctgaacccgcacctccctccccagggtccagtccccagccctgcactcgcactcccctcccaggcccgagcccgctcccgccctcccggccctgggctctcagcaccaggctcccgccctcagcctcttctcctcccgcgcccgccgccgctcctcacctcctcggcggccgccgctgcactcgctgggtcttggttgcggcgaaacccggggcgcagcggcgcaggggtctggagcccgcaggggtcgccgggctgagcgcgctcggccgcttccggtgctgcgctgcggaactcagaggacttagtgctcggcaagcccagagactcaaacaccatatccctgggggggctcctcacgctgtgttcggcagggaggcgagagcgccggttcagccagagacagctgggggaaccgcgccgaacacgctccgggcggccattttgtaactcgaatctacccccaaaaccaattcgaaaaaaagggaggaaagaaacgcccgcgttcagctactgcgcaagcgcgccggcgcttccggcagtagcacctccttccgccggccgggccccttacgcggcgcatgcgcccagctccctggaaaccggcgcggggctgagaatgccggtctcgcgcaagcgcgcacgcgccgaccttgatctcgtagccggcgccagcagccgcgctttggggcgtcggctcacgtggggccggcaacgcgtcttccaggatgttcgcgcgctagtcgccgctgaggggccggcgatgcgcgaggagttccggcgaggaaggtcggtcagtggacatggccgaggcccgcggtgtccgcgtgtgggagctgcagggctgaggagaggccgcccgcaaccctcggga

SEQ ID NO: 28718 - DNA, 2300 bp, Homo sapien
ataggtttattgcattagtctttcttaccttttatgtcctaaaaatacacataatatattttttaaatgtccttcctgcctgtttcaggaaagcagctttgggttgcaaagctgttcttatgaatacaatcttcccatctcatttcttatttctgcttgtgccagcagtttgccttataacgctgactgcatgtggagtctaggtgctgtttagccaagatgctgttgtcactcacttgctttttggtaatagaaagtacacttacctaatgtgtgctcctccttcatacttcagtctgacactggaggagcctttaaaggttttaaaggtttggtggtaccttctggaggaggacgcttttctggatttggtagtggcgctggagggaagcctttggaaggactgtcgaatggaaacaacataaccagtgcccctcccttcgccagtgcaaaggcagcggcagatcccaaggtagcctttggtaagtagctcccatcccccagccgcctgtgtaagtatcatctatggaaaatagctttacaaagatgtttttcttatagctaccctgtgtcttggaactgtgtgagcaaaaccagggtgataatgaaagagatggaacttagggaggtgtcggttacttacagagtaagtgggtagagcacaggcttttgatccaaaacatctcagctttgttctcagctctgctggctaccagttgtgtgaccctggcctctaggcctcagaatgttcaattttgaaaggagagtggccctcagaattgacctagagtcgagagagaaaagaaaatgctatgtagaccctttgtgtgccaagggctttctgtgtgcctcgcaccaaactggctactgggaactcagatgcggttctccgtggccagggtgcctcccacgctaggtttgtttgggtatgggatgtgttgattgcctgatcctgttttgagggagtcagtcaaaaactcttggaattagcaacagagaataggatcacgggttaaaagcttggaaatgatcctgactggttgggttgtatttagctgattattctgagagtatatactgtttgattttaatttggcagaatgtttagtgtgatgtaaaataagtgttctctgttaagttttgttgttgttgttgttttttctaagttggagtcttgctctgtcaccaggatggaatgcagtggcgcgacctctgctcactgcagcctccgcctctgggtttaagcgattctcctgcctcagcctcccgagtagctgggactacaggcatgcaccaccatgcccagctaatttttgtaattttagtagagacggggtttcaccatgttggccaggatggtcttgatctcttgaccttgtgatccacctgccttggcctcccaaagtgctgggattacatccgcgagccactgtgcccggcctctgttaagatttttaactacagccatcccctagtatcctggggattggtttcagcacccccttggatgttcaagtcccatagtcagaccagcataactcttagataggaaaagtgagtgttcgtatccactggtttctcatccccagagtactgcattgagacagggtctcgctctgtcacctaggctggagtgtattggtgtggtcttggctcactgcagccacaacctcccgagctcaagtgatcctcccccatcagcctccccagtagctgggattataggtacacaccaccacactcagctaatttttacattttttgtagagatggggttttgccatgttgcccaggctggtctcaaactcctgagctcaagcgatttgcccacctcagcctcccaaagtgttgggattacatgcgtgagccaccacacctggctgaggactgcatttcacaggtgtagaacctgcaggtacagaggggcgactgtactttaatactgttcatcccaacaaccttggggattaagtgttaatgctgacctgctgttctaacagtgctgtttgaaataggcatccttttgtctactgccacaccaccctcgacgcgcccgatcacatctcagataggcgtccttttgaaggaaaagattatttttaaaatgtgtagagcaagcatatggtggttagtgttcttgtataaactttgacttgatctttattcatcggctttactgataactggttactaaattctactccttgaacacatactttttgagcggtcacaaaaatagggcacagtaggtcgggcgcagtggctcacgcttgtaatcccagcactttgggagtccgagg

SEQ ID NO: 28719 - DNA, 2300 bp, Homo sapien
gaaaatcagcctatgaacagtcagacttgtccttccatggaaaacataatctaaacttctttaaaaactggccatattttttcagtctgtaattcgaataatgaagatggcataacaaatttttttgcttactaggaatgcgcaaaaggatgagatggatacacaggttttaaaaaaaaaaaaaaaaaggccactgggatatttagtatttgtccagatgcaaaacaatttcagaataacaaaatacacaccttgctttaggccacgtatatgatacacttcatagattctcaaacaaaagatgaaaatttcagtccacattaaacattttaaagcataacttctaatattttgttaaaaataagtcaaactaaacgcataaatcagaattacctgttaacatagtggggaaagtagggaagccctccaggggccccgtgccccaagtaaaagacaaggagttaaattttacaatgaaatccacgtatactcaggctctttacactaataatcaaagtggagaccaaccagttcctaaagcataaaagagtgattttaagaaaatatcacattttgagttacggtatattcatcacatttttccctgtaattttcactttaacagtgatagtcttagcagcaaaaatttgctgggaatgttaggaaaaaaggaagccacacatacctactaatttaaaaatatataaactattttttacagaagggcaggtttaaaagaaaatccaatcatgatcttttcatgccattttttgtcaactttccatacacacgcagacgctaacaaagtactgtgtcatatacactgaagtgtcctgaagatgcctgtgagctgctgattccagctggtaccagggaagcatgtgtggctaagttgcaacaaacttaaatttgttccccttagttcttcatctttttaaaagctgaataaacttaatgtcaatcgggtggggccggtattaacagcatcaaccgcttgcttactatgaatcatccgcaacagaaacccacgtgcattctccattcttaaaaagtcagtgtaaaactaacggccacttcctccctaggtgcctactatcgctatgtctgacagcatctgtaacaggacaagctcacctctctctacacggattcatccaaagccacacactaggccaaattctcccagtggaatcaaaacactggaagtagagcaagaacctcatgccaacattggcccaatcacacctcagtgacttaggagttcatcatatttgatcataaaattgctcccggcgccaaaccttacacctaaagactgtagttttaaaaagccactgtaccgtccacaattattctgaccactcttttctaaatggagaatgtgctacgcactgaagatcagaacacacacgcgggagcccttgggcactgaccctgagcctgtacacaagatcagctggtactagtctcaaatgattcatgaggactcagtggaaatttaaacattcaattctgtgtatcattcatgtgcccagagtcttcaaagaatgctcgtgttagttacctgacacctctggagaagtgacagggatattcgtgtgaataaccatggctcccttccagacagacatatggaatcttactcttaaaaaagtaaagatatttcagatatcaaatgtattataatatactgcggtctaaagttaaaggcaaagtttacacacgattttctcttccatgactttattacatgtttcctagtgaattcacacggctcgtgtgtcaaagctcccaggcacgtcacttggtcacagttttcatgtgcgtggggttgatcatggtacaaatgcctatgcgcatctttttctcggatggtctcatttgactttcatttcgtaagggttcactctccatggtgtagatgataagctaccacatttgtgcttttaaacccattcctggcaatccccctttatcttcattttgtctttagggggataaagaagtaacactacctcatgaatagaaactatgaagccaaaaaactccttcacaagctgttcatttctttttagaatgaaaatgcaggtcctgaattctcgtgaagcagcccacagggttacaggccaatgattcgaacgctgaggtgaacacttagtactcgcatttgagcttcaaagtaaaaataaagcagaggacaaacgcctgtcacagcgtggcagcccggttcatttggtaacagaacaagtctcacacgtcggctgagcccaccggagagaagcacacaggccagcttcctt

SEQ ID NO: 28720 - DNA, 2300 bp, Homo sapien
catcgtaatgcctgcatagtagtcagggaagaagaagagcaccacagtgggccctgggcactcacttctgctctgggcctcgcaggcagctgagcctgaggtggaggtggaggtgtaccggcgggactccaagaagctgccaggcctgggagaccctgacatcgactgggaggagagcgtctgcctgaatctcatcctgcagaaggtatggggtgggatgggtggggctgcggattggccctgtgggatggctgacccctccctgcacgctgacccgtgctctcttccagctggactacatggtgacctgtgcggtgtgcacacgtgctgacggcggggacattcacatccataagaagaaatctcaggtgagccctggcacgagagcccccagcctcctaactgccagttcaggctgggcgtggcagagagagacaagtcctcctgcttgcttctctgccctggaggtgaggggtctgactccagaaatctgctcagctcctgggatcccgtatcccattcgaggagcacagaaccagcttatcccccacatctcctggtaggtctctggctttggactggctctgggccgggtggcctccctatactggcttggactggctctgggcctgtgtgccgggtggggcctcacttgtcctccaaatctgctttcttccagcaagtgttcgcgtcccccagtaaacaccccatggacagcaagggggaggagtccaagatcagctaccccaacatcttcttcatgattgacagcttcgaggaggtgagctctgcacagggcctctctccttagcttccccttctcgtgagatgggtgttaggcgcttctccccgcggccttagccttgcagaaaggcatgggtggcttggagccgggaagagtccggctgaggcagatgtggctctctctcttcccagtgtttgcttgtgggcaggtgaatttccccggcgcagcctccgtttcctcctctgtaaaatcagtgtcatgatcatctgtcctacttactgtcagggctgaagactaaaaggctcctgagtgggaggacgcctcataaactcttgcaagaagcactgcccgggcgggaggagccattattaatgctagtaaatgataaagaagcgcctccacgcctgcactgacttggaatcctaggatgtcaaagagggatggggtttccggagttatctgggccaagcctttgttttaaggtttgggaaacgggcttgggcagaaggagactcaccgagaaacacagggcactgggagggcggggagggagccggtcgcagctcactccctgctctgcccatttgtgtctctcctctgttgaggccctggtcggggtccttgtgcgcatccaaggtgctcagggccctgaggacttaggaggaaggcgtgggcgtctgcaggaaaatcgcaggctcagggaggtcatgtcccctccccaggcacacgtagctcctagagggcagagctgagatttgcgtctaagtctttgtggcctcggagctcacagtctgtgcaccaggtcctgggagcaatgactcgggaaggtggcaggatggggcctgtggcaccttagtctggtgttgtcaccccaggtgggcagtcaccctgccaccacactgagcctttggccacacaggagcctcaaagatgtggcaggcagggctgggcacccctaggcggtgtggaggggcccagacggtggctgacggtcctggtgaaccgtgatgagggtgtgcgtcttctgccagtcccagagtctccgtaagcgtccctgtcctcccctgctgctcagcccctgccccagtgtgaggctgttcttgtcctgtggggctcggagggcatggggccacaggagtgtgtgacagccggttgtcccctgcaaaatggggttttctgagcagccctccctgccagttgggccaggctgtggtgtgggcggtgggagctgatggtcacgtccctgtctctttgtgtcctggcccaggtgttcagcgacatgaccgtaggggaaggagagatggtctgtgtggagctggtggctagtgacaaaaccaacacgttccagggggtcatctttcagggctccatccgctacgaggcgctcaagaaggtgtatgacaaccgggtgagtgcggggcggcctcacgggtgttcttctgggcccggggacggcggctccacagcccaccgtggtccataccatggggccccccagcctgcttgtgcatggtagcggccgccaggggtacctgcagcccctccgggctccttc

SEQ ID NO: 28721 - DNA, 2300 bp, Homo sapien
caggtcaatgaagcgagaccaggaggaacagcagagtcttgtgaaccccaggactctcagctcaggggctcggggtgactgcagaaccatacaggcggtggaagtggggccccccgacccggggacgtctgtttctcgctcctaggcaaggttggcctcttgcacctctttccatagatcccagctctgcctttggggggtgcaggcctgtgcacctgcaagagggcccagcagtgcccagcccctcggagcccgagtcagtgagagcacccaggaccgggaccagaggcccccagtcagcacagctgcttcaaaattgaaagccaggctgggcgcggtggctcacgcctgtaatccctgcactttgggaggccgaggtgggtagatcacttgaggtcaggagtttgagatcagcttggccaacatggtgaaaccccgtctctattaaaaaaaaaaaaaaaaaattacgtgtggtggcagacgcctataatcccaggtacttgggaggctggggcaggagaatcacgtgaacccaggaggtagaggttgcagtgagccaagattgtgccactgtactccagcccgggtgacaaagcaagacttcatctcaaaaaaataaaaaaataagaaataaattgaggccgggtgcagtggctcatgcctgtaatccctgcactttgggaggccgaggtgggtagatcacttgaggtcaggagttcgagatcagcctggccaacatggtgaaaccccctctctattaaaaatacagaaaaaaattagccaggtgtggtggcagacacctgtaatcccagctacttgggaggctggggcaggagaatcacatgaacccaggaggtagaggttgcagtgagccaagattgtgccactgtactccagcccgggtgacagagcgagactccgtctcaaaacaataaataagaaataaattgaggccgggcacggtggcccatgcttgtaatcccagcactttaggaggccgaggtgggcagatcacctgaggtcaggagttcgagaccagcctggccaacatggtgaaatcctgtctctaccaaaaatacaaaaagtagacaggtgtggtggcacgtgcctgtaatcccagctactcaggaggctgaggcaggagaatcattagaatccaggaggcggagactgcagtgagccaagatgtgttgcactgtagcctgggtgacggatggagtgagattctgtctcaaaaaaaaaaaaaaattggaagccagtctcccaggagaggtgtagacatgctttggtttctctctgatatgtatttattattgatcttcagtaaatttgactctgatctgttaacatggggctaatgatacctgcattgcagggttgctttaaaaggattaataatttgtaaaatgtgtagcccagaccccgccgtccactaagagctcagtaggtgtcactattatcattgatgccacttagcaaatatgagctctttaaatcattatgacaactttgaggggaagatgcccttagtccattgtacagatgaagaaactgaggcttagtgaggagaatggatggcccctgggtcccatctcccgtcgctagagaactggggagcaagaattggagttctggccgggcatggtggctcacacctgtaatcccagtactttgggaggtcgaggcaggaggatcacctgagcccaggagttcaagaccagcctggacaacatggcgaaacgccacatctacaaaaagttttaaaaattagccgggtgtggtagcacgtgcctgtggtccctgttgcttgggaggctgaagtgagaggatcatttgagcccaggaggttgaggctacagtgagctgtcattgcaccactgctctctagcctgggcagcggtgtgagaccctgtctcaaaaaatagtaagaaaaaagaattggagtccttgtccatcgtaatgcctgcatagtagtcagggaagaagaagagcaccacagtgggccctgggcactcacttctgctctgggcctcgcaggcagctgagcctgaggtggaggtggaggtgtaccggcgggactccaagaagctgccaggcctgggagaccctgacatcgactgggaggagagcgtctgcctgaatctcatcctgcagaaggtatggggtgggatgggtggggctgcggattggccctgtgggatggctgacccctccctgcacgctgacccgtgctctcttccagctggactacatggtgacctgtgcggtgtgcacacgtgctgacggcggggacattcaca

SEQ ID NO: 28722 - DNA, 2300 bp, Homo sapien
caagatctagaacctttcagggcaaccaccctcctgctttaagtcactacgattccgccttttccgaaacatcgtgtgaatgtgatcatacagtaaatagctttttgcgcctgacttcttttgctctgcaggacaagtttgaggtttatccacagtgtagtgtggatcactagtttgtttttattgtgacatgtgtgcattctcctggtttccagtttgtggccgttacgaataaagatgctgtgaacatttgtgtaccagtctctgtggacatgtgcttcatttctcttgggcaggtacctaggagtggctagtggctggttttgtaagtatatgtataactctgtgagaatctggcagttttcttaagggctgttttgtttgtttgtttgtttgttgagacagagtctcgttctgttgcccaggctggagtgcagtggcacgatcttggttcactgcaacctctgcctcccgggctcaagtgattctcctgccttagcctctagagtagctgggactacaggcgcctgccaccatgcctggcttatttatttatttatttccgagatggagtcttgctctgtcacccaggctggagtgcaatggtgcgatctcggctcactgcaacctcttgcctcccaggttcaagtgatcttcccacctcagcctctcgagtagctgggattacaggcacccgccaccatgcctggctaatttttgtgtttttactagatacagggtttcaccatattggccaggctggtcttgaactcctgacctcaggtgatccacccaccccagcctcccaaagtactgggatgacaggcatgagccaccacacccagccaagggctggtttttaaagaccaaatttattctgttattccgttgggctctaagagggaaccaaaagtgaagcaatgtaaagaggaagtaaaaaagaattgaagtttatccaggaataatcacagcgctttgcttaattttgcaagggtctgtagtagcgtgacttgggctttgcctgttgcaaaaacgcggcaggaatttcaaagcgactctgcagacagcacgcgtgtttcgttcccccgggtcctgtgagcctgggaggtcttgccagtcccgtgggctctcctggccctcacccctggaggctgacaaggctcgctgacccagaccctcaccgatgaagcctccttctcttttcctccctctcactgccctagagcccaggagccaggcagggcatgggagtgggtgagcaacacactgttgggcagagggctgagggcagagggcagagggctgagggctgagggccgagggctggggctggctgtgagtcctggttctttggttagtgttgtggctgacgtcaaccaaggctggggtgttctgcatttgactcagctagtggccgagtcctggtcagcccactggcctgcctgtgagcgcgagagagggttctggcaccactggccctcacgttccccatctctaagtgtcgggattagtgccttccagcccgagtaccagcactagattgcactggtcagtgaggaagacagaaaacaaaagcagacccggtttaatctactgagttgataagagagagcttggctgcatattttgaagtgttgaatctgtctagagaggggacagacccacctatgttgatcctgctgtgtgcccgtggtctcggtttgtctgcatgtgccccgaggaacctgtggctcagagcccccgcccattgtcccatcaccagcggcagcgctggaatggaaacccagatcttccctaccaaagcctgtgggctttttctcttttgcaggaaaatattacaaatatttatcataaagaaataccatttgtaatagaaggagaagtccctgtgaggatcagatgagcacgaagctgcgcagacgtggggcaggggtggggcgggtgctgtctccctgcggttcccgcttgcagccttggctggctggagggcggctgtccctttaagtcgggttcccgctgggactgccgcagccagggggagtgggtgggggtgagagatgttggtgagagccctgcctctccaaaggctcccccccagccaagccttcccggcttccagcccagacaccagccagccagtggcgttcctggctcctcgggattttccttttcctccgaagctgctgattcatccccaggctggagtcaggctcagctgtggggctgggagcatgggctctcaggctgctgctgagtggaggaactgggcctcctgggaggtgtcctccagcctctctgga

SEQ ID NO: 28723 - DNA, 2300 bp, Homo sapien
gggggtggagagggatcttttgggtgagtggtgatggcgggggtggagagggatctctcaggtgagtggttggggggtggagagggatctttcgggtgagtggttggggggatggggagggatctttcgggtgagtggtggttggggggtgaagagggatctttcgggtgagtggtgatggcgggggtggagagggatctctcaggtgagtgtttggtggttgggggggatggggagggatctttcgggtgagtggtggtaggggggtggagagggatctttcgggtgagtgtttggtggttgggggggtggagagggatctttccggtgaagaggtgatcatttgttggggaactggcccttgagcgaggtattgcccacacagggccctgcctgagcagaggcggcaggaaaagggcaatgaaggttcacactgtaatttgctgagccgcttctgggaagtcactgtaggcctctgggctctgttcccctttgcagagtagtactgcttgctgctctatctctgcctgaggaaggagcgagggtcagacctagagcctcagagcgtgtcatggaggctgctgtgacaggtggcagcgctgtgcctcagtttccttttatgaattagggagaagaaggttggcctggtcactgctcacagccaaggttctgggacacatttcactggtccacactcttaaccacttgaaaccaagccacttgtaaaaagcactgtgggtaggcaggaccagctgctcagggaggttgatgctgtgtgtgctggggatcggggacatcagaagtgaaggaagcaagacaagcgagaagaatcacaccccactctggccccacaaaatagaaatcgaaccctctcatcccacaaccctgtgaactgtgacttcacactttgggtcctagatttcctgccccaaacccccagctctatctgcaggtccctcctgccagcccacggattgtctgcattggccggtgctgacctgggccatccctgagaccatgcctaccaggggtgtaggggtctaggattccaggtttctcctgatccagggaggagggagctgcccccgcacacagtgggagctcgttagctgctgctcagctcccgggagccctctccctgcagcaaaccccgatggatccgccccagccggagctgcttctgctttagggtacagggatgaggtcatctctatcagaggctgcgacaagaagaaggctctgcgtccaggatccttccctgaagttcagtggggcccgttctctcccggggacagttggagccagaaccactgcagtcccctttacggaggggacttcatttcctccagtattgtattggcagcgtttcattccagtgacagcccggtgacgtgaggggtgttgtccctgttggcagagggagacagtgggacttaggctaaggcacttgtgcagggtcccatagcagcaggggatgttggacctaattgtcctggattcgaggctggcgcttcccttctcatgctcaaacatatccctttctccagagaaggatgttcgatgccctttttttcctgggtgggcctgtcctggcatagtgtacgaggcagagcccagccccctggttttcacaatgcagtgggtctcagaagtcagagtagaggagggctaggaatgagggttggtgtgggagtgggcatttccaaggacgttgcctgcggagagcatgagatcgagcaggggactgagacccctgggaaggcagagccgcagaagggcccagaaggtgctttgcatccttgtcctgtgtggtgtgtcgttgccttgcacctagtacatgtgggcctgcacactgagcacctgccgtgggccgggtgctgggcacaagggtgggtggcattggcggatgggtccagctgtgtgcctggctcctggctcagggcccgggcagggagtggaggagtgagggagcagctgaagcacatggcctgagttcctctgccagggtttggcatctctgcagatatcgtgagctgggggcgtgggtgggcctcaaggttcaagggttctgtgacttcctcgtgccatagagcatgctggcatggaggcgggaggaggtggaatgatgactgggcagtggctgggtggcctcaagcccaggcagtggaggaaagggcggggaagctggcagtgctggctcttggctgagatggggcacctttgcgtgagtgtcaggagaagcttgagaaattactcaggaagtggtcggtcggtcggtcagctggtcatgtaggaggcca

SEQ ID NO: 28724 - DNA, 2300 bp, Homo sapien
gccaagcgtaaccaggcaatgtgggtcccaaaggcaactacagttgcggagcagaaaggatttcaggccaagggaacactgtgggcaaacgcatggcagtgggaacaggcagggggtgctgtggggtttggggaggcaaagagggatgtgactattggacttgacagccttggagcactcgctcatgctgtctgatccaccatccccagttctcacgtccaccagcccaaaccccagctctccagacgcagaaccagaggcctcagccctcatgccagtgtcctcactttacagacagggatgcaggcccactggagaagagaaatacacgtgaggctggtcgcgcacttccttcattccctcactgctcacctttctacagagccctcctgggcctggcactggggacacagaggggtcagatgtggctctgctctgaagagttcaggggccagtggcacaaaactggggcagaggcctgaagcaggatccagatcccatctcccttctggggctctgcccaaccccacggctccttcctgctgtgcctcccaggaagacccctgcgtccccatcagacctctccatcattcttcgtttatgcagcctacatttttttttcttttcttttctttttttttggggggggacagggtcttgctctgtctcccagcttggagtgcagtggcgggatctcggctcactgcagcctccgcctcccaggttcaagcaattctcctgcctcagcctccagagtagctgggattacaaatgtgtgctaccatgcccggctaatttttgtatttttagtagagatggggtttcaccattttagccaggctgttctggaactcctaacctcaggcaatccacctacctcggcctcccaaagtgttgggattacaggcatgagccactgtgcccagcctgcagcccatatctatttattgggcatctaatgtgtgccaggcaatgttctgggtactgagacaacagctgtgtagtagacaggcccctccctcggtagagaagagaacaagtgaacccataggtatccaatgtgtcgggaggaggtaagtgtcaccctgtgaaggagaaacagactaagggaagagagagggagggaaggcggtcaggggagtttctttgaggatgtgacactcgggacacaaaggaagcaagttacacaggaatggggagaagaggactccagacaggggaaagggggaccttgatgggtctggggtccacacacaggctgtgaatgcagggagtgatgtagatttagctttggagagacctggaaatcaatgctggtctctccatctccccctgttcttggaaatggaccaccaggcgtgaggtttggggaggccactggctgcttctccggtgtcttcctgtatcagccacaactagcacacggagggatgctggccagacctggcttcatcaggatgacacgcccagctaacctcatacctcccccttcatcaacactcccccatgttggggaggcaaggcagggaaaggtcccccatggtgcagctgaggaaatggaggcgcaacactctgcactgtgccaggtgcagaggaggggggccggaagggctttgccacggtgtcccccaggagaccaccttctgggagcaggtgacctcttgaggggttctgcggaggaagttcccagaagtcagccgaggggacttggtggaggtggcaacgcacagggcgggtgacaaagtacacatcccgtggggtagcagcgggggaggggagaggtgccctgaaggggcggcgggaggggctcagaggcgtgatcccgttggtggggcgtttaggaccttgggtggaggcgggaccccgcgagcggtttgagggaggctgtcctgggcatccgaagattggcggagactggccgtttggaagtgggcggggcaagggaggtcagggggcggggccagggagccggggtgggtccgggccgttcagaggcggggcgggaggggacaggggcggggccggggcggggaaggggcggggccggaccggggccgggccgggccggggcggggcgagcggagccgggggcgcgcgggcggcggcggcgcggaggtgcgctcgccggtgctgtgtttggcgggtggtggcggcggcggcggcgacggcgacgcgcacagaggcggactgtggcttccttggtgctcgcggcgggctgcgggccgggccgcccgccctccccgccgccgccgcccccgagcctgcgggcggcgccgaggccgaggagcgctcgctgcagc

SEQ ID NO: 28725 - DNA, 2300 bp, Homo sapien
gattcaagttaaaccttttgggcgggacatggatgtccaagtagctgggactacaggcgcctgccaccacgcctggctagttttttgggtttttttgtatatttagtagagaaggggtttcactgtgttggccaggctggtctcaaactcctgacctcatgatctgcccacctcggcctctcaaagtgctgggattacaagcgtgagccaccgcatccagctggggaaagatttttagggatcaagggccgggcgcggtggctcacgcctgtaatcccagcactttgggaggctgaggtgcgtggatcacaaggtcaggagattgagaccatcctggctaacacagcgaaaccccgtctctactaaaacaatacaaaatatcagccaggcatggtggcaggtgcctgtagtcccagctactcgggaggctgaggcagaagaatggcgtgaacgtgggaagtggagcttgcagtgagccgagatcacgccactgcactccagcctgggtgacagagcaagactccgtcccccccaaaaaaaaaaagaaaaaaaagatttttagggaacaagacatacattaatccagagataccaactttaccaaatgatgaaatggaacatccccaataatgggacacactgacctcatgtgcttccttcctccattccaaatctccctcatcctacagtgagaatctgggttctggtaccaccaatcctaggataacccaaagttgcttcggaatggctccgccctccccactgccaataacaaagtcactagtgaggtttggggttctgtcacaggcctcccagttcttagagtgtactccactaaggaggtacccctggacaacccagctctataattactcagatcgttttattctttttctgcaagtgaggttatgtcatcaacgtcatacagagattaattagtttctgttgattttctttatcttttttctaagagacagggtctggctctgttattgcagctttaatcatagctcaaagtggcatgatcatagttcactgtagcctcgacctcctgggctcaagcaatcctgggactacaggcatgccccactaggctgagctaatttttttttttttttttttggtagagatggggtctcactatgatgcccaggatggtctctagctcctggcctcaagggatcctcctatcttgacctcccaaagtgttgggattacaggcatgagcctccttgcccctcttctgttgtttttttcctatccttgttgacttacttttatttcttaaatgtaaaattgatttaaggtgcatccagagatgtgcacagattcttgtgatggagggaaccgcacagtcatggtgaggagtccatcataattttcaaacgcccctttaagaagtaggcattaacaccctgctccatccctttggaggcagccctgggctgagcactggactcctgggttccaccaacctcagtgtctccaggagaccaagcgcggccgggggtgagtccctgtccccgcgccccccaccacgctccaatacttaccccctgccccaccccccagcctcccgggccttggcttgtacctgtgaaccgaaggggtcatactaggcgtcatactagggtctctggatagctcccaggcctggacttcgttttccaggatatcacctttactggtcaacccattttgtttcgcgagtgcccagtgagtgtttggcacgtaatagagcctccataaatagttgtagaaattagcgtcattttacagtatggaaactgaggctccaagtgggagtggcttgccctcaaggtcccattggtgagagacgctgtggaagggctgccctggcctgggcacacagtaggcgctttgatgcgggctggagaaggtcctgcccggtgggattgcgccctggggcaccgcgcacgggtcggggaagcccggggcagggccgtatgcaaatagcgcgcgaggaggccgcggattggccagcccaggcgggggcggggcgcgccgagggcccagagctggcaggtgccctggcagggacaggtctggtgcccgcgcctgctcgctggaccgcccgccccgcgctctggcggctcctcccgggcgatgcctccgctctgggccctgctggccctcggctgcctgcggttcggctcgggtaggcggtgaagggcaggagggggctgagcccagaaagagcgggcagctctgccctggggcgcccgccgcctggaccctgattcctggcgctggggacccagatattactgttatgaata

SEQ ID NO: 28726 - DNA, 2300 bp, Homo sapien
gtgcagggcatatatgtgttatgatgtgggtttgtccagagaataaagcaacaacttcctctccaggatgggaggactgttatgtggtctctggtgtcctttctgtccattctttagagcatcccaccagggaccctgcctgtgaatctgttggctctctcttttctgacagtgcaaaacaaagctccttctgcagccagacagaccctggcagcaattccaagcagatgcccacttaccagctcggactagttgctctaacgcctctgagcctgttttttggtctgttaaaggagattaataacacctaccacgcagggtggcagcgacagtgaggaaaggtatgcctatgaagagcttagaatagcgcctgacacacagtaggtgctcaattcacagtagtgtatatgcccacacacaggtatgtacattccaaatgcaccaacgcccctcaagataccctcaatacacaaatagattgagtctgggctggatgcggtggctcatgcctgtaatcccagcactttgggaggctgaggtgggaggatcacttgagcccaggagttcaagaccagcctggactggtggagacatggtgagactctgtctccatgaaaaataattaaaaatttaaaaaatatattttaatttgaaaacttttaaaaaggaaagatatggactaggtctggtcgctgggctcctgacgacaaggcttgctgtgcacatacatcttcattagtgtgagctgtgctcacgtcggctgcgtggaggctgggacagacacggacaccccacagtgcccagtgatgtgtcacacccacacatcagcaccacgctgacctcttgccaacctgccatatctgcccccttatctactcagaatggtcaaggtgcccagggggcagtgtctctcagtaattttccacaacctgagaaaaagctgtgtttctctcagatgtggggaaaaggggagcccttgttcctgaggcatccttcctgctgtccttgctcttgtaaggctgactggctgagtttttgggtggaggggctgaggctcccagcctatctcagatggtgctgaatgtggctggaggttacgattgctttggtcccaccacccctcagaggatgccctgcgcagagtcttgggtctgactgacctcggcagcacccagcccataaggtcctgttaatcaaaatccttgctggggcctgggagctccatgagggaaggggccacatctcccacaggtctcgggcttcagcacccagtacaggagcaggtgttcatgaactgaattatatatcttttgcattaaaaaaaattttttttgagacagagtctcgctctgttgcccgggctggagtgaagtggcatgatctcagctcactgctgcctctgccacccgggttcaagtgattctcctgcctcagcctcccgagtagctgggattacaggtgtccgccaccacgcccggctaatttttgtattttcagtagagatgaggttttgccaggttgcccaggctggtctggaactgctgacttcaggtgatccacctgcctcagcctcccaaagtgctgagattacaggcgtgagccaccggcctttttttgcatttaagtcgcacctccaggggttggggagctgtatgcagtggtggttacatgtgtgggctgaggcatggaactacacaacctcttgggcctgagcttccccttgttaaactggaataacaatgaagacgccttcctcatagggttgttccaagaacaccatgaaggaacgcatgcaaagtgctcagggagtgcctgaccccacatacagagcacccaggggctgccctcttcatcccagagtcactgctcccactgttttctgggctctggccccccctaaaatttcacaggccgctaacacaacactaccttctgtcacaaaatgagagctttctggtgggctagggtagggggagatattaacagccaactttaaaatcaggcaggaaaaaaaggtgccaaggagacaggaagtaataaatgactccaggttgggcagggcaggctgggaagaggaagtggattgggtcttgtttaggtaaaagacttcagtggcagacaaaggaggagtaataagatcgctagggggcccgtgcccagcccacccacgcacaatctcagtcctcgcaatacccacaaggtaggtgctaggatcacaccctttacggacgcggcacctgcgacagggatgcgcgaggagtcagggggcctcgccggatcgaacctaagctggggaagag

SEQ ID NO: 28727 - DNA, 2300 bp, Homo sapien
cagatgtggggaaaaggggagcccttgttcctgaggcatccttcctgctgtccttgctcttgtaaggctgactggctgagtttttgggtggaggggctgaggctcccagcctatctcagatggtgctgaatgtggctggaggttacgattgctttggtcccaccacccctcagaggatgccctgcgcagagtcttgggtctgactgacctcggcagcacccagcccataaggtcctgttaatcaaaatccttgctggggcctgggagctccatgagggaaggggccacatctcccacaggtctcgggcttcagcacccagtacaggagcaggtgttcatgaactgaattatatatcttttgcattaaaaaaaattttttttgagacagagtctcgctctgttgcccgggctggagtgaagtggcatgatctcagctcactgctgcctctgccacccgggttcaagtgattctcctgcctcagcctcccgagtagctgggattacaggtgtccgccaccacgcccggctaatttttgtattttcagtagagatgaggttttgccaggttgcccaggctggtctggaactgctgacttcaggtgatccacctgcctcagcctcccaaagtgctgagattacaggcgtgagccaccggcctttttttgcatttaagtcgcacctccaggggttggggagctgtatgcagtggtggttacatgtgtgggctgaggcatggaactacacaacctcttgggcctgagcttccccttgttaaactggaataacaatgaagacgccttcctcatagggttgttccaagaacaccatgaaggaacgcatgcaaagtgctcagggagtgcctgaccccacatacagagcacccaggggctgccctcttcatcccagagtcactgctcccactgttttctgggctctggccccccctaaaatttcacaggccgctaacacaacactaccttctgtcacaaaatgagagctttctggtgggctagggtagggggagatattaacagccaactttaaaatcaggcaggaaaaaaaggtgccaaggagacaggaagtaataaatgactccaggttgggcagggcaggctgggaagaggaagtggattgggtcttgtttaggtaaaagacttcagtggcagacaaaggaggagtaataagatcgctagggggcccgtgcccagcccacccacgcacaatctcagtcctcgcaatacccacaaggtaggtgctaggatcacaccctttacggacgcggcacctgcgacagggatgcgcgaggagtcagggggcctcgccggatcgaacctaagctggggaagagtatttcttgtatttttaggagaaattctcagcctcggggaagagtatttcttgatgagggaagagcgcggggaagacactcacgcacgcacaaacatgtgggcggccatggtgtgcccagcgccgtgctggcttctgggaacccccagtggacaagacggacaaggtaccggctctcaggggaagtgggagccagtcacaagcgtacctaatttcggagagtgacaagtactctgaaaaagaaagaaggtagggctggtgactggccaatttaagcgggcaggagtctgctgggggacggagaccagcctcaggtctgggttggggacagaagctgtgcctaagtgtggtgcaggatgcagttgcaaaggagcgcttccgatcgcacttgatgctcgccacgtccctgcaaagtgctcccgccccctttctgcaaatgaggaaacgggacgcgcggctcgccgggccaggtagggctaggacgcggactctaggcccaagcgctccccagcgcaagccctcccccgcacatccgaccgcgcctgcgctggagaccccgggggcgtggcctccccggtgggcgggaccgtggtcaccgaggtgggcggtgccagaggatctggcggcggggcggggcggggcgcgcgtcctggcttcgcccttccccggggcggggcctccggggaccgcggggccgttggtttcgggacggaacgttcacgcggctggggcgggcgcgcgggggaagggtttgcggcggcgccgctgccggctaacgcggaggggcgcctggaggcggcgtggcgtccgctctggctccgactccggctctcgctctcgcttctagcccgcgtgcctgcgcagtcccctccccgagaaccatccccttgccccgcccagcgtcaggggtgcgcggccgccgagagaccccggaggcgtagccggctgcggag

SEQ ID NO: 28728 - DNA, 2300 bp, Homo sapien
tccaagttgtccttgttcattcctgggcctaggccaaactaactttgggaggaagttaggttatagtttagctttgaaacaaagacagtaacagccctttcccaaaacaaaccttactgcctgtggactagactgcctaaagcctcaaattagaagttatggtaatcttactaaattcaagatatagctatttacaggtaccttacaggttaatgaaacaacaggaattccagaaatagagcccagtatgcttaacaattaatgttcaaccaagatgatgttttagttcagtgagaaaaggatagattatttaataaatggtattggcacatctggagaaagtaattttgtgccccatcttattgtaaaccgaaggtatcttgagacaggtctcaatcaatttagaaatttattttgccaaggttaaggacatgcctgtgacaccacctcaacaggtcctgagaacgtgtgccccaggtcaccaggctgcagcttggttgtatatgttttaggagacttaagacatcaatcaatacatgtcagatgtaccttggttaagtccagaaaggcagaagaactgggagctgggggttggagaaagcacttccaagttataggtagattcagagtttctgcttggcagttggttgaaagagtttatctgaagacctggagtcagccgggtgcggtggctcacgcctgtaatcccagcactgtgggaggctgaggtgggtggatcacaagatcaggagatcgagatgatcctggctaacacgatgaaacccccgtctctactaataatacaaaaaattagctgggcctgctggcgggtgcctgtagtcccagctactcaggaggctgaggcaggagaatggcgtgaacctgggaggcggagcttgcagtgagccaagattgtgccactgcactccagtctgggcgacagagcaagactctgtctcaaaaaaaaaaaaaagacctggagtcaatgggagggagtgtctgagggagttaatttggttgagtaataaggtgagtgaaagaagaagggagtgagagaggcaagccaaaacagaaagatgcactaaaaacaaggcaattacatgatcctatttatgtcattaatgtgcgttggatggaatatacacacccctcttcattttccattcccaattctttcctattaagcactgttagtttttttgaggaagctgtatggcattttggttactccagatcactaatgtacttaattgcccagtctcttatcagaggaaagggaggtaaggtgcaggtgtggtggtatgtaaaaatcagtgaattattacatatgaaagcactttgaaaagtgaaagtgcttttctatcataaaatattctcatgtttttctttccttttagggtttaatgaagacactccgcaaagaaacagatttgaaacaaatacagaccctgatacagggaactcaaacacgactcaaatattcacaaaatgaactagagatgattaagaagaagcaccttgttgctttttaccaggtaatatagacttacataaaatatgataggcatttgacccagaacatagaatttcaggaattacatttatatagctccatgtaattttcagatacttttttttttttcctgagacagagtctctcactctgtcacccaggctggagtgcagtggctttatttctgttcgctgcaacctccatctcccaggttcaagtgatcctcctgcctcagcctcccgagtagctgggattacaggcatgtaatttttgtatttttttagtagacatgcggtttcaccatgttggccaggctggtctcagactcctgacttcaggtgatatgcccaccttggcttcacaaagattacagccaccatgcctggccaatttttagatactttatcccatgattgagattatattatagtcccttaattatttatgtggtatttaaccttttatccaggtgaattcatcttatctcatagattcttcttttattccaaaagatacctatcacatttttggcttcactatataaagctaaaacagccatgttaaaaaaatttttctcttttgttattaggaacaatctcagttacaaagtgaactactaaatattgagtctcaatgtattatgttgagtgaaggaatcaaggaacgacaacgaagaattaaagaatttcaagaaaagatagataaggtcatgaatgttatatttattcctaaatggtatatgtagttctagaccagatactagatttagggcttcttaaatatatgc

SEQ ID NO: 28729 - DNA, 2300 bp, Homo sapien
tatttatttttgagatgcagtcttgttctgttgttgcccaggctggagtgcagtggcgtgatgtcagctcactgcagcctctgcctcccaggttcaagcgattctcctgcctcagtcccctgagtagctgggactacaggcgtgcgccaccacgccaggcttttttgtatttttagtacagatggggtttcatcatgttggccaggctggtcttgaacccctacctccagtgatctgcctgcctcagcctcccaaagtgatggaattacaggtgtgggccaccatgtcaggccttatttttttgttgagacagagtcttgctctgtcgcccaggctggaatgcagtggcacagtcttggctcactgcaacctccgcctcccgggttcaagtgattctcctgcctcagtctcccaagtagctggtattacaggcacgtgacaccacccccagctaatttttgtatttttagtacagacaggggtttcactatgttggccaggctggtttctaactcctgacctaaggtgatccgcccgcctcggcctcccaaagtgctgggattataggcatgagccacggcgcccggccaattttattttatatttatcttattttattttattttagagtcgaagtctcgctcttgttacccaggctggagtgcggtggtgctatcttggctcactgcaacctctgcctcccgggttcaagcgattctcctgcctcagcctcctcagtagccgggattacaggtgcatgtcaccacacccgattaatttttgtatttttagtagagacagggcttcaccatgttggtcaggctggtctcgaactcctgatctcatgatccacccgcctcggcctcctaaagtgctggaattacaggtgtgagccaccgcgcccagccttttttttttttttttttttttttttgagacgagagtcgcactgtgttgccaggctggagtgcaatggcgtgtccttggctcactgcaacttccacctcccaggttcaagcgattctcccgcctcagcctccagagtagttgggattacaggcgtgtgccaccacacccagctaattttggtattattagtagagacctccgcaggtcctctggcctctccagacctcagtttccccaactataaaatggggagagcagccatgcgccatggctaaccaaagacggtgtcgccaggaacttaggaaaagctcagtaaactgggtcatcatcactacattcctgggtcaaagctcccttggatccaaatggtggttctggctgcttggaacccattacctcctcgacagctccctctcacttcaacttcggatgagaagggaaaagggacgcgagtgaccagggccaagggccagagcagtccccgaagcaggagtgagggcagagaacagggcccatggcgggaccggggcggagaggaagcgtcaggacccccagggtggggggcgagggttgggagcccctgagatgaagggcgagggccggagctgaggtggggtggggtccctcagggtgtcggaggagggtcgggagccaggaggtggagggcgagagcggggcccgaggcggggccgagtggaagggtcaggacctccgaggtggggcggagggacaagggtcgggacccctgaggtggacggcgaggaccggggctgaggtggggtgatgggcaggggctgggccagggccaggccgggatccggtcgcggtcaggctccgggactggaaggggaaggccggccaggcgcccgcggcagacgcccacaccccacaggccacgtgtggcctggacgcctgggacggcggaggcgctccggtggcgccctgagctgctcagttaccagagccgttggggccgatgatgcaggtgaacctccggaaggggccaatgacctggcggccccgccacgacttgaaattttccacaagcagcagctccaggtgggccatggcgccgccctccacgcctcacccgcgttatcaagcgcccgcggaaaaagcgcgggaagggattcgccaagtgtcgcgagaagagagcgagacgcggcaagcgcggagccgttccttagcaacgagttgttgacatttccgagagagcgggagcgtctgtacctctgcggcgtcactgggagcccgacggaaaactgcgctaaaggcttgtctttcccctgcccgaccgaaggagccgaccttgcctgcgctacagcttccttattttcgtcgcctgttctcctgatcctgcgtgttctaaaaaccccttaggctttccatgg

SEQ ID NO: 28730 - DNA, 2300 bp, Homo sapien
ctcaaaagaaaatagaaaaaaaagcatgggaatgataaacacttctgaggagaaaggaggggaaaattaagaggtagggggcagggcagtgttgttatatatatatatatatatatacacatatataaaaaacacaattctcaaaaaacactgaagatatctgaagccaatctggcaaaatgttaacatctagtctgatggtgggtacatatgtacctgtcacattgtttttgtaagattgaattacctcataactaaaaatattaataaaaaagataaaatgtttagaacatacagaacagtataaaggagaaaataaagtttactcataattctatccctccaacattaccctgctaacattttggcatatttcctctcttcttcttctgagcatattttaaaatattttaaaaacataacagcccattgtatgtacaattttgtatcctgcttttttttctattataaaaatctttatggtgtttaaaaacactgaaatttcttttttttttttttttcaatttattttttgtagagatggggtctcgctttgttgcccaggcaagtctggagctcctggtctcaagtgatcctctagttttagcctctcaaagtgtgaaatttcaacaattgttgaaattgttggacacgataggggaaaataagttgtatttgaagtggaataataataccttgaataacagtattcaaggtacttgaatactatgatttgaatcatgtctgtctctgagtcagcttgagggtgtgagcccggacatatgtgttgtctggtataaacagctgtccttcatagacggtcttaaacttttgagcagagcaagtgagtgtgtgtgtgtgtctttctgtgtttaaggcttttcctatccagttttttaagaaaatgaaggaaaacatacatatacccttaaaatctatttcttataatccacattcgaattcaatagctgtttttaagagaagaatcagtgcattaagttaactgggcacaagaaattgtgaaatttaaaaggaagaagagtgtgaaaatgacaactttttatatatgtgaagaaaggagggctgggtaccgtggctcatgcctgtagttccagcactttgggagactgacgtgggaggatcacttgcacgcaggagttccagaccagcctgggcaacatagtgagaccctatctctattaaataaaaaaaataaaaaataaaaaaaaaaaggcggggcagggggacggtggggaagactggagtctaaagccacacaatcctaaaccaatagataagcattcaggaaatgctcaccaaagtttcatgtctagctttttcagtagcttcttttatcttctggtcatgaacttgaacatcccaggcttcagtgtctccctataaatggaaaaacagaggagaagggttagagccagatcattttattcagtaataacaatcctacttattattatttttaatctctgccccactgtaaacgagttgtagaaaatctggctcaggggaggagaaccgttggtgactccaggcgagctcgagagggagcattattggccctgcaggaggccgtttgctgcctcctggctcagatgtttcatcctagaactcatctcctttccccctccacgcagcccctcgcccgcatctgccgctctaaccccgtcccggcccctgccctttcaccccaattatcctgtttctggcgttgaagacccgcttctgcctgcacagctccgcgtgcctcctctttgccaggttggcgtcctgccgcaagtccctgggcagcgccaccgccatggtctgggaacccatggaaagcctaaggggtttttagaacacgcaggatcaggagaacaggcgacgaaaataaggaagctgtagcgcaggcaaggtcggctccttcggtcgggcaggggaaagacaagcctttagcgcagttttccgtcgggctcccagtgacgccgcagaggtacagacgctcccgctctctcggaaatgtcaacaactcgttgctaaggaacggctccgcgcttgccgcgtctcgctctcttctcgcgacacttggcgaatcccttcccgcgctttttccgcgggcgcttgataacgcgggtgaggcgtggagggcggcgccatggcccacctggagctgctgcttgtggaaaatttcaagtcgtggcggggccgccaggtcattggccccttccggaggttcacctgcatcatcggccccaacggctctggtaactgagcagctcagggcgccaccggagcgcctccgc

SEQ ID NO: 28731 - DNA, 2300 bp, Homo sapien
tgcagagacatcaggaaagctggcaccaccaaggaaacccttcccacctctgctcacctttcactggccagtcgcatgtcacctcttcctgaggggcctccttaacctcagaggcgtgagcatgctggtccccttggtaagctttcctgggctctctgcaaacttcaaacttataagacaccctgtggggagatgagttcttgtccttttgtttttcattttaaaatttaacatgtgaccgggcacggtgactcacgcctgtaatctcagcactttgggaggacaaggcgggtggatcacctgatgtcgggagttcaagaccagcctgaccaacacggagaaaccccgtctctactaaaaatacaaaatttgccaggcgtggtggtgcatgcctgtagtcccagctactcaggaggctgaggcaggagaatcgcttgaacccgggaggtggaggttgcagtgggctgagattgcgccactgcactccagcctgggcaacaaaagcaaaacaccatctcaaaaaaacagaaagaaacaacatgtattcagaaaagggcacgtaccataaatgaacagctcaataaattctcacaaactgagcccaaccttgtaaccaatacccagagtaagaaagctgaacctaaccagcccccgaaagcccagcacgctcccactccaggatcaccactctcctgacctctgaactgttcttgcctttttttttttttttttttttttttgagacggagtctcactccgccgcccaggctggagtgcagtggtgagatctcggctcactgcaacctccgtctcccgggttcaggcgattctcctgcctcagcctcccgagtagctgggactacaggtgtgcaccaccatgcctggctaatttatttttatttttatttttagtagagacagggtttcaccatgttggccaggctggtttcgaactcctgacctcaggcaatccgcccacttcatcctcccaaagtgctgggattacaggtgtgagccaccgccaccggcctgttcttgccttttatgtaaatggaatcatgcagcgagtgttcctttgtggctgactctattactctgacttacgtctgtgagatttacccgttatgtgagttgcggatcattcactcctgttccgtttgtcgtgctcctaagcccgaatactccacgatattcatctgccttgatgacgctaggcttcccaattggaggaattatgaatgtgcggctacatgtctttctgtcttttggagcacatgttgtatgcgtttctgctgagtgtaaggctgggcggggcgtcggtggctcaaggggtccatggtgaactcacaggaacaccgctttgagctgcccagtggcgttcctatgcgtctcatccagttcctccgcatcttcacctgcaccattttattcttcttctttggaaaataaatctacttgtggttccaaagcctaactcatcctcagtaaccccggtagctatgaattcctatacaagaggctcccgcaggcccagcgccaaagctgcctcccctgcagcctcggtgacttcccgggtctctccctccggccctggtgtcccgggtgagcccagcacacgttgggattttggttgtttgttggcctggcccgactgtccctgtctctgagggcagagtcgggtcccatcccgggacacgcctggggttagccaccgacctgcagcctcccggccgagggtgcggggttggcggtaaggcctgccccagtgccccccagcagccgggcctccgactgcaggcccgggtccccgctcctccgcgcggagtcgggcggggataacctttgatcccgagccctcccctcgagagggggtggggggaggaggggatcgggtttcacggagtgttgggggataggactgggggcatccggcccgaaggcgccccctctgtgccccctccggggaagtctgggatccaggccctcgcccccagccgtgggcgcgcgcccctcgcagccggggtccggggagggagggtcccggcagggggcgccggggagggaggaccaggagacccgcggccccgcctccgccgcgccctcctcccgggcgggataattgaacggcgcggccctggcccagcgttggctgccgaggctcggccggagcgtggagcccgcgccgctgccccaggaccgcgcccgcgcctttgtccgccgccgcccaccgcccgtcgcccgccgcccatggagcgcgccgcgccgtcgcgccgggtcccgcttccgctgctgctgctcgg

SEQ ID NO: 28732 - DNA, 2300 bp, Homo sapien
ttgtgttgtggctgttccttaacgtccccactagccaggctctttgagggcagggattgtgtctggttaatttctgtattctctgcaactttgcaatgtttggcttgaagaaggagctcagtaaacatctgaataaacatgcaggttgatggatggatggacagaccaatggatggatggatggatggatggatagcatttttaaggcttagttcaaatatcgtctcctcagccaggtgtggtggctcacgcctgtaatcccagcactttgggaggccgaagcaggcagatcagctgaggtcgggagtttgagaccagcctggccaacatggagaaaccccgtctctaccaaaaatacaaaaattagctgggtatggtggcaggcacctgtaatcccagctactcaggaggctgaggcaggagagtcgcttgagcccaggaggcagagattgcagtgagctgagatcggagtatggcacaccagcctgggcaagaagagtgagactctgtctcaaaaaaataagtaaaaattgtctcctctgtttagccagcaagccacagcaggggttcttgtcctattcaggcatccatttgtcaggggcgggattactcaggctggaaggaacacctgtgccttcatgtgcatagcaatgtgaagaggtgggggaaacctctcaggggctttggaggctacccagtgaccttccacagcttgccagaagctcctctgcaacattcccaccaagggactcttctttgcttgtggaactccctgcctcctgaggggtcccgttgcattttgggatcccatcgacgtttgcgtgtgtgcctgagtgcactgtgggagtgacagctgagtgacctgagtgctcacccctgtcccgcagctccttggggctccttagccatgttctcggctcatgctgctgacagaggacaccatgcaggaaaagcaaaataagagcaggaggttgaatttccttcttgccatttactagttctgtgaccctggatacatcgtcagcctttcagagcctcaaggcccaccttatggttgattttgaagatggcctgaaatagtccagcaggcagcgcctgatacagagtaaacactccataggtgtgagtgtgggtttcttcattcattggaaggtaactgggtgttcgtgtggcttttcattgaaatggggatgaagattcagagagtttggagggatccaaggtcatatgtggagctgacatcacttttgattcagaacctgtgctttcctggttgtgtcactagtaaatcaagctcccaaggagaaaagacagcaataagggtgatttttattgtaatgataataataacaactccaacagctaacacatagagtgctgaccatgagacaggcgctgttccaagcatgtaattcgtttactcttcacagcagcctagggaagcaagcagtgctaatatccccattccacagtgaggacagggaggcacagaaaggtgaaggaacttgcccaaagttccacagctggtttccagtggcactgggattcagacgcaggcagcctgggctgggatctgtgctctgatcccctgtcctccactgcagcaaatacgggggagaggcagcatccctgggatgaatgagactgttgctccagccccatctcacagagcccgctctgccattcccaaactcaaaacaggatatcttattagctaaaggaggaggcagtgtggtaaggaggaaagggctatgaggctggaatgaaataagatatgcaaaatgggccaggtgcggtggctcatgcctgtaatcccagcactttgggaggccaaggcaggcagaccactgaaggtcgggagttcaagaccagcctggccaacatgatgaaaccccgtctttaccaaaaatacaacaattagctggtcgtggtggtacacacctgtaatctcagctgctcaggaggctgaggcaggagaactgcttgaacctggaatacagagattccagtgagccaagattgtgccaccacactccagcctgggcgatagagtgagactttgtctcagaaaaaagatatgcaaaacgtgtagcgtagagactggaaaggcagatgcattatttctgaagctctctagatcccaaccaaaaaacacccagacaactagataggaaaaaaaatgtttccatggaaaacatttacaaacgaaacaaggtatggttgtctgcagttcaggcccacctgcatgactttggcatctgtgcaggaaaaaacagtggcagaaccccaaaataatcaac

SEQ ID NO: 28733 - DNA, 2300 bp, Homo sapien
caaactccacctctcaggttcaagcgattctcctgcctcagcctcctgagtagctgggatcacaggcacccaccatctcgcctggctaatttttgtattttttttagtagagatggggtttcaccatgttggccaggttggtctccaactcctgacctcaggtgatccgcccgcctcggtttcccaaagtgctgggattacaggcgtgagccaccacgcccggccagctctctgcagacaccatctgggcgtcctacacttcagttcaattctgacgctggccacccagagttagcacaggcccgagaggatatgggctccgtcctgcaagaccgtccctacttcagatgtcagttgcaaagattgggcgctcaggttacccacacttccgtctgacttggctacacatcaggggtccccagaacgccctcctcgggtttggtaattggctaaaatggctcacagaactcagggaaacactttggttacatgtataggtttctaagaccttatacaaactgggcccattagtctttgctccctgatactatctgataccatctggtctcattccttcctgaatggaataattccttcctcattcattatcacaaggacaataatgtccttgtaaaggacattattgatgatacagatgaacaggaagacgaagaggcacacagggcgagctctggtggggcccgggcacaggagcttctgtccccgtggagttggggggcgccaccctcccagcatgcggatgtgtccaccagcccagaagctctctggatcctgtagttcagggatttttacggaggcttcattacttacgcgtgatggattattagctcaatctccagcccctctccctttcctggagggtgggggtggagccaaaagctccaggctcctcgtcgaatctgggtctttctggtgctcagcccccaaccccacccaggagccactgagagtcacctcattaaaccaaagacaagggattaggagctttgtgtcaggaacccggaaagagaccaaatagaagtgaatgtttcttattatgtcacacagccacaccacgaggttggtgcaggagcccttgaaggaagcccttggaggatctgagaccaagagggcctgatcagatcggagttttggaaatgtaacctggcagcctaggggaggactggacagagtggggaggacagaggggaactgattcaccagagggagggcgtgaagtgagtgaatgaatgagtgaaccaatgaatgaacaagatgggaaggaaggagtgagaccagatggtatcagatagtatcagggagcaaagactaacgggcccagtttgtatgaggtcttagaaaccagatcaaggaggtgggatcaacggtgctttcctctaaagaagcacatttccggccgggcgcggtggctcacgcctgtagacccagcactttgggaggccgaggcgggtggatcacctgaggtcaggagttcgagaccagcctggccaacacggtgaaaacccatctctactaaaaatacaaaaattagctgggcatggtggggggtgcctgtaatccacactacacaggaggctgaggcagagagaatggtttgaacccccgggaggcagagactgcagtgagctgagatcacgccactgcactccagcctgggcgacagagcgagaccctgtctcaaaaaaaaaaaaaaaaaaaagaagcagcagcagcagcaaatttccaggaagaagcaggctatggagatcagggcaggcaaaggacagaattaggttagtgcatcaactgggtccaaccaggaagacacatgtgtttatctcctgcagcaccaaaaaccacccagaagacagctcagtggaccctagcagtggattctacatgtctgcagaaaatgagcagaaaacaagccagagttacagctatctgcagagagactacatccaggaggtctgaagactgaaagtaatcactgcagtctgacttctaccactgacacccttcccatacataatttaaatgtgtaattataataccattgcttagttaacggacaccaattcgtgcaggagctgccacaaacagtaataaaccagctgtgttagaaatggatcacttatcagtgcgtgcccaagcctcctaatgcctcatgatgtttaataattaaattgtgacaccttgaacccgcagctgacaccatgaatcacagtggaattctccaaatggaatgcagccacacctcagcttctgtgctgcgtgctgccactgaggacattcgatac

SEQ ID NO: 28734 - DNA, 2300 bp, Homo sapien
gagttaaatgttgaaatattttttaaacgatctaaaacgtaaggaagcaagagcagaggccaaaagaccaatcaggaatatattacaatattccaggcaagaagtatgaatattatagggaatgtttttctgggaatgttacatttgagaataagaaaactaaaggccaggtttttttgtttgtttgtttgagacagagtctccctctgttgcccaggctggaatgcagtggtatgatctcagctcagtgcaacgtgtgccttccaggttcaagcaattcccttgtctcagcctcccaaatggctgggactacaggcacccgccaccatgcctggctaatttttagtagaaagggggttttgccatgttggccagactgatcttgaactcctgacctcaagtgatctgcccgcctcggcctcccaaagtgctgggattacaggcatgagccaccgtgtctggcctaaagatcaggattttggtgcataacaagtacattttactatcctgtgctcctcaagggaaaattaagagatttttgccctgttagcttaaggagtgttaaacattttgcattgtcttgagcactgctactaataagtgatctaatacctggcacatagtacaccgcaatattcgtggaatgaataaatacatactcaattaaatgggtaaactgaatgacaatatcaagtaacttgcttgtgcagcagcattcatttccctccctcctttttttttttttttttttttttttttgatacagggtatcattctgccacccaggctggagtgcagtggtgtgatcacagctcactgcagcctcgacctcctgggctcaagtaatcctcctgccttggccacccaaagtgctgggattacaggcatgagccaccatgccccaccaggattcactttttctgcatactctggtggtgtttattgttatctttacattttatttagcaaagaatgttaaaagcgccatgttataagcacactcctaccctccaagcagaatgtaaagggtatgtatttatatattttaagtggtcccacagcaatttgtacagttatagcagttcacaactatactcagttatgtttgcttctctccttctcaatagtctgtgaggttccttcaggtttggaactgtcttttattaatctttacatctccagcacctagcgcagggcttagcaacaatttttgttgaaagtatatacactgtaataaagggcagtggaaagaaaatatgtgagttatcaacaccagctagagaagccttgtctgattcctgtgaaatatattcatttcccttaggaaaaaaaacaattctaaccctattgctgtgtaacttagcttcttgacttcgaacggtattttaaggctttgaggagctggagcaatgtatactcactagaggcaaagtgcctggtaagtggtctggtattgatcagcaatgatcagtaagtactgggaagtgcgttttcagggcctgagacttgcaagctagtgacagaccgctccagcttccagtggacccgggcgggggcactgatcaacccacttgagcagtgggatcaaggtcttcagccttagcagtgggagcctctgcccggcccccttcgttcccgagaccctcagtcagcgtctcctcccaagagggtcccctccacccagaatgtcctcccctgggggagaccactctgtctgcgggccccctcccacaggagggcccctcttcctcaaggtgaacctctgtccccgatacccgctcccaagaccgagaccttgttacggccccaccctccacaggccccttaccccccggatcccctcccctgggggagacccctctgtccgcgggcaccctcctataggacgcgcccctctttctcagggtgaacctctggttcccgatacccgctcccaagaccgagaccctgttacggccacatcaacacaggtccccctccccccggcgtcccctcccctcggaggagccccgtctgcgacgcttcccagtcaatcacccccagcatccctccccgctctcacccagaacttccgccgcgccccctcccctcaggcgggacttccgccggcgccccctcccccgcggcgccgtctcctcctcccgcctgaggcgagtctgggctcagcctagagctctccggcggcggcgcagcttcagggcagcgcgggctgcagcggcggcggcggttagggctgtgtagggcgaggcctcccccttcctcctcgccatcctactcctccctcctcgtcatcctccccc

SEQ ID NO: 28735 - DNA, 2300 bp, Homo sapien
tcactgacttatttccctcaagaaaagggcgggcgggcagtaggtagaagaagggtccccagcacactaggggcccagggccatgggcatcagcttcggggagcccccggcggtccccccaactcccacatcttgccccctcactaaacaggcctgatctgttgttttgaagccaagcgctgtgctgaaacccactgttgcctgcgggtctgcctgaaaccagccgcccccctccttccagctcactgccccttccatgggtgcttaaagccagatgactggggcagccgctgtggagggcagtccggcaagtcctcagaaagcgaagggaccacctgacccagcaactcataggtccatgccccagagactgaaaacaggctcaaacagaaaccttacccgcacgttcatggcggcatcactcacagtagtccaaaggtggaagcagccgaaatgcccagccatgaatggatacacaaaatatggtctgtccacacaatggaatatcactcagccttacaaacgcatgaagcactgacctgtgaccacgtggatgacccttgaaaacacgacgctaagtgaaagaagccagacgccaaaggtcacacaatgaatggttccatccataggaaacatccagaatgggcaaatccatgggaacagaaagcagactggtggttgctgggtcggggaggggagaacggggagtgactgatgggtacagtttccttctggggtggcagaaatatctgggaacctgacggtgctggaggttgcacaacaccgaatgtattaaatgccacagaactgtacacttcaaaatggttcattttatgttatgggaatttcacctcattaaaaaaacacacaaggctgggtgcagtggctcacacctgtaatcccagcattttgggaggccgaggcgggcagatgacctgaggtcaggagttcgagaccagcctggccaacacagtgaaatcctgtctctactaaaaatacaaaaattagccgggtgtggtggtgggcaactgtagtacagctactcgggaggctaaggcaaaaggatggcttgaacccggaatgtggaggttgcagtgagctgagatcacaccactgcactccagcctgcgcgacagagtgagactccgaaactctgtctcaaaacaaacaaacaaatgaacaaatgacaatcccgctgatatcacttgaagtagagtgagcgtgacctgcgggttcttgtctagggcttcaggtcctgagagttgctaggagattaatgacaaagttcccctcagtggaccactgcaaggctgcagtgttgcaataaggcccctgccaagcccggcacacagtaggtgctcaatttgctgcaggcctaatttcttcctctgcgtgcacccagtcaccctgacaggagagaaaacagcaacagccaccattcccggtgcgggctttctccctgtggtcgtctgagcctttggttgggtggtgggggatgggtgttttatacccccatttcatgggtgtggaaactgaggctcagacggggagtgccttctcaaagttacacacaggtcggagctggagtcagtaccggatgggcttggctgccggccttttcagcagcctgcctggcccaggtgccatggaggggccatcggggaatttataaatgaggggaaagccccattggtcggggagttggggtctgccgcttagagacagcgcagacagtcccgagttggcggctgccacatcccaagcatgatgctgtctgatctgaagggctgtgtatctgactcagtggcctggagagctgtgggacttgcggttgcgtgattctccattctgaggctcagaggcctgggtgtgtgtggctggggtcacgcgtgtgagttggggtgaactggtgtggtctcctggggtcacgcatgtgagttgatgggaaacagccccttgagggcagggatctgcttgtgccctggtgggcggagctagtgcagggcctgtgactgagaggctgagtgggggaaaggtgttgggggtgaggaggggcgctggccgccgccgtctcacggcctctgtctcctcccctccacagagcactgtcatccgtggtggccctgggagccaacatcatctgcaacaagattcctggcctagccccgcggcagcgtgccatctgccagagtcggcccgatgccatcattgtgattggggagggggcgcagatgggcatcaacgagtgccagtaccagttccgcttcggacgctggaactgctctgccctcggcgagaag

SEQ ID NO: 28736 - DNA, 2300 bp, Homo sapien
agggtttggggatggggcaggtcaggttcctcattttagggagattttaactttaagtgggctcgagcaagtgttaattacctggacagttcatgcctgtggaggccgaccctccctgtggtgctgggtccatgagatacagactctcctgcctccctgctccccagatccccggggtctcctgctcaaatcttgggctggggccagggtcactaagaaatctgctttctttgaacactaaccagttcaggcgtacacaggagttgcagtctcggggtgggggcatgggttgggttcaaccccagagtgtttcctctgtcctgcaatgtgctcaaattttggacatttcatgtacaaatctggatttcttctgaagtcagaagctctaacagcctcagcccttatcctcatggcagcaacaggctagagccaactgggcactctgtcccctgccgtcactgcaaacaccctctgtgctccaactgacgcctgtaggctgccctgtgacagccctgccagagagtccagggacatggtggggtgacccactcagattctggctggccagccctctcggcttgggtgctcccctgaggaggactttgggagcgtaggcacccagggatggaggcaagttagcaatgctctctggaaggctggggacctggccaccactgggagtaagacctgacagatggtccctgctgtggttgggggcacctgatcaaactgggaggcttgtggaggcccaggcccaggacaggtctgtgagtttccagggctttgccaccgccgactggtggggtaggtttctatcccaggagtgccccccagggatcagaccagtcacagggacagaggccttgtctcaggcggagagagtggcatgcagagaagctagctggaggtatgggctgggcctgttgcagacaggaataggggaggcagcagggtccctcacctgctccccaaggaacaggctctacagggccccagcttctcctcctccccaggccctgtccatggctgtcctgtgacccagcacctgccaggctcacttggcactgtggttgccccaagcagagccgacaggacagttggtggccagggagtcttgctcaggatggtcacccaggacggtcaagggaagtcactcaggatggtgctgggggtgtggggggatcaggagcaacttccacctgagccccaggaccggagcattgcagcggcgaggggcttgcctccttgtgctgtcgggggtccctcatcccacaggccctcacctcctgtgctgcccctgggcagcctggcctcggagggtcaacacctgagggcccgaggggcatccatgccccctcctccttccctccagccaaaggtggggggcaaagcgcagggaagaaaacaccaggagaaaaccagagagctctcggttctcttttaagagccctgatggccgcagcgcagagcccgaggggagggaaaatgtcgggaaagattctcttccgaactttgcgagtctttgtttgggaggctgggggctgacttcgccgggggccgggccgcgggctcggccgtgcgctccggtgcagcggccgaggagccccggcgcccgccaccccgggacacgccctcgcagtcgagcccggaccccgacccggaccccagcgccgccgggcgagggcgggagggggagcgcttaccagatcgtcccgagcgcgccgcggtccaggcgggcacagcgcagggtcaagttcacgtccggcccgcgggctgcccgaggtccccgggcgcggctggggcagcgggaggcgcgggaggccgaggtccgggtggccgccgcggccgcccccgaagcgctgctgtcaccccggccgcgccccccaactttctgcacagtcgcggagctggaagtttccgggcttcgcggacacgctgggctgggtttcagtcgcggctccgaggttggcaacaaagagggaaagaaggaggaaaagcaggccggggaggggaggaagagaaccgcgcggaggccgcggcgccgagagccccagaacttccaattctacccagaagcttttttcgtcgtgtttttctcttaggtaaacaagcaagttccacgccccagtcctgctggggccttcgccagccaccgctctgggctcatctcccggcgcctcctcggggcacctgagcgttttaagccccactgccaagtgttttggacacaggtttttttgcggggtggtgaggttgggcacaagatgcttcctaaaaggttgttggcacgcagaccatgg

SEQ ID NO: 28737 - DNA, 2300 bp, Homo sapien
ccagcacagtacatagtagggtggttaagagccctgggtttgggctgagcgcggtagctcatacctgtaattccagcacattgggaggccgaggcaggaagattgcatgagcccaggagtttgagaccaacctgagcaacaaaggttaaaaaaaaaaacattagctgggcatggtggcacacgcctgtaagtcccagcaacttgggtggctgaggcaggaggataacttgagcctgggaggttgaggctgcagtgagcggtgatcacgccactgcactccagcaggggcaacagagcaagaccccatctcaaaaagagaaaagaaaagccttgggatgggatttggggtgctctgagtttaaatcccagggcccccactttggtgtgatctcaggtatgctcctgaactctctatgcctgagttcccccagctgtaaaggagggggtgataataatgctgcccagaccccagaggacccctaggaggctcttgctgggcagctggtcctgccccagagccctcccactccacacacccctgcatacgctcaagggcagatgggccccccacaaccaagccaggcctggtggccctaggacactcttggccacaagaattcagattattttctcagcaaatttctgaccagtgtcctggggcctcagcaggggcagggctgcatggtcctgggtctatctggacttgttctggctcagacctcagcccaccacaaggacaacgagtctgggaactcgggcaggctctctgccaaccaggagctgctcttgctcgccgggaccccacagggcaggaatagtgggcattcatatcattcccattttgcaaccaggcagaccgaggcccagagaggccagataacctgcctcaggccacacaaatggcaaacaataaggccaaaccttggtgatggccagactctaaatccggggccacttcttgccttaggaatatagtctttcctggcactcacttagccaaaaatctttctagaagggtggcaggccttcctgccccactcccggaacaggccggctgctttcagggccagaagagccagccctttggaggaggaggcttgtgagagtggggatgggccgcagagcctccccaggcagggcagcgttgcagcttgcatgtggcagggatgtagggtgaagctgtgcagggcaaaagacaggtcagttcccgctggaagtgccccactggggggcctcggtgtgtctctttccccagcactggcatggcacattttgacctgagcaatggtgagctgcccggaatacgaacaggaggaagagaaccttccccaggcagcatgtgaggctggggtggcactcgacacaggacagcaggcaaggacatgccgccctccaggctgagggtcttgggagcctcccctcccagcccctgctgtggcctccccctgggccctggcatgggaggagttaagctgccgcgggcaccttggcacattgcgctgcccagagtgtccggctccccacccccactgcttttcttcctttttgcctttttccttcttaattaatcatacgctgctgcccaatttaaatatggaaatgcccaggccgaggcgatgcaattattcatgagggccgggcggctgtccggggctctcgggctgtggggagtaccgtggcatcgcctccgttctgatgtgtgtgaaattatgtgcacaaaaggcgcctccttatctgggagtgtgaactaaataaataaataagggcttttgtttgtttgccggctcctgcacatggctgctgggactcaagcgctcgtgttgtctgcgcctctgtgggactctggggacgggaggcaggggaggcccccgcaggccggccaggggctgggggctgggggccgggggccggccgccgggcacctggggccctctccctccccaggcaccaccctcaccccgcagctcccccccatacacaccctcgctggaaagttcgccctgcccgggctgggctcccaggcagcctggcaccgtgccaggctcgccgccgagctcgggcagcagggtggggcaaacgcggagcacggaggacggggccgggcgacctgggcaccagcaggacccgaggccaggagccaggggcccagaaggtgagggcaccccgggtgggcgcagggtgggcgctctgtgggcaacgggccctgcggccgggcccaggagcaggcctcgttgcggggttggggggggaggttggagcggaggctggcagaggaggcaggcacaaaggagggcagtgcc

SEQ ID NO: 28738 - DNA, 2300 bp, Homo sapien
cacagacacagggggctctgtctgcttgcccgctgccctggcactgtgactaaccgccccactattgtgagtctgaagtcagccctttgtgtcgtcccctggcgtctgggagcacagccgaagaaccctttccagcagcccccctcattctggaacctgcagccccaacatccattctttcagctctcagggttgctgggggctgatgagccagtggaagtatccctttccctggccaggaagggccaccagcaaaaaagaagcagaaaaccagtctcccctactctgggtggggaagtggggggcacagggacctactaaacctacgtgaccgccgtggtagctgctccacacgcagcaaaggagccattgaaatggggagaggccaaatcgaatatggaaaaaatggcaaaatatcccgttcacagtttcatacgagcaacacactgaaataggattttggaaatttatattagattaaaatgaattttagtactaaagtgaatcttacccgcttattttcactttctgaaaatgtggctattagaaggtgttaaatgacagatgtggcttgcatttgtggctcgcgttgttttgtgtgagctcgtgggtttgggggtgctgggaccttgaaggctgctttctcctagggagacaatggcactccctacccatcattgtcaggaataccaggcccttgcagccacactgtctcctgaccctggccttgcattccccgttttgagaattgggacttacacacgcaggtgtctaggaatcctttgtcaaacactggcatgcacacgagtatgcctgcacacccacgtgcacatacacggacacgcacagacatacacagccctggctcctgtccaccgcaggctggagcaacctgtcccagctagccttcgtggaagccagattcacagggcacccagatgccctccaaaccccccctggacccagacatctgaccctttgtcctgggacagacaggaccaacccaggccacacccgccttccatgggccggggcacttttggcttcctggttcccttcctccataaatactaaaaattctattttatgactacatcagactaaaggccaataaaaccaggtcgaattcattgtcgtatattcattatttttatagtcattttttcttctgattttaaaagaaattaaaatgaaaacatttcatgggccctaggctctatgcctcgtgggcttgtgggcccagaccatccctctgagctcccatgcccaaacccatgcccctgagtctcacccagcgaggagcacagggggcttgcctgccgtttgtccagtgaccagatagataccttctgaactcattccttaagtcctgccctcagtaaacagtgtgtgaatccctcaccagatgccagaaaacgttccacattatttttaaaacagaagtcagtcaggaggaaggcctgggatgccagtgtggttgaaggccccaagtcagtgggagctaagaccctcacccggtacagggctggggtctccaaccggggacctggacaccatgtttaacacccaagagcaggccagcaaacaggcgtgctgctctgggtagcgactggtaccgtgaggtgcagcctccgagagcaccaggccccttctgcctcccaccctccacccctgctgcaggtgctgcggggcccccggttctggatggaggtgcagaggaggctgggctttccggcgtcccccagaaccggcatcggctgctctggcctttcccttcccagggagccacggcgccaggcctgggcccaaaccctgctcaggaaggacgggccggtgcaggagatggttaaaattctgcatcctttttgcatccgcctccagaggaagcgctgctttctccccccaccaccccccccccaacccccccaccccgcgaagcaggaggaggggggaaaaaagctgagagcagcaatttgcaggccttgggatgtttttctccttgacagccccgggccccgcctcgctccggcccttcctccgactgtgcggctggccctgtggccgcggctcggtgtctgccgctcctgcccgggcccctgcacacgcgtcctcccctcggcggggaggccggctaggggcaggcgggcagcgatgcctgcgtcggccacagctgcctggcactgccctcctttgtgcctgcctcctctgccagcctccgctccaacctccccccccaaccccgcaacgaggcctgctcctgggcccggccgcagggcccgttgcccacagagcgcccaccc

SEQ ID NO: 28739 - DNA, 2300 bp, Homo sapien
caaaaaaaggaaaattcacctacatgccgcaatccagaaataatattctgttgtatttccctcccaaccattgttcagcacacatatacatacacagacatgccttacatatgtacatactgtaggaaggtgttgtatcccgtacacacccataccattccaaactttttgtcaataccattttattattatttatttatttattgagatggagtttcgctcttgtcacccaggctggagtgcaatggcgcaatctcggctcactgcaacctccacctcctgcgttcaagcgattctcctgcctcagcctcccgactagctgggattacaggcacaagccaccacgtccggctaatttttgtattttcagtagagacggggtttcaccatgttgcccaggctggtctcgagctcctgacctcaggtgatccacccgccttggcctcccaaaatgtcaccaccgttttaacggtgacacaatgttccattatttcactatgggataatttactgtcatgtcccctatgattccctatgtcatgtcttgctaatatttgtatactgtagtgaacactgcaacctatgatcttgcctatgaagtttgtctgcaacttgggttattaataaatctcaaatgatctattgttaagacgttgaggccactgcattattctaagcgggtaaaggtagaccccatagacttcatttctcctatcatgaacgtacccggctattctagaaatgcctttggatcagttactcagaaggcaatagggaggtctgtgtggttccccctccagaggcctggttctgtggaactttttcctgatggacttgtggggtcggccaaggcacatgcatgattgtgacatgctattgggggattgtgcccttgcactgaagttctggtggatttctgcctaccaagccacttggcactaacccccaaccacgcggcgggtgtaagtcagggccataaagctgaacaccttggaaacattatcccaacagttccgatgaaactttgcacgtctaagaagcggtttgatttggcccaagcatctttctttgcttagaattcaagcattgaagctgctttttacactctctcagcgcccccctcccaatccgtgctgcagtgttcctgggttttctgtcggggacagcctgcctgcatcttcccacctcccagccctctcctgcatgggaaggcctagcgcgctcacctccacagctcgggccctgcgagataatgggtttcatgccactcactccggctccctgatgccctgagcccacctgcaggcctggctttgccgtggggctgtgctggccgtgtatctgggctaccccaaccgggctcccagcacagcaggacaaggaggctgggtgccgtggagcctgaggtcttctccctgaacacccagaccctgagccgggccctcctgaaggaggcagcaagagagaaagaactgccactgaggaccagaggggccaaggcgacaaggaggaccaatcacaaaagcccacggagttatctgaaaatagatgctaggagaattgatgaaagccgctcggcagagagcagagcctggaaggaaacacaggaaaatgtgaccagagcttgtctctgcgtgggagaaaggatgaataatttttcccttatgtgcatttttctgtattttccaaattttctatagtgagcatatgttgctttcatgatcagaaaaggactatattactgatatgattctatttattataagtcaaatagatataattcattatgagaatgaaatgaattattgttaatagttatgagattaacataaacaatcatcgtcgtgtattgccagaaaagttattaagatggtagcagttgttctcgtgtctctagcacatcccccttcagagaaactttcaaatagaaaacgaaactgggcatctctgctatgcaaatattggtggctgttgtcatattcctgcaacagcccttgacagtgggctgggctgggtgctgttctcactttaaatccggggagctgaggcttggaggaataaagggaacagccccaggacttgaacagagcccttgggtcacccatgtctctactgtagcttccaggccgtttcccctggggatccaatgtgtttcctgttgtccccaatcttttaaatttttttccattattagagttagtaccagcagccagggtggaactgcaattcgtgaagattgcattggcttgctttaaaagaatggtatctgtacgggtcccttaaccattcgaggggcacca

SEQ ID NO: 28740 - DNA, 2300 bp, Homo sapien
taagaaaagtaaaaagttgatgaaatttgccagagccgcttgggagccagctctgctgtctggtggttttaacgacatcatcccttccagttctggtcttttagcctattgactcccgcctccttagcaagaggaatatggccctggtctgggcgctctgaaagatgaggcaaagtgaaaaggccccagcctctgggccgcagagcctctaagcagcggtgggcatggcgatggtggtaatagtagcaacagcactctctgctgctgttcacaggtgcccgctgtgtaccggggctcctgctttcagaaaagcaccggctctgggacccaaggtctcggttcagatggggtcgtctttgtttccaggccgtgttgatcaagggcaagtcatttcacctctccggcctcatttccttatctgtaaaatggaggcagtaagtgtcaactttctgaacacatggaaagctgggttcatggtgagcaccccataaatgctattgcttccttgccttatttctaaggctcagactatgcctgcaagggggcattttcattacctccattccaccaggggaagcagcgaacctctgagaggctaagtgggttccccaagattcaaccagctgataagtgttgggccagggcttgaacccagccctgccatccttcaaagcccatgtgctgccatagcattcaccgacgcgtgttgcggcacgcgtgtgcgtggtgccccgggtgtggacagcatgttggtacgcagaggtgcagaggtgtgtgcgtgtaatgtttgcacgtgtgcataggtgtcctcttatttctccattgcgtgaggttcctggtaggtcggcagtttccaaagaggtgagctggtgtttggaggtgcattggtcggagtgggccacacagtcctcagaccacacctggggatgactgtgccatgggctctccaccaccccagggatgcccgtgggaagaagggtggttttccccagtccagggctagccaaagctggcagcgggtggactgggcatccaggcgtgggcttctcgtaggtgctcagcactgctgagggaggctctggctgagtggcctgcatgctgggccttggccagacgcgctgctgcctccttatgtggacaggcggttctgggcgccggccatttgcagactgggaggagtggaagtgaggcctgcgggccccggagaggaaatggcggcgtgggcaggcccagaacaggaccgggaaggcgggccgagggagggagtggcccagaaggcctctgtcggccggtcagcgtgctagcggcctttctccaagaagcggccagctggccaggccttcccgggcaggtctgtttgtctgcccacatgcacacacgtgcacctgcgtgccagggcacggggaggtttagtggccttatttcctaatagggaacatagcagggcctggggtttgatgagacggcgtaacgcccagcacaccttcagacaaaagagaccgtgataaaaacggttcttactacaaggtcccagcttctgtctttaaaatggggcttccagcctccgcctcagtagatggttggaggcactgcatgagatcctggtctggggagcccctggttcgttggtgtttcccttgccttggcctagtaagaggggacgggaggcccaggctctgtggtgggcctgtctcagcccatttcaaaccctacccactgccttcccatgaccttaacaggatggcattacccagcactcacccagatgccagggtggcaccgggtgagtggcagtttcgggtggtcctggagaagggtcctggcatcggctggtatgagtctctgggtttccgagcttcaatgagggctggattcagggtgtgggctgggccagccattccggcaaaaccccagaaggaatccacaggaggtggggaccgggaaggcagccgggttgcgccagtgcctgcaagggaacctctggccccatttcctgggagcctgaccccgccctaggattcctggagtgggtgtgcccacgcttccggcccagacgtgggtggagggatcccaccctgccaggcctcccgcctgtgcggcttctttcaactcgatgagaggaggactcctcctgggcctggtgcttcgaggtccagacgagcagacactggcgcctgtgaccctgcagcggacgcccttcaaagtccgtgtggccgcatttggaagcctgggcggcgtggagacggcgccttcagcttgagatagtaagttgcccaatgcctgcacctgtggagactccc

SEQ ID NO: 28741 - DNA, 2300 bp, Homo sapien
cccgaccaacttctgagagcaaagacacctagagctagagattcagcaccccctgagcctcagtttctccactatgaagtgggatccgtgatctcagccttaccagggctgtgaggattaaatggtccagcccagcctggggcctgcctggagtaggcagcctgctcaggatgggctgtggaaggagggctggggtagacctttcaagtccacttgggcatggggagctgagagctagcatgccgtttaacttggcaggaagcaggccgggcgcagtggctcatgcctgtaatcccagcactttgggaggctgaggcgggcggatcacgaggtcaggagatcaacaccatcctggctaacacggtgaaaccccctgtctactaaaaatacaaaaaatcagccgggcgtagtggcgggcgcctgtagtcccagctactcgggaggctgaggcaggagaatggcgtgaacccaggaggcggagcttgcagtgagccgagatcgcgccactgcactccagcctgggggacagagtgagactccatctcaaaaaaaaaaaaaaaaaaaaaaaaaaaagcttggcagggagcaggacatttggacctcactctgctgcccccttggctgtgtgacatccaggtcacgttgcctctctgggcctcggtctcctcacctgtttaagaggggttgacagtcgtatctgccccctcagcttttccccaggaaggtggtagccacaattagcatttgttgaggctgaccctgcaccaggcccaggataggcggggcttagggaggcccgtctctcgccacgttcccctgctaggggagccccgaggccctctcagtgtcatcctcatgctacactctgtcccagccctgtgcgtcccaagctagggcactgagtgtgccagcacccgcagggacaggcactggaccctgggtggacctgagggtctgtgactacccccccagctgctctcccctagaggccacttccctcaaggaaggaaagaaccttcccgccacctcctgcagtgcggtcagctcaggccagcctgcacagcagggccagaaccagggcccctggggagggatgcctgcctgcccagtgggaggagacggcacgcccgtgaagccgctactcagccagcctgggggccacgagtgctgcttctggtggcgctgtgcggggagggagggggccgagcagggtgggcactcgcatgcctgtgtcttgctggccttcgacagatgacagccctcctcctagggtctccagtgcagagttccttggggacattatggccactcctgtccagatgagagggagccggctgcctgtgacagcgtcgcaaaatgccgccagggctttccctccctcctcctttctctcttcctcgtccctctctggttggtggtttcctgcaggctcccgtccctgctggtgctggccacaatgtccccactcccagggtttcggcgtcccagccccctgcgcccaccgcgcctgcccgccagaatccctgtgcccttggtgcgtgtggcctgccgagcctcgagcccctgttctcctcagccctctttcctcccgcgtccccaggaggtgcctctggaagccacggagtcccatcggcaccaagaccgactgccctttggggtgaggtagtaggttgtatagtttggggctctgccctgctatgggataactatacaatctactgtctttcctgaagtggctgtaatatctgcggtggacagagcgtctggaaccctggctgggagcgggcagggccaggtttgggggcagccttggcagcagtcgggggcaggggccgcctacactgagaagtctgacaggcctaggtgccacttgctgtgtgaccttggacaggcccctgatctctctgggtctcagtttcctcctctgtaaaatggaggcaaatgaggatggaaggagatgcagtgtggagcatcgagggcagaggagagctgagccgaccccaccctctgccccagccgcactgagagaggcgatccacgcagctgtttgtctgacctctgtctcccaacactccccaacactccccccgccatcaggcccaggctcatgggtggccctgagccgtaccctccactgagcaccaggagaaggcaccgtggggccaggggtggccgagacgtttggaggtcacagggctgcgagtattggcgttgcccatcaccccaggttcccagcacgtgccccagcctggccagctcagtggcagggcctctgcctgtggaggaagggaggccaaggc

SEQ ID NO: 28742 - DNA, 2300 bp, Homo sapien
ggtaaagagagacttcctggagctgggaatgggggtgagggtgtgccctttgtgacagttgctcccatgctgggtgtgtgacaaggtcttcgtggccaacagaaaattgcttcatctctctcatctgagcgtggtttcccagaagaaacctaccacccccgggaagcatggatatggggctgtttctggccaggatactcccaagagaagagtcctgaacttgcttctaccctcaggacgcctgcgggagactggctgacagcatttgattgaaaatgcttatttctgggacacatggatgaaaaacaagttttctctccctaaaaccttgggagccccaaaaaacccaagaatatcactttcctatgtctgctgagtgtacgtgaccactctgcacacccccacatagcctttgtccttgttcatgagaatgttcactaggtctttcaacacctggttgacctgggtggtgcatctgggtcacacacctgtgtggaccctggtccttgagagtctgggatatgggtatgccaggtaatgtctttgagcccggaggtcctcatgaggatgtagcccctgagctctgcgtgggcagcccagggtcagcttccctcaccaaacacaacaggatgacaagcttggatgtggctgcctgcacaccccacgagatatgcaggatattacgtgtacaggtcaccctataaactctgaaacaacataaatgatagctattgctggctaacatgtgcaagagaaggtgaggttgccgtgtgccagtgggaaggatatgtgggtgtctggagggtggggcaaagttcaccataggtgcctggctaatcaacaagggtgagtttaagagaagtttgtgaaagggccagttcccgcctgatctccagttcccctgcctaatgagatctgggtttgctttccggagtgggtcctcctgggcgcccgctgccacaaatagcacagtggcaggcacagctggcagcggagggcaggcagtggagcgggcatagcacacattgcgttcccgaggaggggagccctgatgtgccggcacccaggggctttgtgcattccgctccggcagctcgagcgtcacggcccgaacaaagcggctttgcagggcgctctcctactcctcgccattggccaccgggccgcgacctctccttgctctggcagagtcccagcgccttgcgtaggcacaaagtcagcccctcaccccccagcgcatgaagtaggggcgggcatggctcttgggccgctggagaggggtggggttgtggggtcggagctggcggcgcctccccgagcccgtccgcgttgcccttcaccctcctcgttcccccgcccaccacaccgccctggcacctcccgccacctgtttccttgtcctcccagctcgccttccccttctccttattttgcatcctggggttccagggacaaggtccctcccgggccgcctcccaccctacgcacttctgagcctcaagggcacccggtcccgggtcccgggtctagaccggctcatcgcacagagtagcagagccgggctcatcgaggaggcaggaggggctcgccagcgtggcacgggcgcccggcgggaacctccacccgccccgcggccgcgcgtccccgcctcgaattcagccccgccccggtgcgccgggctggaggggcgctgacgctcagcggtgtcccatcggtgaccttggacggtccctccacctctccggcctcagtttcccttggctgcagcggccgcggggcgctaggtgggagccgctgagcgctcccggggccccgcccaccgcgagcagccaatcgggcgccgccctccggggggtgtgtcccggggccgaggcccggggcccggagggcgcgcggggcgggcggggcttccgggtcgggcctcgggacactggctcgcgcggaccggggcagggggcgggccgaggggcggtgcgtgtcgcgggggcgcggctggcacggacgcgcggaggcggcgccgggcatgggccgtggacgcggcggccccgcggcgggggcagcgggcggcgggggcggaggcggccgctagcgccctgcccggcgccgcctccttcggcgttcgccccacggaccggcaggcggcggaccgcggcccaggtgcccgggggcgggcgggcgggcgggcgggaacgcgcgcgggggtccgcggtccgggcttcccaggtcccgggacccggagggcggcggacgggggaggggcaggggctgggcggcgcatgcgcggggcccggggtctcggg

SEQ ID NO: 28743 - DNA, 2300 bp, Homo sapien
catgagaatgttcactaggtctttcaacacctggttgacctgggtggtgcatctgggtcacacacctgtgtggaccctggtccttgagagtctgggatatgggtatgccaggtaatgtctttgagcccggaggtcctcatgaggatgtagcccctgagctctgcgtgggcagcccagggtcagcttccctcaccaaacacaacaggatgacaagcttggatgtggctgcctgcacaccccacgagatatgcaggatattacgtgtacaggtcaccctataaactctgaaacaacataaatgatagctattgctggctaacatgtgcaagagaaggtgaggttgccgtgtgccagtgggaaggatatgtgggtgtctggagggtggggcaaagttcaccataggtgcctggctaatcaacaagggtgagtttaagagaagtttgtgaaagggccagttcccgcctgatctccagttcccctgcctaatgagatctgggtttgctttccggagtgggtcctcctgggcgcccgctgccacaaatagcacagtggcaggcacagctggcagcggagggcaggcagtggagcgggcatagcacacattgcgttcccgaggaggggagccctgatgtgccggcacccaggggctttgtgcattccgctccggcagctcgagcgtcacggcccgaacaaagcggctttgcagggcgctctcctactcctcgccattggccaccgggccgcgacctctccttgctctggcagagtcccagcgccttgcgtaggcacaaagtcagcccctcaccccccagcgcatgaagtaggggcgggcatggctcttgggccgctggagaggggtggggttgtggggtcggagctggcggcgcctccccgagcccgtccgcgttgcccttcaccctcctcgttcccccgcccaccacaccgccctggcacctcccgccacctgtttccttgtcctcccagctcgccttccccttctccttattttgcatcctggggttccagggacaaggtccctcccgggccgcctcccaccctacgcacttctgagcctcaagggcacccggtcccgggtcccgggtctagaccggctcatcgcacagagtagcagagccgggctcatcgaggaggcaggaggggctcgccagcgtggcacgggcgcccggcgggaacctccacccgccccgcggccgcgcgtccccgcctcgaattcagccccgccccggtgcgccgggctggaggggcgctgacgctcagcggtgtcccatcggtgaccttggacggtccctccacctctccggcctcagtttcccttggctgcagcggccgcggggcgctaggtgggagccgctgagcgctcccggggccccgcccaccgcgagcagccaatcgggcgccgccctccggggggtgtgtcccggggccgaggcccggggcccggagggcgcgcggggcgggcggggcttccgggtcgggcctcgggacactggctcgcgcggaccggggcagggggcgggccgaggggcggtgcgtgtcgcgggggcgcggctggcacggacgcgcggaggcggcgccgggcatgggccgtggacgcggcggccccgcggcgggggcagcgggcggcgggggcggaggcggccgctagcgccctgcccggcgccgcctccttcggcgttcgccccacggaccggcaggcggcggaccgcggcccaggtgcccgggggcgggcgggcgggcgggcgggaacgcgcgcgggggtccgcggtccgggcttcccaggtcccgggacccggagggcggcggacgggggaggggcaggggctgggcggcgcatgcgcggggcccggggtctcggggtctccgggtcccggggacccgggggcccggggtgcgcggctggggacctgagggcgaggagcgaggacacacaccgaggactcttgcgagggatctcggggcccagctcggcctccctcctagcgctgggggcctgcccggaacccgagtccgcggctgtccctggggtttggcgctgcgcggaggtcgggtctggggaccgcagcgactctgggtcttcgggttgtcccctcggagggagggcccacgggcggggacatcgggacttgccctttcctcggcgcagcggagctggggcgtcgccgactcagaaggtgctttccgagacctccagggatctccgaggcgaggaaacccgggccccggacagaccgaccctgggtgggtgcgcccggcttctgccgtcggacggagacgcgcgt
